United States Patent Application Publication US 2012/0017292 A1 - sequence listing, part 8

SEQ ID NO: 29350 - DNA, 1146 bp, Zea mays
  Peptide Sequence Number=SeqID_72725
atgaccaccagccttttggtggggagaagcaagtcgggctgcggcctctgccccgccctcagcttcaaggatgttcatcatccgggctggggaggagggcgcaccgagttggggcctgccaccgcgtgggccggcgacccgcttcttcctccagcattcgagggagaagggcatcctcaagctctgcggaggaggcgtcctccagccatgcgggggaaggtgaactgctgctacctggctagggtgccgctgtatgtcctcctcccgggcgacggtcgtgccgtgcgcaggtggctactgtcaccagacttgcagagggggcgaacttcgacaacgcgggcccggtcggccgcaagcgtcgtcagctgtagcgtgcctggcatgctggctcagctggctctggcgccgcctccgatgcttcctcctgccgcttggtccgggcatggctgtccgtccaccgcacgggcgactgtcgcgacgtgcgtaggtcgggcatgtctgcggcccttcccgcgccgccgactgcaccgggggatcgtccaagacgtcgtacgccgcgagggcggagttcgtgttcttggattgtcttgtcctcactccggcacgacgcctccacgcggaggctggcgtcggcccgtctgcgaggacttgagtggggatctaccggtgcaggctagggcggccgccattcgtcgacatggcgctggcgcgcaggtggcagttgtcgtcggtgctgaggtggtggcagccagaggaggttgtctccgccgacgagaccgtcggcgccacctgcggtcggacctccgactctttggctttgatggcttgtcctcgcccctcccgcccgagacggaggtcgttgtcgcgctgctggtgcagtggttgccggggagccacctggagtttgttatcccgcaggccctctggtgtggaggttgttcatacccgcaggagtggaaccggagtcccgaccttcggccgctctgcgatgagctgaagccggaggcagtggtgtcggcacggacggaggcggccgaggaggtgcagcagcggcggctggagcttggccaggtcgtccacgagcgggaccaatcccgaagtcacgctgccgaggtcgtgagccaggctgaggtcctcgggggatag

SEQ ID NO: 29351 - DNA, 957 bp, Zea mays
  Peptide Sequence Number=SeqID_72726
atggggagcgcccgcagttcttccgtcttgtcgtcattggaggaacgcaacttcgtggaagttggtacctttcagccatcggtcggcttcaaggattttcatcaggatgttcatcatcctggctggggcggaggccgggctgagccggagctctacctcccgcacggcgcgttgggctcgctggctcagctggctctggctcggctcccggtgccccctcccaccacacgggcggttgtcgcgccgcgcgcactggaggaccgcccaagacgtcgcgcgctgctagggcggcgttcgtgttcttggtctgtcctgcctttgctccggtacgacgcctctgcgtggaggtcggtgctcgcccgtccgggaggatccgagtggggatctaccggtgggcagatggcttccgtcgtcggcgctgaggtggtggcggctgaagaagtcctcgtcgccgacgggatcaccgccaccatccgcgctctgggcctccggctctttggctttgatagcttgtcctcgcccctcgagtggggacgtgggcgaggggctcgttgcagcagcgtccgccctgaggccatcgttgctactgtttggccacctggagcggatgtcattgtcgctgctgccggagcgggcgtcggcgagccaactggggttttgtcgccccgcaggccctccaatgtggggggttgttcgtacctgcgggggcggaactggagttccgtttgtaatggcaccttgagtgctagtgtctgttcattgtggctgtcggggcctgaacatgagtccctcggctcggtcggccttgccgcccgaggcttctcttgcttagttaaagaaaccctcggccgctctacgatgagccggagccggaggcagcggtgccagcacggacagaggcagagatggctcgaaaagaagcttcgtcggccggagcctggtcgggccgtccactag

SEQ ID NO: 29352 - DNA, 657 bp, Zea mays
  Peptide Sequence Number=SeqID_72727
atggctgaaaggtaccaacttccacgaagttgcgttcctccaatgacgacaagacggaagaactgcgggcgctccccatccgggggctcggaaggtggaaggggcaggcggcacctttggcaggcaaagcaggcgacgcttcacctccgccataatgaccgtgtcaaaaaagggaccgggaaaggggatactccgaaagggatccttctccgcgaaggaagcgggcctcgagcccccctactgatcagaggttcgaaggctggcccctcggaagggttcgacagccgccttagagcactcgggccccgagccctcctactgatcagaggttcgaaggctagcccctcggaagggttcgacagccgcctcagagcactcgggctccgcgcccaccactggacagaggttcgaaggctggcccctcggatgggttcgacagccgcctcaagccactcgggctccgcgcccgctactgatcaggggttcgtaggctggcccctgaagggttcgacagccgcctcagagcacgtagagcgagggatgactctggcatcaacataccagcccgagaacttggaacctgactatgcaccctggctacgaccagttcgcataagggaacaaccataccggccgaagcatcacgaaacgcgctaa

SEQ ID NO: 29353 - DNA, 1575 bp, Zea mays
  Peptide Sequence Number=SeqID_72728
atgccccagactaatgctctccaacttgcgagcgaaaaaagagattgtctaatatgccctatcttgcttttgtccgctagcaggtcctctagtgcagttttgctgtatgaagttaatgtgataccaagatttaacttcccggctatatttcttgaaaggattataaggtcagatcttcctgtaaatcttcgtgccttggcttgtagagctgaaaagatttatctggaaaatcaaggatgtggttcaagaaaattttttgttgaggacttgaagccatcatatacttctcagcttaataacttccatagtacgacagttgagacttctaagtttaaacaagcacctcccaggtctggtgttagcagtgtgcttccttcaccttcttctgaattgattagcaaatggggtgtatatggaaacatatgcagaattgataagccttgtgtggtagatgagatccatcttcgaagatttgatggcatgttggaacatgagggggctcataggtgtgtttttgctagtatcactgtgaaagcaccggttcgagaggtatggaatgttctcacagcatatgagaatttgcctgaattcgtaccaaacctggctatcagtaggattgttcttcgtgataataacaaggttcggataatgcaggagggttgcaaaggcctgctttatatggtccttcacgcccgtgttgttatggatcttcgcgaaaaacatgagcaagagatcagctttgaacaagtcgagggtgatttttacacatttaaagggaaatggcgcttagaacaacttggggatcagcacaccctgttgaagtacatggttgaaactaagatgcatagggacacctttctctctgaatctatccttgaagagctgaatgctttgataaagtttaatgtctttagagatagtaaagcagactgttcatttttcatgaatctgttacaggtcatatatgaagatcttccatcaaactttaccatgaagcagagaccaaaagtcccaggattgcaaaaggacatcgaggtcctaaaatcagagcttgataatttcattgcagagtatggtcagtatggtttcatgcctaagagaaagcatctccggtctcatggaagagtggatattgagaaggctataacaagaatgggtgggttccggaagattgccagcataatgaacctttctctttcttacaaaaatcgaaaaccaagaggctattgggataatctggagaacttgcaagaagagatcagccggttccagaaaatttgggggttggatccttcttatatgcccagtagaaaatcttttgagagggcaggtcgttatgacattgctcgggcattggaaaaatggggtggggtgcaggaggtttcacgccttctttctcttgaactaagatatcctagaagacaagcagacccggacgatgagagacagtctgaatccccgtctgggatgatgaagaagcacggagtgaaacctgatgaaggcaatgtttccccaaatgcgcagaaatggctcctgaagctgaaggacttggatgtcaattgggtggaatactag

SEQ ID NO: 29354 - DNA, 279 bp, Zea mays
  Peptide Sequence Number=SeqID_72729
atggcgatgggcgatggccgatggcagacgcagaggcagctggctagcagatcaaacctaagctccccgctctcacatgtggcatggcgtcttctcttgtcctctgcgattggtaagcttccaacgagctcaggctcaggaggaagaggaagaactttccagttttcatcttctgacgaaaattcctcaggacaggagacgataatgctctctgttccggaccaggttgacttggagcagcagttgggttcacatgtcgatacccctgacgttaattaa

SEQ ID NO: 29355 - DNA, 760 bp, Zea mays
  Peptide Sequence Number=SeqID_72730
cccgagtccgagccctggggttcgggcggagcgggagttcgccgtttttccgggttttagcccgaagtccgagccctgggatagggcggagagggatttcgccgtcttcccgggttttagccccgagtccgagccctggggtcgggcggagcggagttcgccgtggcgcctttggcaaggcctaattgcctgtcagactcactctgtcgagtggcactgcagtcggagtggcgcaggcggcgctgtccttctgtcagactggccagtggagcggtggagtgacggcgtcaaggttgcttctgagcgaagccaaggccttgggcaagccggtgatgtgtccgccataaaaaggggggcctcgggcgagacggaactttatgctgatgggggttaccagctgagaattaggcgtcttgaggcccccgagcctctgcacagggcgagaggacgatcagggacagactcggctttttacatacgcccctacgtcgcctttccgcaaggaggaggggggagtgcgccatgttaccctcgatgggcaccgaacatggtgtctccggtgagctgcaagcgggtaatccgagtggacgtccgtgccccgttcgttgggggtcggctaggggcccagaggcacgcccaaaagtacctgcgggtgacttgccggacccggtcccctggcgacggggtccgagggctcgatgcctccctccgatgggattccgttacaagatcgttcccgctggtctcggatatgtcctag

SEQ ID NO: 29356 - DNA, 522 bp, Zea mays
  Peptide Sequence Number=SeqID_72731
atgaaagctctcgcctcgcccgccgcctccttcctcccgggtatcccgagccctagccatctcgcgcgcgcgcttccccgatccgcggcggccgcgctctcgcggcccccttccgggcgctccatcgccgccgcggccgcggccgccacaggggaccactggggcgccgaccaccagcactaccacggaggacgcgcgggcgcgtcggaggccgggcctaccgcgtcggcgcgcggcgtcaagtgcgacgtggacgtggtgtcgtggcgggagcggcgggtgctcgcgtccgtgcctgtggccgccgacgtcgacacgctgtggcaggtcatcaccgactacgagcgcctcgctgacttcatccccaacctcgtccagagtgtgacgattccgtgtccgcatgaagggcggatatggctggagcagagaggcctgcagcgcgcgttgtactggcacattgaggcgcgcgtcgtgttggatctccaggaaatccctgactccgtatgtgctgtcgcagattga

SEQ ID NO: 29357 - DNA, 567 bp, Zea mays
  Peptide Sequence Number=SeqID_72732
atggcggctctcagctctcttacggaagtaggaggacgtcagcaaggactcaaccgctccgacagctgtccctccatcaggctccgccgctcctccgacggccacgacatcacaccagctgggtgccaagatctctccggctgccacatcggcatgaaggaccagagccctcttagagggggttggccgcgcgaggacgaggacgagacaggcgctctcttggggccgctcgctccctctcctgcgtggacgcttgtaaccccctactgcaagcgcacccgacctgggcgcgggacgaacacgaaggccgcgggatttccacctctctcacgcccatctccggccacctcgcttccccccttcgcgctcgacccatctgggctggggcacgcgacactttcactcgtcggcttagggacccccggtctcgaaacgccgacaccagcgcgcgcagaagtcaggcacgcccatactggcgcaccggacactctacagtacatgtccgttggttacgtagcattaggcagaaacaggagatttgtgccaatgcatatcttcttgatgtaa

SEQ ID NO: 29358 - DNA, 465 bp, Zea mays
  Peptide Sequence Number=SeqID_72733
atgccatggtgtataagctcagtgggagccagagaggctgttggtggccggtataaggcagtcggaattaggttggactctggtgatttagcatacctatccgttgaggcccgcaagttcttccatgcagttgaaaaagaatttgtagttgttggctttgggaaaacaagtatcacagcaagcaatgatcttaatgaagaaactatagatgctctgaacaagcagggccatgaggtagatgcatttggtattggcacctacctagttacatgctatgcacaagctgcacttggttgtgtattcaaattagttgagattaacaaacagcctcgtattaaactttctgaagatgtcatgaaggtatcgataccatgtaagaaaaaatgctacagattgtatggcaaagaagggtatccgttggttgatataatgaccggagaagatgagccaggtccaaagttgtga

SEQ ID NO: 29359 - DNA, 597 bp, Zea mays
  Peptide Sequence Number=SeqID_72734
atggctggaacgcaagacgccacagaggacgccggtgatgttggtgctgcggctggcgtagtggtggactgggaagaggatcgccgggatcgtgataccaggttgtcaagggcgttaacccctcgagcagctggaccgcggctacgtaactcgtacccgctgtccgtcttctccgacgagcaatgttgcagcaggaagattgtttgggataccaatacgtgggactcattcacatgcatttgtgagctccttcatggtcacaagcaagtggttcagagtttcagcctgctgattgcacaaaggacagctggaaggggtcttgatgaaattactgacaaaacacttactagttctgatggttcaaacacatgtgaagattttatctctctggtgcagaactggctgatcaggattcaggattctagttcattgcatggcacctttggagaaacgagccaaagtgagttggctgcattcacgtcatatgcactggcatttccaaattccttcctggccttggttgacacatatgatgtcatgagaagcggagtgccaaacttctgtgctgttgctttggccctcaatgatatggggtaa

SEQ ID NO: 29360 - DNA, 768 bp, Zea mays
  Peptide Sequence Number=SeqID_72735
atggcggcggcgaacggggacgcgtgccgcagcgtcggcggggtgccgcgcccgacgaaccccatggtgacgccgctgctcaccgacctgtaccagttcaccatggcctacgcctactggaaggccggcaagcacctcgaccgcgcagtctttgatctctacttccggaaaaatccatttggcggggagttcaccatcttcggtggcctcgaggaatgtataaggttcattgctaacttcaagttcacggaggaggaaatcaaatttcttcgatctgtcatgcctgcatgtgaggatgacttctttgagtacctccgttcgattgactgctcagacgtggaggtttatgccataccagagggttatgctgtgttccctaaagttccactgatgagaattgaaggacctgttgctgttgtccagcttcttgaaactccatttctaagtcttgtcaactatgcttctctggttaccacgaatgcggcacggcaccgacttgtagctgggaagtcaaagaatttacttgaatttggacttcgacgggctcaagtgggtcttacttttcatactattttgcttgctcatccactaacctttgggcctgatggaggaatcagtgcatcaagatattgttatatgggaggatttgatgcaacaagaatagtaatgtcaagggcgttaacccctcgagcagctggaccgcggctacgtaactcgtacccgctgtccgtcttctccggcgaggtattcctctgccgtaggctttag

SEQ ID NO: 29361 - DNA, 897 bp, Zea mays
  Peptide Sequence Number=SeqID_72736
atgtcgtcgtcggcgaaggccaaggccaaggcgagcggcggcaagcgggctgcggcggcgaaggaccccgccgaggcggtcgtttccgacaagaggcggcgggagcgcggcggcatggacgactccgaccacgagttcgacaggtgccttgcctgcttctctctccccacgcctttcgtgttcgctgctttcgattcgccgcggtccgtgagcgaggctgttggcagtgacatgaaggagatcgtcacgctgctgaagcacatcaaggacaaggcccacaaggacggccagaagaagaccgagcaggccatttccagctatctggagtacatcactgacaagttttggtatccttcagcgtggcaacagagattcagactatggtacaggacaccaagaataggcttgagaaagaaagttgtagctataaaccaagaacttaaacaggttcttggtgataagtactgtgaacaccctgaatggaatgtacccctgacaattgtttttatgtgcgtgcacaggcagagttttctgaaagcattgtcaaagacttcaaaagagtgcgaaagtttgttgaagaatgagtacaccaaatttctagcaacacatgacaagttctgcaaagataaagttgcacacatacagaatttcaaagacctgttctcaaagtttgaagatgataaagagaaattgcttgtgcagtatgaactgcaaaggaagaaggagaaggctactctatctgaacttgagaaaacattttcagagaagatagcaaatgctgaagaatctctgaagaagatgaagcaggatgataaatcaatccacatccttcgcaagtccattggctcatttctgagtggtgaccctgatgatcagtctggtcaagatgatgactga

SEQ ID NO: 29362 - DNA, 1539 bp, Zea mays
  Peptide Sequence Number=SeqID_72737
atgggacttcttgccagccacaacattcaagccaacttcgcatcaaggagcaaccatgtgaagtcaaatccattgaagacgatggtgcgattgggtggactacggtatatcgaaggcgacgtggtagagtcaattcgacagagcctttatgtcacccaacaaccaggctcccaactcaccctcatccgatcagaaaaaatttatagggccattgattgcagggatccgctgaggtgcctcagttgtggtgttggccacaagcgagctggcaaggctgagtacccacgcggcgtgggcctagctaggtggtgttcgaccgacgacaagtacaagcacagtgagaagggccttatgctccagctccctgttcatggtgaccgcatcaactttgactaccatgtttgtctctgcctcgaaggcattcttttgcatgcgtggaacgagggcatcgccaagcgggcggtggctatgagctgcgtgctagactacgtcgagtctcaatcactacaaaaggaggacacaaggacgctcaacctctgggcgtgggcgtggaacccttcagacatcccaaaggtaacttggctaaccattgttggcaggaacatcactgtccacaacatgccatcggcgggacaaagtggcttaaccttcagggtcatcgtccaccttgaccttgtggagggttttccgggcaacgaggatcaaggaagtacgcgtgcgttcgactggaggcttggagttgttgatggcgagagtgctccacgcgacatgcacgaccctccacctcgatgtaacgatcatcaccgagacgacgatgacaacgaccgccgtagacgtcgcctacaacgtgaggtcagttggagcatgcgtcttttccgaagcatctcgcgtgctccaaagggctgtgagcgagagcgctcggggtcgcgtcgtgaccatcgacacaacacttccaggaggtacatgtccggcgacgcgcctggaggtgtaaggcatgtccaacaacctcgccaagctgctgctatgccagcggacgcgtcccatgtcggcatcccagggcgtggcgtggagaacgtgggttcccgtccacacactgggcttgcgcaccagctgcgtgagggctccttgatgacacgtgggcgcagccgcatgcgctatctcccccggggcgctgaaacacctgctgtggccacggctgctgcaacaacagctcagaacattaaacatcgacatgtattcaatctctccgcgcggacacaatgcaacctctgtcgcaagcttggcctcttggcgaatgatggaactcctaattttgataatgctttccaggactttcaggcttggttccagaaaccattatctaaggaggcaggggcagctttggaagccctattcaacattcatatgccggacactgaacacattgacaaggcactgatggggattgcaggtgaagctatagaagaaacacaggatgagatggacaatctgcaagcggaagcaaggagcaatgctgcagcacatctggtggttgtctga

SEQ ID NO: 29363 - DNA, 393 bp, Zea mays
  Peptide Sequence Number=SeqID_72738
atggccgattctaaagatctcaacagggcttctccaaacagcagcacaaggttgactaatttatcggccgctgagcataaaagattaaaagatgacatgaagaaaatagacgaggaggtccaacgacaaaaagatcaggtgctcaaggtggcggataaatggttcctctcgcacttcagggtggattgccaccagaagaccgtcctagaaagggaaatagacgccgattacatgtcatccgtgctgcaacagctccccacaataggtgatgccaggcgccaaaacaattgcgccaaacacatcggcaacaaatgggtttccccagccatattctggtatgccgatggactcatatccaggacgaccgtcaccaccatcttcgctaaatggtga

SEQ ID NO: 29364 - DNA, 1557 bp, Zea mays
  Peptide Sequence Number=SeqID_72739
atggcccaagggcacatttccctttcagcggcgaggatcgtggggcgctatgtgccgaggacagagggtctgcggagctgggatatccgtgggtccaatgttaggttgaatcgggtcttcgagttaaactgcttgccatatggtggctatcccggggaagacgctgccgaccgctgcggaaagaaaccggtggacgtgaccgaggaagggccttcgcaggaggctgccccggccactaagaagagaaaattaggtactggagttgggggagtgggggtctctgatagttttgttgtcgatttgatggggacgtgcgcagcccccgggggaaggatgtcttcgcccgagctccgggagtcttcggtgcgaatgctcgaggttaccgggggtcgatggcccaagaatgttccggtcccccgcgtggctggcgaagacttctttacgtctcgcatggcttgcgaattgaaggtttttccttacgggcggaatattgctgctgttgtatcggcagtgatggagaggggccgtcaagacaccgcgcagaaacgtcgagctgtcgtcaggatcgcggatcctatgcgcgaggcgaaaagggcgcgagggagcacgaaggctactgcctctggtggtagcaaacaggcgctggctgcgaaatcggccgctcccgtgcacagcaaggcgtcggccagtgcgaaggctgctgccgctggcgggagcaagccacccctgggtgggcttgtgaaagaacgaaggtcatcttcgccggtgcaacgtattgccgacttcggcacggacatcagtgatgtggattatcttgttgtgactgagggaggcgtcgcagcagctgtcacagcagctgaagcaggatttgggtctcatgggtttatgtgtcaggcgaccgacttcgccgacctcgtcgcgtcgggtgccttgactgcggacgttgccgtcgaggttgagcatctccgggcacagcatgcggatgctgtgcgggagaagtcggctgcggaaagcaaaaatcgcaggctggcggagaaggtggccaccatggaggccgagaagacgaatctccgacgccagctagcggaggagaggagggaggcgaacaaggccatcgctgacgcgcatgctgcgcaggccgaggccaaagtggcacgggcggagggtagtctcgcccgccaacgcgtcgaggagctggaggcgaggttcaacgccctgcgcagccgcgtggacaaggccgagacatctatgcgcgcggaggtcgagcggacgcacgcgcagttcatggacgtgtaccgcgagctgggtgtgcggactgctgactttgaagtgcccagccaagaagcgggccttcgcttcctcgaatggttgcaggaggatctgctagtgttcccgaccattgtgacaggtttcatgtccttcgcctccctcgtcacctgcgagggggccatgaatgctttgtcccgcgagggctgcaatcactatgaggtcttcgaccgagaggacgaaaacttggaacgtgaaatcttcagggtcgaagaccccgtggtgaagtag

SEQ ID NO: 29365 - DNA, 927 bp, Zea mays
  Peptide Sequence Number=SeqID_72740
atggcctccgtcctgccggatactgcgtcggatggcaaggccttgacggacgcctgggactacaagggccgccccgctagccgcgccaccaccggcggctgggcgtgcgccgccatgatactaggcgcggagctgttcgagcggatgacgacgctgggcatcgcggtgaacctggtgccgtacatgaccggcaccatgcacctcggcaatgcctccgccgccaacaccgtcaccaacttcatcggggcttccttcatgctctgcctcctcggcgggttcgtcgccgacacctacctcggccgctacctcaccatcgccatcttcaccgccgtccaggccacgggggtgatgatcctgacgatctcaacggccgctcccgggctgcgtccgccggcgtgtgcggacgccaagggggcgagccccgactgcgtgccggcgaacgggacgcagctcggggtgctatacctgggtctgtacctgacggcgctgggcacgggcgggctcaagtccagcgtgtcgggcttcggctccgaccagttcgacgaggcgcacggcggcgagcgcaagaggatgctgcgcttcttcaactggttctacttcttcgtcagcatcggcgcgctgctggccgtcacggtgctggtgtacgtgcaggacaacgtgggccgccgctggggctacggcatctgcgccgtcggcatcctgtgcgggctgggcgtcttcctgctgggcacccggaggtaccggttcaggaagctggtggggagcccgctcacccaggtggccgccgtgacggccgccgcctggagcaagcgcgcgctgccgctgccgtccgacccggacatgctctacgacgtggacgacgcggccgccgccggcgccgacgtcaaggggaaggagaaactgccccacagcaaggaatgcaggtaa

SEQ ID NO: 29366 - DNA, 876 bp, Zea mays
  Peptide Sequence Number=SeqID_72741
atgacacgcaggttcctggaccacgcggccatcgtcgtcgtcgacggcggcggcgagtcgtcaccggcggcgagcaagtgggcgctgtgcacgcggacggacgtggaggaggtgaagcaggtggtgcggatgctgcccatctgggccaccaccatcatgttctggaccatccacgcgcagatgaccaccttctcggtggcgcaggccgaggtcatggaccgggccctcggcggcggctcgggcttcctcatccccgcgggctccctcaccgtcttcctcatcggctccatcctgctcaccgtgcccgtctacgaccgcctcctggcgcccctcgcccgccgcctcacgggcaacccgcacggcctcaccccgctgcagcgcgtcttcgtcggcctcctcctctccgtcgccggcatggccgtggccgcgctcgtcgagcgccaccgccaggtggcctccggccacggggccacgctcacggtgttcctgctcatgccgcagttcgtgctcgtcggcgcgggcgaggcattcacgtacatgggccagctcgccttcttcctgcgcgagtgccccaagggcatgaagaccatgagcacgggcctgttcctcagcacctgcgcgctcgggttcttcttcagcaccctgctcgtcaccatcgtgcacaaggtcacggcccacgccggccgtgacggttggctcgccgacaacctcgacgacgggaggctcgactacttctactggctgctcgccgtcatcagcgccatcaacctcgtcctcttcacgttcgccgccaggggctacgtctataaggagaagcgcctggccgacgccggcatcgagctcgcagacgaggagtctattgccgtcggccactga

SEQ ID NO: 29367 - DNA, 333 bp, Zea mays
  Peptide Sequence Number=SeqID_72742
atgggccccggatccaaccatgaagacagagaacccagggcccaggacagcccaaccacccccaccatggttgacaccactgacgtcgcccctaacctggggtcaccggaaccagccaccaaggcaccggatctgccatcccagcaggcccttgttggggcgaaggcgaagacgccacccttcgctccagccttcgtccatctcgctgcaccaacggaggcaaaacgaccggcggtgtccacccttcgtcctctacactacgagacgaaggcctacgacgacgacgccccgttccatggcctggaggcccacgtgggatccggcccattgtag

SEQ ID NO: 29368 - DNA, 165 bp, Zea mays
  Peptide Sequence Number=SeqID_72743
atggtgaaatccttcattgttcatcgttcgtcgttcgttggtctggaaacagcaattataattcaaaatatggtgctagtacgactcttggcgagagcgcaacgtgaaactttcactaagattaaggtactggatgactgcatcatgcagagacgatttgattag

SEQ ID NO: 29369 - DNA, 420 bp, Zea mays
  Peptide Sequence Number=SeqID_72744
atggcacccaaacgagctaactcgaaggcagcccccatccgtcgacgaagcagcgaaggcagccctgctagccgagaaaaaaagggcaaggacgtggccgacaacacccaccaaggagctggcgaagacgaagcacacagtaagagacaacgcaacgaccaacacactccagaaggcaccctccgcacctgcagctctgaagggcagccacaagtgccacccccaggcttcgccccaccagaggtcaaggacgcaacagaggacggcgaggtcctcggcgtctctgcagaagaacagctacagctacgggccctgcgcctcaagaaccgcaacctccagaaacccttcatcccgcacgccgcagctttccaaggcatcaactaccttgacgagcggagccccctggcgccgcaactgtag

SEQ ID NO: 29370 - DNA, 1200 bp, Zea mays
  Peptide Sequence Number=SeqID_72745
atggctgaaaggtgtcgatctccacaaggccgcgctcctccaacgacagcaagagcaaggcggcgtgggtgctccccatccgggggctcagaaggcggaaggacgcgacgcatgaggaaagtgcgaaggcatggctaccacccaggaggtcgatccctttttaaaggcgactctccctgctcgcatcctcagccgtcgtggactaagtcttcaccaatacgctccaagatcctccccctacgacataggggctgggccccacgcgtcatgcgagctggcccaggacagaagaagccaaaccgccacgcacggggcacgcaactgcccagcggttacaagcactcctccatcttcgccccaaaccagcgggtgaaagggcagaccgccatgcaggcggcatgcaactgcaccaagggggcgcaccgtttcaacttcgacgcatccagcatggaggcccaggcccacacatcatgtaaccggcacgccggttactacgtgcaaaaaactgcagcgccacttgcgccagcgccatgccttctcgactacagaaccggtgccacgactcgaggcaaccctgcgcacggcccagcagtgccaaccaggcacgtcggtcacgggtcagtcagccgcgggagaaggcgcgacggtcgatatggccagaagtgggccgacagtaatggcggcagcaggcgagcagaagcggcggtcaaatcgtctgcaggctcacgtcccctcctggaacaggccgggaaaggggatgctccgaaagggatccttctccgcgagggaagcgggccccgagccctcctactgatcagaggttcgaaggctggccccccggaagggttcgacagctgcctcagagcacatgggctccgcgcccactactggttagaggttcgaaggctggcccctcggaagggttcgacagccgcctcaggccactcgggctccgcgcccactactgatcaggggttcgtaggctggccccccgacgggttcgacagtcgccccagagcacgcagagtgagggatgactctggaggctcgggggctgctctcgcaaacccgttttcggccaacccgttgacagcgtcaacataccagcccgagaactcggaacctgactatgcacccgggcaacgactagttcgcatgagggaacaaccagaccggccgaggcatcacgaaaggcattaa

SEQ ID NO: 29371 - DNA, 660 bp, Zea mays
  Peptide Sequence Number=SeqID_72746
atggagaagcaaccttggctagatcgcctcgccagccgaccagatcgcaggagcattcaatgcgaggatcgcctgacaccttatcctgacgcgcgctttccagtcgacaaggccgaacagccaagtccagcctcgggcgccataggaatctccgcctcgcccggccccagggctcggactcaacctcgactccggaagatgatctccgcctcgcccgaccccagggctcagactcgacctcgctccagaagacagtctccgcctcgcccgaccctagggctcggactcgacctcgcctcggacgatagtctccgcctcgcccgaccccagggctcggactcaacctcgacctcagacgacggtctccgcctcgcccaaccccagggcttggactctacctcgacctcggacgacggtctccgcgtcgcccgaccccagggctcggactctacctcgacctcggaagatgggctcggactcaacctcgacctcggacgacggtctccgcctcgcccgaccccagggctcggactctacctcgacctcagacgacggtctccgcctcgcctgaccccagggctcggactctacctcgacctcgaaagacgttctctgcctcgcccgaccccagggcttggactcaacctcgacctcgaatga

SEQ ID NO: 29372 - DNA, 462 bp, Zea mays
  Peptide Sequence Number=SeqID_72747
atgcagcagagagctcaagcaccaggccacggcgaacagagatcagaacagacagagcaccacacaggtgcactgataaaacaacggagcacaagagaacctcactgcgcacaagcagtgccacctccaccttcttccgccagcaggatgaacatcagaacaccaagtatcgacagaatcgatccaaatcgtgactggaaccgagaggggaagaagaacagagagctggcgattttctgcgaggtactgagcagggagcaaatctccatagttatggagccaaactggaggaggttgcgcagcgggcggcatggatttcgtccagagccgaaccgctcagccctgagcaccgccaccagcccccgcgcggcctctgctcatcgctcctctcatcctcgtgcggcaattgacgccctcaaaacgtgctattctggtgggctgctcggccatttggccttgtag

SEQ ID NO: 29373 - DNA, 354 bp, Zea mays
  Peptide Sequence Number=SeqID_72748
atgcaggggagggatgtgggcgagcatcggcttcaggctcgtgtcgtcggcgagggtcagtcgcttgaacatctgttccagggtattcatcctctctgcgtccatctgctttgcggcggcgacgcccgcggaggatcacccttgtccggcaaagcttccacctcggtctccaacgccggtaaggtggtggcggcgagggagagcgcgaggagaggaatttggagtgggaagaagcgcctggaagaatccagttgtgcggagatgcagacttttttaattggtgtggactggaggcagcagacagttgttgcgtggagcgggctcgtgttcactagatccaaatcctacggctga

SEQ ID NO: 29374 - DNA, 600 bp, Zea mays
  Peptide Sequence Number=SeqID_72749
atggaccccctcgctcgctccaacgtggatcctcacggtcgtagccatggatccatggtggccgggtccgaatctggtgggcacacgtccatacgggcgccccccgtccacggcgcgctggaggctagccgaggctatgccaccggcctggccgccgcacacggcgacgcgcatgggctatccttcaccaactccacattcttgcccgccgccccctccatggctgtgttcttccacggtgcggcgcatgggggtggactagggcacgacactgctctggccgccgcccaagctggtgcagggcacggcgcggccctggccgtcgccccggctgcggcactaggcacacctatggctggcgcagatcatggcccacccatggacaatgaattgcccgcttggtttcaaggtgaagcaacaacggcttttggagtagattggatgttcgaaggctctagccatgttgcagaaactccatcgaccacagttagcgaacagaggacaattgaagctaggttaacttggcgcaagggtggacgtgctcctcatcctccaccagtcgcaacccgctctcttgatgtcatcctgaaagtcgcctag

SEQ ID NO: 29375 - DNA, 1767 bp, Zea mays
  Peptide Sequence Number=SeqID_72750
atggccgatgttcagccggaatctgggccagatggcaaggctctgatggacgcatgggactacaagggtcgtcctgcttcccgtgccaccaccggcggatgggcgtgcgccgccatgaccctaggtgtggagctgttcgagcggatgacgacgctgggcatcgcggtgaacctggtaccctacatgaccggcaccatgcacctcggcaatgccgctgccgccaacaccgtcaccaacttcatcggcgcctccttcatgctctgcctcctcggcgggttcgtcgccgacacctacctcggccgctacctcaccatcgccatcttcaccgccgtccaggccacgggcgtggtgatcctgacgatctcaacggcggctcccgggctgcggccgccggcgtgcggggccgcgagccccaactgcgtgcgggcgaacaagacgcagctcggggtgctctacctggggctgtacctgacagcgctcggcacgggcgggctcaagtccagcgtgtcgggcttcggctccgaccagttcgacgaggcgcacgacgtcgagcgcaacaagatgctgcgcttcttcaactggttctacttcttcgtcagcatcggcgcgctgctggccgtcacggtgctggtgtacgtgcaggacaacgccggccgccgctggggctacggcgtctgcgccgccggcatcctctgcgggctggccgtcttcctgctgggcacccggaagtaccggttcaggaagctggttgggagcccgctcacccaggtggccgccgtgacggtcgccgcctggagtaagcgcgcgctgccgctgccgtctgatccggacatgctctacgacgtggacgatgtggctgccgccggctccgacgccaaggggaagcagaagctgccccacagcaaggaatgccgattgcttgaccacgctgccatagtcggcggcggcgagtcaccggcgacggcgagtaagtgggcgctgtgcacccggacggacgtggaggaggtgaagcaggtggtgcggatgctgcccatctgggccaccaccatcatgttctggaccattcacgcgcagatgaccaccttctcggtggcgcaggccgaggtcatgaaccgggccatcggcggctcgggctacctcatccccgcgggatccctcaccgtcttcctcatcggttccatcctcctcaccgtgcccgcctacgaccgcctcgtcgcgcccgtcgcccaccgcctcacggggaacccgcacggcctcaccccgctgcagcgggtcttcgtcggcctcctcctctccgtcgccggcatggccgtggccgcgctcattgagcgccaccgccagaccacctccgagctcggagtcaccattacagtgttcctgctcatgccgcagttcgtgctcgtcggcgcgggcgaggccttcacgtacatgggccagctcgctttcttcctgcgggagtgccccaagggcatgaagaccatgagcacaggcctgttcctcagcacctgcgcgttcgggttcttcttcagcacgctcctcgtcaccatcgtgcacaaggtaacgggccacggcggacgcggcggttggctcgccgataacatcgacgatgggaggctcgactacttctactggctgctagccgtgatcagcgccatcaacctcgttctcttcacgtttgccgccaggggctacgtctacaaggagaagcgcctggccgacgccggcatcgagctcgctgacgaggagtgtgtcgccgccggccactga

SEQ ID NO: 29376 - DNA, 537 bp, Zea mays
  Peptide Sequence Number=SeqID_72751
atgcagcccggctgcaccccctcgccggcggtcacccaagacggtgacctccagttcgatggcggcgaaaagcaagccgggctgcggcctctgcccctccctcagcttcaaggattttcatcatcagtgctggggaggggactgccgcgtgcctggctctctgacccgagcggcttcggagccactcccggcgccgccttccgccacggcagctggaagagcatccgccctgaggtcatcgctgctgctgttcgcccccccggagcagaagtcgccgtcgtcaccgctgctggagcgggcgacggcaagccgttcgtcggtcttctgttgctccgcaggcccccccaatcctatctgaaccgcttcaccaagcgtgagttgcctcgtgcaaaggtgacgagtgagagtggagattctccgactgcttcgccgtccgaggctaggtcggacctcgccggaggtgtagttgacgccgagggtgctgctgctcccttcaactgtcaagatccgagcctgcaggatcggattatcttgtag

SEQ ID NO: 29377 - DNA, 144 bp, Zea mays
  Peptide Sequence Number=SeqID_72752
atggaggcaggcagcgattggcttggacgccccaccgcggaagaaaacaagcagcttccgattccgaccaccacctcgcgccacgccacagtcggcaacaatggacaggtcacgttgttggagatgctcttaatattcgattaa

SEQ ID NO: 29378 - DNA, 279 bp, Zea mays
  Peptide Sequence Number=SeqID_72753
atggccactgcctggcgggtcccacagtgtcagcctccctgctcgcgcgcgtgtcttctgttcctgacaagccggccacaccgcgcgtatcgcgcctcactctgtcgccgccatggctctatgactgatggggccacctcgacagctcagtcgtcctcctcaacagaccgcgatttctactccgtgctgcggactcgatgcaaacagaagcgcgtggagatcgcgcgggccagtcgtcggttccgcaacctgatcttcaccactctcccccgtccgtga

SEQ ID NO: 29379 - DNA, 279 bp, Zea mays
  Peptide Sequence Number=SeqID_72754
atggccactgcctggcgggtcacacagtgtcagcctccctgctcgcgcgcgtgtcttctgttcctgacaagccggccacaccgcgcgtatcgcgcctcactctgtcgccgccatggctctattactgatggggccacctcgacagctcagtcgtcctcctcaacagaccgcgatttctactccgtgctgcggactcgatgcaaacagaagcgcgtggagatcgcgcgggccagtcgtcggttccgcaacctgatcttcaccactctcccccgtccgtga

SEQ ID NO: 29380 - DNA, 102 bp, Zea mays
  Peptide Sequence Number=SeqID_72755
atggaacgggaagataatgctggagtgattgtgaatcccaagggtgatatgaaaggtttcgctatcactggacctatcgacaaggagtgtgctaatctttag

SEQ ID NO: 29381 - DNA, 279 bp, Zea mays
  Peptide Sequence Number=SeqID_72756
atggaccatgctggcgtcgcgggctatggagccaggctggacgctgcagtcatgactcctaatcgagatctaactgcagataatcgtaattgtggttttattcatgcgtgttctttgccggattccgttggcaaaaaaagcgcacaaagagggggcaattacaaaggcgagcagaaagttgcggagccgttgctcaccccagcacggcacggcagattcctgtcttgggggctcagacttcaaacgttcatcacaaggctgaaggctctaccgctctag

SEQ ID NO: 29382 - DNA, 774 bp, Zea mays
  Peptide Sequence Number=SeqID_72757
atggaggaagatgttggtggtgagaatagtccatctcaattcattaacaatgatatgaggattgtggtcgatgatgagaatggtcaatctcagtccattaaaaatggtagaagtgccacccctattgacgttgatgatggtgttgctaccgataatggtgcttctcccacttcagatgttgagcaagtagccccacactacgcctctaaccctaggccacccggccatgcccaggcccccacccgccaggccaccacccaccccactcggccactcccccaggtggcgaggcgcggcgcccatgcccccagcccttgttcgcaggtcgcagcagccgccagcacccatatcccagagtcccagaccatgccgccactgcgccaccggagtctagtggccagccactgccctcgtccacccgaggagccaggctatgagctacagaggtatgtggagaatggctcacttgccaatattatcaagccaaacaaattcgaacctattcctgaatctttggtggctctttacattgctcagggtcttatcaaacttgctgattttggagttgccactaaattgactgaagctgacatcaacactcattctatggtcggcactccatactggatggcacctgagggaatgtaccatgaatcacatgaatttggtggtcatatgttcaacactctcctagagatgactgttgcgcttgaagtagctgttgctccgctgtcacaccggacagtccggtgtgcaccggacactgtccggtga

SEQ ID NO: 29383 - DNA, 222 bp, Zea mays
  Peptide Sequence Number=SeqID_72758
atggagcctgactatctccttaaggtatattcgggaaagggtggctcctccaaaagtggtttttactggaacgaagtggaccaccttgtatctggctttgaggtccaagtacatcttggtggttcctgggtggatggagtaagcggagttgtgggcttcattgagcaggacttcccgtgcctctcccattggtacacacagacggttcttgaaccaaagtga

SEQ ID NO: 29384 - DNA, 1467 bp, Zea mays
  Peptide Sequence Number=SeqID_72759
atggaccgaccactgatgggaggtcgcgcgtatcgcctgggccgcaccttcgcgtcgtgccgtggccgtaagtccgcgctgctgccggtcgcggggccgcgcgcctgcgcagggattccctcgccggggccacgcgcccgtggagccacgccccaggggcctcgccgtcgcctgcttggccggggctgcgcgccgccgggccgcaccggcgtcgagccgtggccgggccgcccgttggcgagccagggacggggggcctgcccgcgcgcgctctcggagctgtgcacccgcgcgccgcgccaccgtgggcagccgcgccacgggaaggcacgccgggaccggagccgccagggccagggctatagccgccgctccacgggaagccgccgtggccgggccgccgtgccgtggttggggccggccacgccaaggctgctcgcgcccaccggccggggctgcgcatcgccgaaccgcgcccgcgcccactggttgtccgagcctgcgccgccgttgcactgcgcatgctgcagtgttagtgggtctaaattcggatatttagactcttgtgatatattcttgtctctttattatgaaaaatgcagagtctccgatccgcccgacttcaccaaatccacccctccccacgcaacagccaccgaccgtgttcgccgccccacctccccgcctagcgtccgtgttgctcaccgccctggaagggacgcgtccacaagaggcaaggtcgagcggcgccggaagctgctccagatgctggggctcgccggggaccccgccctggtgcgcctcgagatgggtcgatcggtctcctacgacgacgggcctgtgcccgtccgcccggcgccgacctcgctgcccatctcccgatccagatcagacggcggcgccgtgccggcctcggcgaccaagccgccgctgggagggcggtcgccgggctcctccgaggccacgcccgaaggggaggaggaggaggccgacccgaggtgtctgatccggaacctcgacgacgacagcgagttcgtggtcaaggaggggtccgagctccgcgaggtcggcacgggccggcagctcaccatggaggagttcgttgacctctgcgtcggccgctcgcctatcgtccaggagctcatgcggcgcgagaacgttgcgagctccggctcgtccacccccgtccagcgctccaactccgactccagcaacggagcgacgcgccatcggcggcggcggcggcatagcagctggcttcggggcatccggaacgtcgccggctccgtggtggccagctcccgcgaccgccgcagcagcgacgacaaggacacgtgctcggagaaaggcgggcgccagtccagctcggccacagacgatagccaggacagcgctggagccgtgcgccatggcccggtgcgcgttaaggtgaggcagtatggcaagtcgtacaaggagttcatatga

SEQ ID NO: 29385 - DNA, 603 bp, Zea mays
  Peptide Sequence Number=SeqID_72760
atgcctattatgtctaaattaatcataatatgctatttctgtagagtagtaggttggcatgatgctggtacctatgacaagaacattatcgagtggcccaagtgcagtggcgctaatggtagcttgagatttaaagtcgagttgaagcatggggccaatgctgatcttgtgaatgctctgaagctgatccaacctatcaaggacaagttttcaagtgttacctatgcagatctgtttcagcttgccagcgccatagctattgaggaagcaggtgtccccaaaatccctatgatctatggaagggttgacgttattgcccttgacaatgcccgccaaaggggaggcttcctgcggttctaccgcatagcaaacttgcagctaaggggtaccattaaaattagaatcttagatgaacctacaattaaaggtatacctagcagtggatataggattgctgttgactcgtcttctaagcatggtgaagttgatgtatcacatgagcttgcatcaaccacattagcaatgaactatcagggcaatgatcatgattttgtacacacctttggtgtcgcatcgcctaataaagtgtccacaaacttgtga

SEQ ID NO: 29386 - DNA, 414 bp, Zea mays
  Peptide Sequence Number=SeqID_72761
atgaacaagacaccggcactcaaagtgccattacaaacggaactccggttccacctccgcaggtacgagcaaccccacacgattggggggcctgcggagcaacagaaggccgacgggtggctctccgtcgcccgttccggcagcagcgacgacaacctctgccccgggcggcgaagcagcttcagcaacggcttctgggcgggtgctatggcaggagggctctcgtccacgaaggacaagaaccagccattcaagccgggagacggatgtccgggggtgcaggcggagttggcaatctcgtcggcagagaagccttctccggctgccaccacctcaacaccgcgccagcaggcgccgggcgcctcaaagcgcaccggcaggtcctcgccctcaccggagccacccagaacatga

SEQ ID NO: 29387 - DNA, 198 bp, Zea mays
  Peptide Sequence Number=SeqID_72762
atgcggctcagagcaaagagctccaaggcggcgcagatcaccgcccaggcggcgaaggacttccgtccaggaggtgccgagcaccatgaacggactccgcgcatcgtgggcgagtccggcgcggttctgttatggagatacttagcttgcgcgatttggtggttacggaagattctgaagaatcacgaacgtagctga

SEQ ID NO: 29388 - DNA, 93 bp, Zea mays
  Peptide Sequence Number=SeqID_72763
atgggcgtgcggagtgcatctcctcgcaaacatctttttgatccggaatgtggcaagctcgtaggaaaggatagcgctcgatgccgttgttga

SEQ ID NO: 29389 - DNA, 1644 bp, Zea mays
  Peptide Sequence Number=SeqID_72764
atggctctcaaagccaaccaagaaaagaaagggaaagccaaaatgcaatttgagaaagaatcctcaagtgatgatgatcttgatgcaaacattgctttcatggtgagaaagaccaccaaaatgttgaagaaactcaatagagaaggcatcaagtttgattcaagaaagaagaagttcttctccaacaaaagaaagcccatctctgagatggactattataattatggaaaactcggtcatcttgctcatcaatgcaacaagcccaagaagaacaagttcaagggcaagaaagatgatgacagtgatgatgagaaaaaggaaaaggaattcttcaagagaaaggaagggaagcacaaaagattccataagaagaaaaatggaaaggcatatatttttggtgactggctcactgacattgaatcctcaagcggatcttcgtcaagtgaagaagagaatgatgaaaaagttgccgctatcgctggagatttctcttcaccaccaccatcaccctcatctacttctcacctatgcctcatggctaaaggtgaacggaaggtacaaattgagaatgatattattaatgatagtgatagtgatgatgagtatgcttctccttcctatgatgaattagctgacttacttaaagaatacactcaaatcatttggaagtcaaaagctaaatgtgataagttaaaggatgaaaatgaatttttaactgccaagtatgacatagttgtaaaagctagtgaagaaatgaaagaagaaaataaaactatgtcatccactgcaaatgagctcaaaacctccctaaatgatgctaaagacaagtgtgaaaaattaagtgagacaaatagggagttgaaagatagacttgtcaaagtaaaggaagattatacaaaaattaaaattgactatgataatcttcttattgcaaatgagcttttatcttgtaatacacatgaggctattaaccctgctattaagattgatgtagcaacctcatgtgatgatttgagccaagttgatcaatctagtcttcatgatgaattgattgaaaaagttgaagtcttgacagtagagaaccaaaaattgaagagatacttgtcagatgcaaccactaaaggaaaagttgctatagaaagcaatgatattaataatgagttggcagtggacaatgaaaagcttagagatgaagttaagaaacttaagattgagaatgaacatcttgccacaagtgtgcaaaagttcaacaaaggccaataccttcaaaatgagttactcatgaacactattatgaaaaacaacaagagtggtattggatacaattcttttttgcaaaagaaagcaacaagtcaatacaaggcaaaacagactcctaagcccatcaaatgctttgactgtggaaaagaaggacactttcccgacaactgcaaagccaaaccaccaactcccttgccaaagcactcaagaccatttgctttcaatgctcattatgttctaataaaagtagcaaatgggaaagtcaaagttacattcctaggtccaccaagcaagagtagacctagacaaatttgggttgcaaagttcttgattgagaaagttactggtcctatgcaaaatagggccctcaaaattgaagcttga

SEQ ID NO: 29390 - DNA, 777 bp, Zea mays
  Peptide Sequence Number=SeqID_72765
atgacattgatggtaggcctgggcccaccactgctggcggtttcgaatccagtgagcggctttacttttccgttgcgtgtatcctctcggctctcgcctcgccgagtcgccgtcgagtccgccattccattcaccccggttcccctcccgtgcaaccgcgagcagaagccaccatttcaaaacgaggacgagcccgctgctggtgctgtcccttcccgcgcgccgccggcgcctggccacctgctccgcgtcggatctagagcgagcgagcgtcacccgcggctctcgtcgccgtcagcgtcacccacccgtcgtcttcttgcctccgaagtcaaatcttccaccccatatcaccacagagaattccaacccatccacttccgcggcctgctgccgtccgctttatttaaaccgtccgccacggcgaccccgacgactccccccgcggcctctcccgccagctccccctcacccccgaccatccacgcctccaagcgccgccgccgcgagaccgaagccacggggaacacgccgctgaggggtggcaggggccccgcccctcgccgccgctcgtcgactccgcctcctctttctctgccggcggcggagtttgacccgctcgacccggacgctgacccgccccccaagctgctcacggccgacgaggtgaggctctgcaagcaggcgctgaaggcgctcgacaagaaggtcgggaagcccgccacgcttaccaaggagtttcgtagcctcccgttctactttaaaaaggggacatga

SEQ ID NO: 29391 - DNA, 399 bp, Zea mays
  Peptide Sequence Number=SeqID_72766
atgggcccttgttccgaaggtatcttcatgcataagtatgctggatggagtattgcttcgaaggcattaagcctttgcaaagatgatgtccgctgcactgcctgtgtcaaccagaatattgtggaccagaaatcccttgatgacacaagatataaccatggcatcattatgaggataatatttaagctgaagatcttcctgggagaagctggttctgagcttgaaccacctgtgattgggagcaccggctttgtgaccgaaggtgccatagcttggttgttgtacgaagccatcgtcacaacagtggaagtgagttcaccggaggtgggcgccaatgttggtcacttgttctcaaaagctataaatcaagaacaaggcaacacaaatgttaatggttaa

SEQ ID NO: 29392 - DNA, 465 bp, Zea mays
  Peptide Sequence Number=SeqID_72767
atgcccaagaggggggggctgatgttgagcaaagccttaaagatgcaacaagaaaaggaggaaaaggagctttccactcttcaagacaaagttgcagggcttcgaaaacccttagaggaaaaagaagcagaaataacatcattgaaagaaaaggtggacaaagttgaaaagaagaattacgaagcaacaaaaatgcataatgccaatattatgaagatgaagaagcaagatgattcgatcaaggaccttcagatgagcctcgaagctgaaaaagagaacattgctaacaaagatgtggaaaatcagagattattggaaaatttaaggcagcttcgagataactcttttattgttgcttcctggtgctgcgatgtcctgaagaaaatcttctcttcaactggtgccatttcaagggtgacttcttacactagtggggacactgagggagcactaggctggatatag

SEQ ID NO: 29393 - DNA, 2730 bp, Zea mays
  Peptide Sequence Number=SeqID_72768
atgccgtcctcttcttcatctgccgccgatatgccactggccggcgcatcgtctgaggacactttgagcaacgtggcggtggaggagttgcatcctagtgatacagtggagtctggtgtgtcgcggatttcctcggtccgcattaaggatatgcagcagcttggatattttggcagcgtagtggggcgtgtcccgggggcggaggaggtccccgagccagaaggcgagttggtcgtttttgaagcttttttcaccgctggccttcgtctgcctgcacatcgattcgtggcggaggttcgaggtccaggtccactagttgacgccgaatgccgtggtggccctggcgaagtatgtctgggcggcgacttcatacggcggtcagccctttgtggagcgtacacgcagtttgaggtagcggagggtgatgaagacgaaggagcccttaggtgcgctgcccgcatgagtagcgggcacgattcagttgaggaatttgttggttatggggtatgtcccttggcgcatggctgggcgctgggcgaagtatgccctcgcgagatgccctcccgaggcgggcagctggtgcgaagtcctgccttcgcgctggatttgcgtggccgatatcccgccgcgttcatgcgcgaagcagaagacagtgcggcgaggatcgtggggcgctacgtgccgaagacagagggtatgcgaagctgggacatccgtgggtccaacgacaggttgaattgggtcttcgacctgaaccgcttgccgtacggtggttatcccggggaagacaccgccgaccgccacgggaagaaaccgatgggcggtaccgaggaagggccttcgcaggaggctgctccggccgctaagaagagaaaattaggtactatagtggggggaatggtggtgtctgataattttgctgtggagttgatggggacatgtgcgacccccgggggaaggatgtcttcgcccgagtctcgggagtcttcggcgcgaatgctggaggttaccgggggtcgatggccaaagaatcttccgatcccctgggtggagggtgaagacatgtctacgtctcatatagctcgtggcttgaggattttcccttacggacggaatattgctgctgttgtgtcggcagtgatgaacaaggaccgtcaagacgccgcgcagaagcgccgggcggttatcaggctcgccgatcctaggcgtgaggcaaagaaagcgcgggggagcgcgaaggctgctgccctcggcagtagccagccgacgccggctgcgaaaccggccgcgcccggatccagcaaggtgtcggcgatcgcgaagactgtcgtcgctggcggaaccaagcctcccctgggcgaagctgcgaaagtgcgggagctgccttcgccggggaaacgtgttgctgacatcggcacgaacattagcgtggaggactattttgttgccgctgccgccaaggacgtggcgggctccatgtcccggcggctgagggaggcgtcgcagcagctgtcgcatcagctaagtcaaatgtggctgtcgaagtcgagagacttcgggcgcagcatgcggatgccgttcgggagaaagtcggctgcggagagcaaaagccgcaggctggcggagaaagtggccgccttggaggccgagaagacggacctccggcgccagctggtggatgagaggagggaggcgaaccaggccatcgttgaggtgcaggctgcgcaagcgaaggccaaagtggcgtgggcggaggaaagtctcgccagccaacgcgccgaggagtgggaggcaaggttcaacgccctgcgcggccgcgtggacaaggccgaggcctctacacgctcggaggttaagcggacgctcgcacagctcgtggactcataccacgagctgggtgcatggactgctgacttcgaagtgcccgaccgggaagcaggccttcgcttcctcgaatggttgcaggaggagttgctggtcctcccgaccattgtggagggtttcatgtccttcgcctccctcgtcacctgcgagggggccatgaatgctttgtcccgcgagggctgcaggcactacgaggtcttcgaccaatcagacgagaactttgaacgtaagatcttcaaggccgaagaccctattgtgaagcagtcagcgggggcactttttgataggatgtgggggtcacatggtcgagaggcgatggagcatgccgaggacgtcgaggaccttggaggtctggccggcgcgccgcccgaggctgcggaggtcaatccagtgctgctcttggatggtggtgaaggcccctcggctgtgcctgtgcctgctgtggccggcgaagaccctgtgtcggcccctgcgccgacggtcaaagatgctctgaaggtggtggttgagccgacagtcaaagaccccacggccgtcgccgggccttcacagggttttgggcctgtgcacgcaaccgctactgacaatgctaattttgtggcggcttcgaccgtggttgttgaagatgagtctgatgattccgtgactaagtttttcgagtctgatgattctgggagttcggttgtgtggacggaagagtcctcggatgaggacttggattattttgcggcattggatgtggccgcggcggaggcttctccgcgtgcggtgggtgctgaagttcttcctggtgcgaatgctgggtgtaggcggcgaagggcgatggcaaaacggatagtgagtgag

SEQ ID NO: 29394 - DNA, 351 bp, Zea mays
  Peptide Sequence Number=SeqID_72769
atgaacttgtacagggttgcagttgatcaaagcagggtacagttagagtcttcaacaggcaatgattacatcaatgccagccatatagagattgctggcagaaatctaacgaagttcatttctactcaaggaccacttgccaatacaattgaggatttttggcagatggtatatgagaaccactgtcctgtgattgttatgctcaccaaatttgatggtcttaagtgtgatgagtatctaccattgagcaagggacaggctgtttttggaaaatttaccattaagatcacaaagttcaggaaagatggtcagttattgtttcgtggtggggaggtggacaggatgtggtga

SEQ ID NO: 29395 - DNA, 216 bp, Zea mays
  Peptide Sequence Number=SeqID_72770
atgggtggcgtcgaccgagtgcatcagggcgaccagtgcaatcgtgtggattgggggtttgactgcactcagaagctcgcaaattgggcgtttgggtatcccggccagtgcgccaccgtgctatggccgtgggcgtcgccgcgcttcggtagtgcggtgaggaatggggaagaagggagcatgggcgtgcgatgtgaaaccaacggttgggattag

SEQ ID NO: 29396 - DNA, 979 bp, Zea mays
  Peptide Sequence Number=SeqID_72771
atggtggagtgcacgaagcagacgatccgggagctccgggaggcggcgtcggtgccgtcacccggcggcgggcggcgtcgcgaggtggagatcggcgggtacatggctcgactcaccggcgacatcatctcgcacaccgagttcgacacgagctatgatacgggaaagctcatcttccgtctcctcgaggacctgcagcgcctcaccgcgagctccagtcgccacctgtggatccccggcagccagtacatcccgagcaagtacaggagtgagatcaggcggctgaacggcgagctggaggccgtgctaacggagtccatcgggcggagcagggagatcgccgacgagggccgcacgacgtcggcctacggccgggggctgctggccatgctactggccgagatggaggagaagaaggcggagcagttcagctacgacctgcagctggtggtcgacgagtgcaagacgttcttcttcgcggggcacgacacgtcggcgctgctgctcacctgggcgctgatgctgctcgccacgcacccggagtggcagaacagggcccgcgccgaggtcgcccgagtctgcggcgacgacctaccgtcctacgacgacctctccaagctcaccgtgctgcagatgatcatccacgagacgctgcggctgtacccgccggcgacgctgctgcctcggatggtgttcgaggacatccgcctcaccggcggcctccacctgccgcgtggcctgtcggtgtggatcccggtgctggccatccaccacgacgagtccatctgggggcccgacgcgaacgagttcaggccggagaggttcgcggcgggccggcgcccgctgttcctgccgttcgcgtcgggcccgcgcaactgcgtcggtcaggcgtacgcgctcgtggaggccaaggtcgtgctcgccatgctgctctcccacttccgcatcgccatctccgcctgcctgccgccacgcgccg

SEQ ID NO: 29397 - DNA, 369 bp, Zea mays
  Peptide Sequence Number=SeqID_72772
atggcgttgagcctcaatgttgagggaagctccgccttgcccgacctagggctcgggctcaacctcgacgccggacgacggactccgcctcgcccgaccccagggctcggactcagcctcgacctcagaagacggactccgcctcgcccgaccccagggctcggactcagcctcgacctcggaagacgaactccgcctcgcccgaccccagggctcggactcagcctcgacctcagaagacagactccgcctcgcccgaccctagggctcatactcagcctcgacctcggaggagcctccgcctcgcccgacctcgggctcggacctgccacgtcacaggggggccatcattaccctacccctagctag

SEQ ID NO: 29398 - DNA, 516 bp, Zea mays
  Peptide Sequence Number=SeqID_72773
atgccccagtctgtccccacgcccgcgctggaagcagcctcccaacttccgctgtgccccacccgccgcccacgtatctcgtcccatgactgtgcaggccacgtccgccaaactctgccacgcccacacgaccctcgccagccacacccaccaatcctcgcgccacagacgcttccatgccccccgcccaacacccccacaacctctgcccccgcctccgttactgtcatccatcaacgtcgcttccttcctcccccgaacccccgtcctcctcgcatccttctcatcccagtcctcgacgccgccaccccgccttatcctactcacgtgctccctgccctcggcgtcgcccccaaccagccctacccccatcgcgcccacctcctctccttcctcgtcgcgttggcccaccagtcgcgcaagtttgagttcagtgagaagtcgaccggccgcgacccaagataccgagattttttgcttgcaaaggattttgggttccagttctttggcgaatga

SEQ ID NO: 29399 - DNA, 300 bp, Zea mays
  Peptide Sequence Number=SeqID_72774
atgcaggcggcatgcaaccgcaccaagaggcgcacccttttgactccgacgcgcccagcatgggggcctaggcccacacgtcatgtaaccggcgcgccagttactacgtgcgaaagactgccccgccacttgcgccactaccacgccttctcgactgcggaaccggtgccgcgactcgaggcaaccctgcgcatggcccaacagtgccaaccgagcacatcggtcacggggactgggaaaggggatactccgaaagggatccttctccgcgaaggaaacgggcccgagccctcctactga

SEQ ID NO: 29400 - DNA, 321 bp, Zea mays
  Peptide Sequence Number=SeqID_72775
atggagcaagatgttggtggtgagaacagtcattctcatttcatcaacaatgatatgaggattgtgcccgctgatgaggatggtccatctcagttcattaacaatggtagcagtgttgcccctattaacttagaggagggtgctgctaccaacattggttctggagatgcaaatacttcagaaaatgttgatggtaagaagcatacgagaatttgcacatctaaagtgtggcaggattttgaaccactatacaaggttgtagacgacaagaggatcaggtatggtggcatcaacgctgatagtcgcctagagggggggtga

SEQ ID NO: 29401 - DNA, 1086 bp, Zea mays
  Peptide Sequence Number=SeqID_72776
atgggggacacctgcaccctacctacaaatacccttttggggggcacaaggcaggagcattcaggcattgtagcagcagcagcagcagaatttctccgagctgtagtctctccttgccttgagccctcctcccacgttactactaaaatggagggatcctacgctccatctgcgccaacaatggagatcgacatgatggctcagtttcttggggcggctgatgatcactgcttcacctacgagtatgagcatgtggatgagtccatggaagcaatagcagccctgttcttgcctacccttgacaccgactccgccaacttctcctctagctgtttcaactatgctgtccctccacagtgctggcctcagccagaccatagctctagcgttaccagtttgcttgatccagccgagaactttgagtttccagtcagggacccgctccccccaagcggcttcgatccacattgcgctgtcgcctacctcactgaggattcgagccctctgcatggcaaacgttcatcagtcattgaggaagaagcagccaacgccgcacctgctgctaagaagaggaaggctggtgctagtgctaccaccaagggatcaaagaaatccaggaaggcgagcaaaaaggataacatcggcgacgccgacgatgatggcggctatgcctgtgttgacacgcaaagctccagtagctgcacctccgaggacgggaacttcgaaggaaatacgaattcaagctccaagaagacctgcgccagggccagccgcggagcagcaactgaacctcagagtctctatgcaaggaagaggagagagaggatcaacgaaaggttgagaatcttgcagaacttggttccaaatggaacaaaagttgacattagcacgatgctcgaggaagcggcgcagtatgtcaagtttttacagctccagattaagctgttgagctgtgacgacacatggatgtatgcgccaatcgcgtacaatggaattaacatcggcaatgttgatctgaacatctactctctgcaaaaggcggcaccactgttgggctaccggctcattaggattagagtcatgtga

SEQ ID NO: 29402 - DNA, 321 bp, Zea mays
  Peptide Sequence Number=SeqID_72777
atggggtctcaatcggccacgtcgaaggcgtcaacaactgaagaacctgatgggagcgggtacgacgtccaagcgtcaagtacagcgggccacaatggatcgtgtaaccaggagtgggctgtacgtgtgtgggtcgtgggttatgaacgacgtcctgtgcgggcgctggccgatgggtcgcagtacttaagtaacgatcggaactctgaatgggcatggaagaacagaatacagaaaatactcgccctttcttctacctcaagcattccattcctgctacctcggatctccctcttcctcgaatccacagtagcaaactag

SEQ ID NO: 29403 - DNA, 402 bp, Zea mays
  Peptide Sequence Number=SeqID_72778
atggccgctatatggaaatggaacacagtggcaactggccatcgaattgttgatccatttatatattatgggcacaccaaagatctttctgtatatatagatataaatggccgctatatggaacacagtgggcaactggccatcgagttgttgatccatcgagttgttggccatcgagtagcttttgcacctggcagcttcgccggtggcttgcttagcgccatggagaggctgatcgttcgagaggtgggcagagtggtgtctttgtgtactgagagagcgtgggcgcgtggcgtggttgatgtcaaggattacagttgggctgtcgtatgggccttgggcctcggcctcagtacatgggcgttttctacaagaagcaagaggaacagcaagagggcatga

SEQ ID NO: 29404 - DNA, 1914 bp, Zea mays
  Peptide Sequence Number=SeqID_72779
atggcgcctccgcccacgctgacgtcgtctcggtcgtctccctcgctgccctcgtcgccgcacaggcccgcgctccggccgggcagcctgcagcggctgctccgcccgccagacccgtccgacgacgacgactccgccccgacgccgcgctcgcagtcgcgctccagctcccgtgagcgcgccctgctccaggtcaccaacatcacgccggcgctctccggcgccgaccccttctcaggccaccacggcttctacctccgcctctccgactcggcccgctcctgctacgtgtccctccacgccgaccacgacgacctcatcctcgccaacggcctccacatcggccagatcatcgaggtcgaccaccttgtgccgtccgtcccggcgcccgtgctccgcggcttccgcgtcctccccgggcgttacccctgcgtccagcaggaatccggcgatgacgacgtcgtcaaggaggtcgtctccgaacggccgcgccggccgtcgccgacgcccccgcttccggagaggagagcgcgacaggcgagctcccctgcctccgtcgcccacttccacaggtcacggtcaataacgaatctatctgaggcgggatcgccggcgaggaggagggagagcatgctgaggagcttggactccccgaagaacctgaggaagatcagtgtcccgtccgtagacggcaacagcagcgacgacgacgacgcgtcgtcgtcctactcgtcgttgtccacggcgaggaggaactgggatttcagcgggaacatcaaggacgtttctccaggtaaatccggctcaaaaaccattgcacagcagaacgacgtggtgaatgatccactggaatccgtgaggagaaaggcagagaaggcgttcaaggtgctctccaggaggaacagccacgcgtctatcaaggcacccagagacagctccggtgccgccacaccgatgtcgcatagtgcttcatcaagtggcatcaagtggtgcgagaacaatgtgatatggagctcactctcctcaagcttggtgcgtcatggaaaggaagcaatgaagcagagagacatggagctgcaagctgtgcttgatggactgctagaagcatctgcctctgagaagttgataaaatgcctgagcaaatactccgaactacattctgacaaggacgacgacccaaaggaggtcatcagcaggttcttgaaattctctcaagaactggatcatgccatcttcattgctcagtcacaggccagactcaggcacccaaaagcatgctgttccaactcaacaccctcagcttcgcctagagctgctacgaaggcagcgttggacaggaagcaatctgccatatcatgggtcagagcggccatcgaagcggatctgtcacccttctccagccacacgacgagaggcgcatctgaatccgcgagggcgtcatcagcggccgaactgaaacccgtgagcccactgttctgttccaagccaaagtgcagctgcagcagcaggctctcgaagaaacccgctgatgcttccaccgaaggcggcagcctaaacgcagcaatggacctggctatcgcgatgcgctccgacggcaaccggtggttcctcaactacatcgacaagttcctggacgacatcgagggcgactacgcgacgtgtgactcccaggtcgcgtcctttctgcagcagctgaagaaggtggatgattggctcaacggcgtggtgcgacatgagaggatgctttccattgatagaagcggcaaagactgtgtgttgtcagaagaagaagagagtgacgcgtgcgagagagttcggaggaagatatatggggcgctcctcagacatgtgcagtatgctgcaatggcgctcgagggtatcaacagtgtaaccgatgaagagaaagagctgtag

SEQ ID NO: 29405 - DNA, 399 bp, Zea mays
  Peptide Sequence Number=SeqID_72780
atgaccggcgcagccgcgtgcgctaccgtcggcctccctagcggggctcctcgacattcggttgatcgaagaagcaagaaggtcggcctgctggtgctcttttgttgggtcgccctgccgaccgttggcgctcgaacgtcgacccctcccgaagaacaggctactgatgcgtgtctcccgaccacggtcatcacgacttcgactaactcggcatccaggggctatcgtcttctcggagtccacaccggtctctactccagccgcaacattcacaccctcacgacgctgcgactacgggaggatttcaactcgtcggctcctatcttcgtcttccactccagtctcatcgtatgtggtgcccctattgagactgcgggggatgttagactgtgtgtgtga

SEQ ID NO: 29406 - DNA, 270 bp, Zea mays
  Peptide Sequence Number=SeqID_72781
atggacgacagatctatccaggaaggccgcaacaacgtggatctggctgggaaggccgtgacagtgacagaaccaacgatggcagtgacgaagggggggcctgcgccggacctagcaggaagggttgatgctagcgacgggagaagctcgaagttagggggcgttgctggcgcgtcaacgcagtcagggaggaagaagcatgacggccaatgccacggcgaggagagcacggcggccagggcaccgctggtcagagcaggcgcgacctag

SEQ ID NO: 29407 - DNA, 741 bp, Zea mays
  Peptide Sequence Number=SeqID_72782
atggggtggtctttttgtgctccgtggaagtccgacgtccgagaggggctcgccattgggcttggcatgggcacagtcatgctgctcctcttctgcggctactcgctgaagattcaagaattaccgtttatcactgtggttcaagaaaactacccgaatcgtcttggggtattgtttgtcatccgccttcctccagttgtcagagttattgcacagacatttcttcaaattgcaatatcacatggtatccgtggagatgaggacgacattgcctccaagtctgctccaccggcatccatcgatggtgcaaggtacggattcgagcctccggtccttcaatctagccaccaggtcataatcgaagggtttacagggaggagatctgaacatagctcttcaatcccaaagttaacatcgttggtaaaccccttctggtgttacctcacaaatatcactaaagtcattttagctttttgctgctccttatgtgcttcagattcagcaagaggttcttgcaagtccttgatgaagaagtcgaaggtgacgaacgccgagaccgtcatcctgatcgacgccaagaacctcacagcgcacctccttgagatctcggaaaaaatctacatgtcgatggcgtggatcagaaaaatggactatattgtacaggaccttggaggagctgaccatgtgacagaccttgatcataaccatgttgcagagttgaagatattaggactatattaa

SEQ ID NO: 29408 - DNA, 1308 bp, Zea mays
  Peptide Sequence Number=SeqID_72783
atggagtcggacgcgtccacctcgccgcggcggcgcagcacgagctgctacagcgacagcggggactcctcctgctccgagcccttcagcgagtgcggcagcgacgacctctccttcacgcccgccgcgggcatccaccgcctactgctctcctgcgcgtccgaggcgtcggaggacgccatctcctcgctcgtggcggagctggagcgcccgtcgccgtcgctggactcgctccgccgcgcggcgatggagctccggctgctggccaagcacaacccggacaaccgggtccgcatcgcggcggcgggcggcgtccggccgctcgtcaggctgctggcgcacgcggacccgctgctgcaggagcacggcgtcacggcgctgctcaacctctccctctgcgacgagaacaaggcggccatcatcgaggcgggggcgatacggccgctggtgcgcgcgctcaagtccgccgcgtcgcccgccgcgcgggagaacgcggcgtgcgcgctgctccggctgtcccagctcgacggcgcctccgcggcggccatcggccgcgcgggcgccctcccgctgctggtctccctcctcgagaccggcggcgcgcgggggaagaaggacgccgccacggcgctgtacgcgctctgcagcggcgcgcgcgagaaccggcagcgcgccgtggaggccggggccgtgcggcccctgctggacctcatggccgacccggagtccggcatggtggacaaggccgcgtacgtcctccactccctcctgggctccggggacggccgagccgccgccgtggaggaaggcggcatccccgtcctggtcgagatggtggaggtcggcacctcgcggcagaaggagatcgccacgctctgcctcctgcagatctgcgaggacaacgccgtctaccgcaccatggtcgctcgcgagggcgccatcccgcccctcgtcgccctctcccagtcctcctccgcccgcaccaagctcaaaaccaaggccaactcggagagagggagagctgaaaacgacggcgatcgctctctggcagatgaatctatagtccacctagctggtggcaccgtggtagctccggcctccgggacaaccacaacgcttttggcggccgcttggattgattggtatcttcggagatctgaaatctcaagcacgtcaatcgctttgtcctttgttaatttggcccatccgctgccggaatgtatctctgcttgtttgggaatggcgtcgacgcagagcaagtaccagctatctgtcagacagatattttgcaccttaatttccagctga

SEQ ID NO: 29409 - DNA, 1929 bp, Zea mays
  Peptide Sequence Number=SeqID_72784
atggcggcgcagcactcgcgtacacacaggggtggagtcctgacatgggagatgcagtggattgatttccctgttcatatcgcaactgagggcaaaattatacctgccctagcagtggagaaactagccctcatgaagccgaagtttttgctttttgtttggtttgatttgttcagtatgcccggaggatgcgtccccaaggcgacgcttaagcgtcgcttaggcggtaaggcgccccggcgacgtaaggcgtcctgttcgtcttactcctgctggcgagtgggagaggccactggtggctccaacagcagcacggcggctcctccaacagcggcttcatggctactccagcagcggcgctgtggcggtttctccagcatcggcgcggcggctccagaggctcctctagcagcggtcagcacaggagagagagagagggagagggagagggaaagacgccagtgggtagagagggggaggtggctgggtctctgggagtcgggagtgaggcggttgggtcactgcctcgctgggaggggaggagtcgggagtggcagctgggactgggagaagatagagagggagaggttagttaaccatccaggttctgtcaagatgtctgatagccatgagactgacaggaacattgagatttggaaaattaagaaactgatcaaggcattggaatcagccagaggcaatggcacaagcatgatctctctaatcatgcctccacgtgatcaggttgctcgagtggctaagatgttaggtgatgaatatggtactgcttcgaacatcaagagtagagttaatcgtcaatctgtgttggctgccatcacctcagctcagcagaggttgaagctctacaacaaagtgcctcctaacggattggttctgtacactggaactattgttactgaagacggaaaggaaaagaaagttactattgattttgagccattcaagcctatcaatgtgtcactctacctttgtgacaacaagttccacactgaggctttaaatgagctcttggaatctgatgacaagtttgggttcattgttatggatggtaatggtactctttttggcacactaagtggcaatacccgtgaagtgcttcacaaattcactgttgacctcccaaagaagcatggtagaggagggcagtctgctctgcgttttgctcggcttcggatggagaaacgccataactatgtccgcaaaacagctgaacttgctacccagtttttcatcaatccagctactagtcagcctaatgttgcaggattgattcttgccggttctgcagattttaagactgagctgagccaatctgacatgtttgatcagcgactccaagccaagatacttaatgtggttgatgtttcgtatggtggcgagaacggtttcaaccaagctattgaattatctgctgagattctagcaaatgtgaaattcattcaagaaaagaagttaattggcaagtattttgaagagatcagtcaggatactgggaaatatgtctttggtgttgatgacactctgaaggctcttgaaatgggtgctgtcgagaccctgattgtgtgggaaaatctggatatcaacagatatgtgatcaagaacagtactactggggaaattattataaaacatctgaacaaagagcaggaagctgaccagagcaatttccgtgacccatctaccaatactgatctcgaagttcaggaaaaaatgtctctcctggaatggtttgccaatgaatacaagaagtttggttgctcgctggagtttgtgaccaacaagtctcaggagggatcccagttctgtagaggatttggtggcattggtggcatgttgcgctaccagctggatatccgttcttttgatgagctttctgatgatgacgatgtgtatgaagactctgactag

SEQ ID NO: 29410 - DNA, 1266 bp, Zea mays
  Peptide Sequence Number=SeqID_72785
atggggaagagcaagaagagcaaggcccgcggcggcagggacgacctgctcgacagcagcgacgccgacagcgtcagctcctcgtccaccgcactgtcggatctctccatctcgtacgctaccgagcacgtcaactcgcaggagttcgtcctggacaagtacatcgacgcgctctacgagaagagggggtctacaagagaggcagcattgggtaaactggttgatgcctttgaaagttttatgctccatggccttgtggaggacaagtatgccactctgatgagtcaattaaataattccgtgaaaaggggatctactaaggaggtttttctggcatctcattccattgggttattggctattacactcggtgttgggagcagttcacatgaaataatggaggagtcacatccccaactttgtagggcacttgattgtttggctgtcatcacatttgttggagcatctgatctggctgaaacagagttatctttgaaagccatgtgggatgtgattcatccaaagtctggttcaaatgtgggaactgttcggaaacctaggcctcctgtgttagcagctgctgtatctgcatggacttttctcctgactactattggttcatggaggataaataccaatatctggaaagagcccattgcatttctgtctactcttttggaagcagatgatcgtgctgttcggatggctgctggtgaagcattggttttgtgctttgagttaaatctgcttgatgtttcttctcgtgaggacgatggtgttaacacaggaggaacagctggttctaagaacaagcttttcttggatatgcaagcattaaaagcaaaaatatcaggtctggccactaatctctctgctgaggctggggggcaaggtgcagacaagaaaaaacttactgaccaaagagacttatttcaaaggatcttagattttgtcaagtatggtgactgccctgaagaatcaatcaagattgctggaaaacgtgatgttttaagggtgtcgtcatggtctgaattaatccagttgaatttcttaaaggggtttctggggaaaggctttctgaagcatgttcaggagaatggacttcttcaggatatatttgacattaaggttgacaaaaccgaaaccctgtcgtccactaacaagaaaatctttaggtctgaagaggaaaaaggaagagctctgaaattgaacaaggaacgtcgtctagcccaggtaaggaagaatgctgtcatgttggacgactaa

SEQ ID NO: 29411 - DNA, 756 bp, Zea mays
  Peptide Sequence Number=SeqID_72786
atgctgctccggctgaagatcgtcgtcggcgtccactcggtggtgctcccggttcctgttcgaggcggctttggccatggtgcctgctacgcggcagtagagccctgctggcgccgcagccggaggccagcgctagcggcggcgggtggcctcgtcacgaggcggccgaggagcgccacggtggtgatggcgctgaaggaggagcctgagggcagccgtcgcggcttcgtcggcagcgggccgagctgggaccccgggctggagatccaagtcccctcagatccgttccttctctggtatttgttcctatactcatctgtattggtcaatctcatctctgcagtggcagttatttccccttcttatatattcagaaatttaccggggtcagctgaccccaaaaaagggctggctccgcccctgaggaaggagagcctcaacgtgggggatcacatctactcctggaaggcgacttgttttttgagttttcaggttgtggatgctaaagttattcatctggactataataatagctgcatatttttgtcacttaaagatgtaaaggtgatggtggagacaacacttggcaaagaagagttgaaagaggcagttttgatgtgcactaatagggtttcacaagctgagggaatgaaggttgacatatccacgaggttctcatatgaagaactttccggtgctataaacaacttcagtatggaccataaaattgggcatgacaattttggttttgtttag

SEQ ID NO: 29412 - DNA, 1143 bp, Zea mays
  Peptide Sequence Number=SeqID_72787
atgccgcacgcgcgccaggcatcgccccgcccgccacaaatctcgccgctaggcacaatccccacaccaaacgcgccccctgccctcgccctcgccctcgacggcgctgcccgttgtgatggcgggaaccgcggacgcgccccaccaatcccgaccccgagccagcccgccaccaaaccgcgcccctgccctcgccctcgacggcaccttcttcatggatggcgggatctagatgcgacggaggcggcttcgggttcggcctcggcaacgtggcggtctgcggcggatctgggcgcgcactacgcggccaacaacatcgtgctggcctccttcgccagccagctcctcgataacgccctcgtgccgccgctggatgatcgtgccggcaggaggacaccgtcggacgagatggacgacgagctgtacggcgtcgccggctgcaacagccacgtcacggcgagcttgcggtgccccagccaatccggggccacggcggtctggtcgtcgtccaagaagtcgtacgatatctgtaccagcgccgacggaccagtaaccgtgccggcccatgacacataccacctcgtcggggctgggctctccgacgcgggaggcctccactacccgctcgccgcctgcagtggcgccaacgcgtccacggcggtggtggcgagcgagttgtcgctgacgctgtgctccaactccaactccatcgcttcctcgaacaacacactaaacgccacggagcagtgctcctcgagagcgagccggtccgccctgaccgagctgcagtgggcgcggtcccggatggcgctgcacttcgccgcggtggtggcgcgctcgcggtacacggccgtgctccagaatttgctcaacgacgtcgcggccacatgctggacggtgtcgctgatctgcctggcgtccgtcacgctgttctcatcggtgatgagtaccagcttcccgcattggtcaaaagcaagaaaacaatcgaagcagttagaagagtggaacactgctgccttctcatctgaacttacagctactaaacacaaagagatgacccctaaggattctaaactggtgatgctaaaatactggcaagcgattgccaaatctggatttgtggagccaacacctatctgttaa

SEQ ID NO: 29413 - DNA, 414 bp, Zea mays
  Peptide Sequence Number=SeqID_72788
atggatcatggtgccctcctcggtgtcaggggatatgcttggatcagagtagggaacgttcatgctatggacacaaactcaagtggacgtggtgttcgacaattcaaaacatacctattgcatagattggaaaaggaagttagtgaatggttgtcgaatgtggattgctgggttcttggggctcaggtgaatgtcctcatagtcccagccaaagggcaagttgatgcactatcaaaggaattgtatgcgctttcaactgtcacaggagtttacaacctttttataagagttctctcaagctatcttacagatgtgagtgaatcttggacagaaaatgcagattacataatggaagttagtgaatggttgtcgaatgtggattgctgggttcttggggcccaggcagagtggtga

SEQ ID NO: 29414 - DNA, 309 bp, Zea mays
  Peptide Sequence Number=SeqID_72789
atgggcggtgttgcctgcgcgccatcttccatcgacggtgttgcctgcgcgttgatggcagggatcgaccgaggatcatgggcggtgatggcggcctcggatccccgtaatcgcggagcagaggggggggaggggtccttgcacgcagaccgggtggcggcgcgcacgggggcgagggaagatgcgctaggtcagagtcgagccgagtgggtcgtgggcgagcgcgggcaggggatgcggcagcattctcgggatagaggcatggcagaacagtgcaccatcttgggtgtggacgtctacgttaggtga

SEQ ID NO: 29415 - DNA, 333 bp, Zea mays
  Peptide Sequence Number=SeqID_72790
atgtcgcattcggcaattccttcccttcaatgctaccaaagtaaaggaaagaacggttctaataactcttccattgttgctttgtactcaccatttgcaatactgatagttccttttaagctgggttttggtcaaccaatgatttccgctgataaatcttatgctgaccgacactgtagcctattttatccttatccaattgggccaacggatgggttcaagaatggttctgatatgccaatagagatggcgatggcgagaatgacgaagaaaatcaatcggattcccatttatttttacgtgaaagatgagatattaaacaactacttctga

SEQ ID NO: 29416 - DNA, 66 bp, Zea mays
  Peptide Sequence Number=SeqID_72791
atgcggcttcatacccttagagatattgttaacgcagggaagtgttatacaaactattgtggttag

SEQ ID NO: 29417 - DNA, 393 bp, Zea mays
  Peptide Sequence Number=SeqID_72792
atggcgtgtctgtggcgatcgacgaaccattggggagccatgcgcgccctcgatttggggaaaacaaccgtcggcgtcacccgaatccctcaccggcgctctgttcgtgtcacggacccgccccgaaccgtggacgagctcgctactccttcaatcgcgggtaagaatctcccttccgtgttcgccatcaccccggctaggtttagcaccagccaatttcaggttaagggcgtccgggcgtcggattgcgcgttcgccggcgatgctccgccgtgggtgcgccagcgccgccgctcggtttggctcggagaagaaagggaaacgccgtggccgttgatggggtcaatcaacggtgtggattgggggctggataccgggcagcgggggccgtag

SEQ ID NO: 29418 - DNA, 585 bp, Zea mays
  Peptide Sequence Number=SeqID_72793
atgggcaagagtaacaaacgcaagcgcgagccgactcctccatcggaggacttcgacgactcggaatactcggaggaggagttctcctccgagtccgaggggtctccggctcccgtctctcccccggtgttgtctgaggtctggacttatatccgggccgtcgagcgctccgggctcgagggcttggaggagtcggaatactcctcggacgaggaggactcttcggacttgtccgaggagggcggcaacggtgatggcggagacgacgacgacgacggaggcgacagtgacgacgacgatgacagcggcggtggcggtgacgacggcagcaagggcggccacgacggcaagagctgtgatccatctgtcgctgatcccaatgggtgtgctccatctgtcgctgaacccgatgggggtgctgtctgtgttgctgatgaaaacgagggggaggaagaagatgaggtccatttgactcggaagaacagtcggcagtatgttgccagtggggaaagtagtggagttccttctcctgctctgtctgccctcattggtctacaagaattgtctctggcgaactttgattag

SEQ ID NO: 29419 - DNA, 345 bp, Zea mays
  Peptide Sequence Number=SeqID_72794
gtcttggctgaacttccagctccagttctaaatggtacaatggttacagtcgaggatttgcatcaggaactaaaatgcagtatcaacatcaaacacagggatgagttcgatgaagaaaaggagcctgacagaatggttcttgttgggtggtctggcccagttgataagcaaaccactagtaatggtgagactaaatcagttccatcttcatccaatacagaagatgtggatggtactgccgaggacatatcagcaacttctggaatgaagccagcgctcaagttgttgaagatgacaaatgacgatggccttcttatgtttgatgaggacccaaggcaaagttga

SEQ ID NO: 29420 - DNA, 780 bp, Zea mays
  Peptide Sequence Number=SeqID_72795
atgtcttcgcgctcccttatgcatcatgtccttccaccttccaagcccccggatgggggattcctgccatctttccgctccatcattgggggaacgcaactccgcgggagtttgtacctctcagccaccgttcggcttcaaggattttcatcagccggcccgactgtacccctccgccgacggtcacccgagacggtgaccaccagcccctgggtggggagaagcaagccgggctgcgatcttggtcccaccctcagcttcaaggatgttcatcatcctcgctggggtggaggccgggctgagccggagctctacctcccacgtgggtccgtgtgtcggcctctcctgcggcgttcgagggagagggcgctcactggccctgcgggcgggtcggacttcgacaaagcggggctggtcgacggcgaacgtcgtcagcctcagcgcgtcgggctcgtcggcttggctcccggtgccccctcctgtcgggaggcccgaagcgcggatggtggcggtgatcccgtcggcaacggggacttctcgagccgcctccacctcggcaccgacgacaggggccgtcagccctccggcagatccccactcagatcctcccggacgagtggggcgccgacctccgcgcggaggcgccgtaccggtgcaaaggcaggaccgcaccagaacacgaacgccgccggcagaagagcttccgaacgtgaagacttgtttggtccgcggaatcacttatccgaacgtgagttacttatcgtagaaggtgatgagtga

SEQ ID NO: 29421 - DNA, 489 bp, Zea mays
  Peptide Sequence Number=SeqID_72796
atgccgtcgtggcagccggagagattttggcacccagctggtgtgatgtcgtggccgtcggaggagtgctggagcctagcggagggacagctgtcggagctgttgagtccttgccgacgtcctcttgcttctgtaagggggctgagagcagccgtcgtcacagaggtgatgatggcgcctcctgttgacgtggccggtctgcgccctaggttggacgatgtggaagctcctccgaagccgaggtcgagtctgtcttccgtagccgaggtcgagtccgagcccctgattcgggcgaggtggagaccgtcggctgaggccagggcggagtccgagccctggggtcgggcgaagcggagttcgtcgtcttctgggctgagcctgagtccgagccctgggtcgggcggagcggagttcgtcgtcttccgggacttagcccgagtccgagccctgggtcgggcggagcggagttcgtcgtcttccggggcttag

SEQ ID NO: 29422 - DNA, 267 bp, Zea mays
  Peptide Sequence Number=SeqID_72797
atggtgaaggaacgaatcatttcgcgtgggcgtcgtatgacagacatattggaagatgacgcggaccgaaagcagcagggtcgacgacgtcgaaacagcggggccgatgacgtcgaaggagcagggttcgacgacaagatcgcgagcagtcgcgtgaggacgctttctaaaaaccttattcgccctctatcggtgcaggatctcgaaggcgaagggttccggagacctgctctcccgagcgcagatgcacgtcggcggtcgggatga

SEQ ID NO: 29423 - DNA, 874 bp, Zea mays
  Peptide Sequence Number=SeqID_72798
aggacttggtcatcgaaggacgccagagccacccacgcctcgcgtggccgccatcgccatagacgaccgcgcgtcacgcgaccgccggagcaacccgcgtctcctgtggccaccaccgccgttgttgaagcctaccacgcctaacgcaaccgctgttaccgctgggtctgggggcggcaccgtcaccgtcactgtcgcctgtctcagggcggcaccgccgttggcccttgggatcaccaccgctcgcacgctcgagggaaccaccgccatgctcgcatgcccgagagaactgccaccatcgctaaaacctaatccttgccctgggctctctctaactattggaagccccgaccagcaaccgaccagctactgcctcctcggcgcccctcggccagctaaagggacctcctcggcgcgctcctgtgccgccacaggcgccgccgcgcgcctccatgcctctgccccagcgcctgccgcggctggagcaggaggcgccgtgccgttctcgatccaggcgcccaacgagaagatcgagatgtactcgccggccttctatgccgcctgcaccgccggaggaatcgccagctgcggcctcacccacatggctgtcacgccgctcgacctcgacaaatgcaacatgcaggtgagcgggcagcggcctagatctgtgtcccccggtggtattaatggagaaagatcagaaatagctgaaattgaagcagcatcaacaagtgaagctgctcggcttagagctgctctccggcgtgctccacccggcgctgttcgggaacctcaccagtcttttgaacggcttacacagacctgttttgataagagccgagcagcgattcttcaatttcggaccacgacctag

SEQ ID NO: 29424 - DNA, 132 bp, Zea mays
  Peptide Sequence Number=SeqID_72799
atggcggaagcaggggcgcgcgcacgtggtagagtaagggacggcggtggtgactctacttgtgcggcggcgggagtagaaccggactgggcaagggcgagagattacgacgggcaaaaaaatgtattttga

SEQ ID NO: 29425 - DNA, 570 bp, Zea mays
  Peptide Sequence Number=SeqID_72800
atgaccttggagcctcatcccctacagccaggctggcgttcgctggactctgagtcctttggataccgggcggaggatacgatcgaggcgattgctcttcacggactgaccactttctgcggattccaccccttggagctgtccactcaccccattggcttgttccccactgagaaggaggacgacccaatgtggaaggaccgagtggagcatgccaaggacatatgggctatctacccaggtcagactgctcacttcatagtacggtgcatgaatgccctgtaccgtctgcaagtggagcaactgtcaaatgagatcgaagagcttgaggaaccggtgggaacaagggagaacaccattgaggttctcgaggatcagttaattaacacccagcagcagcttgccgaggctaacgagcacctggatatgcatcaccaggagatccaggacatggaggccaacgaggaggtcgacatcgagggaggagaggagcctgcctccagcttggacattgcgggctcagggagaccgccttcctccgagtcgagtgttgcctcgtttgctcactag

SEQ ID NO: 29426 - DNA, 618 bp, Zea mays
  Peptide Sequence Number=SeqID_72801
atggtgggtacaagtgcggtcactgcatggcggcagccaggatcagtggagcattgtacgcttcaggacatggttgacggtgtaacttggcctaccaccctgccaccgggttggatggtccagtgggatgctgctccgatgaattcacccacccccgctagtggaggagacactcgtttcagctctgacttcctttctcgagatggccttacttccatcttatggatagtgtttaactccgcctgttaccctacgccccctttgtacacggtgcagctgtacgaggagcatcgggtaccatgttgctgggtctggctgactttggaggctcatccccttcagccgggttggcgttctcttgactctgagacaattggattcaggacggacgataccactgaagtggcagccatgaagactctgatgactttttgtggctaccatcccctggagatggtgatgcactccttgggactcttccctactgagaagaaggatgaccccatgtggtgcaaccgtgtgagccatgtgaaggacgtatgggtgatgtatcctgacttggttgggagggtcactgttcagtgcatgagtgcgttgtaccgccttcaggttctgtag

SEQ ID NO: 29427 - DNA, 255 bp, Zea mays
  Peptide Sequence Number=SeqID_72802
atggccgggacgacgggtttggcggcgggcggagatcgggacggcccaacagcggttgccgaggcgatgtggttggcggtctggtggcaggggagatggccgagtaagcggccgggcgcggggaggcggcggcgcgcgagggaggcggcgacgcacgagggaggtgggcgcaacggccacggagatggccgtggaggcaggctcggtggtggcgggcgagccgagggggagatggcgcggggaggtggcgggtga

SEQ ID NO: 29428 - DNA, 913 bp, Zea mays
  Peptide Sequence Number=SeqID_72803
tgcggcagttgcagtgcagacggtcagcaaaaagccatatcctgaatcgtatgggctggcgagtgctgagggtcctgttaacaacaacatagatagcactgaatctgccatgtcatcaacaaatttatctcatgggaaagaagttcacacagactattctgttactggcattcctggtgatggaagatgcctgtttcgttctgtggttcacggtgcctacattaggtcaaggaagcccatacctaatgaggatcatcaaagaaggctagctgatgagttgagaacaaagggggacttcgacacgtacgtatctcagattaggaagccacatgtctggggaggcgagccagagctgttgatggcttcacatgttcttcagatgccaatcaccgtctacatgcacgataaagccgctggtggtctaatagcgatcgcggaatacggccaagagcacgggacggaagctcccgtccaagttctttaccatggctatggccattatgatgcgctgcagataccaggagagggtggtccgagcgagcaagttgtctctatggctggagatggttggtgctacgccgacgcagaagaggaggcgaaggtgagcacgtccggatctagcgtgcggtcggcgatcgtcgtcacgtcggacgagaaagagatggtggagatggacgcgtccagctccgacgttgtctcggcgctcgtcgccatggcgagctgcgacatccgctttggtggcaaagagcagatggtccttcgacgcgcctggaggtcggaggtggaccgacatccgctgatgagctctcacgatcttcagactcctgattccagagcttattcttctgtatatctccgcgtggctctgtttctcctagccaacaaacaagccgtgacagaagaacgacgctga

SEQ ID NO: 29429 - DNA, 942 bp, Zea mays
  Peptide Sequence Number=SeqID_72804
atggagattaaggagttgaaggctgctttagagacctgctttgtgccaagacaaaggttgccaaagtttgacttgcatctccaggtcgcagcgacaaataaaggtgggcgatgcggtggcgacgcgggagcacaaccaccaggtatgtatggtattgatttggggacaatagtgggattggagcttgacgtcaacatcgtggcggcgaacgcaacgacaaagaaggcgagcaatggagcgccaggggttcatcagcagcagaagaggctgctctcagtgcttgtagcgcccaaggttgcaggaaccagcaatgttgtgtccctcaagctgatgggtggtgcccttattgggagacgctatgcattgagtgcggcagcagttgactccacggacccgccagcagagaagcatgagtaccaggctgaggtcaacaggctcatggatttgatcgtacatagcttgtatagtaacaaggaagttttccatcgagaactggtcagatgtgtggtaacggattctgttgcattgcttggtttatggaagaacatgaaaatatgttggggacaattaggtatgactctggtgaaaccgttgggttgttactcatttgtattttattccggaatgaccaaggcgccaccggacgactctcctcatcctcctctggcggaggcgggcgccgccacgccaagccgttcgataccgtcggggttcaagcagctggacgggcgagtcaaggtgcttcagatagtcggcgtggcaccaccgggagctgacctcgtcgcaggcggagtagctggagaggatccaaaagctgaaacaggaggtgcagaactggcgatccaatgtagagacgcaggtcaagacatgccagaatgtgagttctctgatgttccctttttcactcaccttggaaattcaagggagctgctggtagtataa

SEQ ID NO: 29430 - DNA, 1092 bp, Zea mays
  Peptide Sequence Number=SeqID_72805
atggcgctccacgagctctatgacgacggcggcccccagctctcttacggcagcaggacaacgctccgccgcaccaccgatagccacgacatcacgccagcaggatgcccagatctctccggctgccacatcggcatggccttctcagagaaggttggccgcgcgggaccgaggacgggacaggcgctctcttggggccgctcgcttccctcacccgcgtggacgcttgtaacccccctactgcaagcgcacctgacctgggcgcgggacgaacacgaaggccgcgggacttccacctctctcacgctcggctccggccgcctcgcctctcccccctccgcgctcgcccacgcgctcgacccatctgggctggggcacgcagcacactcactcgtcggcttagggacccccctgtctcgaaacgccgacactaactacatttcagcatccaccataactgcacacttatacacacatagtagcctcacatactggcaacgaaaggtttatgggtggcatttagaggaactccagggtctcaagaaaggacttgactctgaagtggaacagctgaaatcggaaatgaaggcgattaggtctgcggtacaggaagagaagggtaatctacctgcacaaaatacgactttagagacgccgtccattctacacttctataatctgagccgtccgatgctgcccacccaattttctgaccccgcttcccgatctcgccgccccagccccaaagtcatcgtgatttgcccctgcctcctcttccccgattccgccgccgccaaccccgtcctcaccctcgccctacgccaccggatgccgcgcgctctcctctgccatctctctcaacggcttgcctccagagatggtcgggagtgccggatgtcgcgcgctctcctctgccatcctccgtcccacgcctgtctcgcccttgccgatctggttaggcctcgtctcccagactcccatctcgccatgtctccacacgagtcgggaacgagcaactgcctgcctacctcggcctcctcccttgtcctcccctccccgtcgccccagcccccacgcgcgcgcgctcggtag

SEQ ID NO: 29431 - DNA, 432 bp, Zea mays
  Peptide Sequence Number=SeqID_72806
atgacgatggtggtagggatcgacgatagcgagcacaacttctacacgctgaagtggggcgcactgcagcacttcttcccgccgaccaagctgcaacactactgccttgttgtcgtcaccgccaagccctctgtcgcctccattgttcgccctgccaacctagttctggtggagatacttattctagaatcttcaaaagcatcaacgttagtgttcaaggttagtataacaagtattgcaagtgttcaagggagggcacattgtggcggctacgagagaccgattttcctgtgtggtggtgacaacgacaccgtggagccaagtcaatgtcggcaagctgatttttcagattggaacctatggttctttttaaagatcgaatatgttctagcatctttaaaagatttgtcagaatgtaaacatttgttttga

SEQ ID NO: 29432 - DNA, 2892 bp, Zea mays
  Peptide Sequence Number=SeqID_72807
atggccaacgtggcttcgctcctaccctatataagaggtatccacgtgctcataaggtgtcagcgaacacagggagatgattggcggaagccgggacgctacaggcggtcagatcgcgcagcaccagcaccgcttgcgctcatcacttcaccagtgcgccagccagcccccggcgcgccgcggccatatacgcgcacgtcgcagaggggagcggcagcgacgaccaggagtttcagccgcgccgccggctgtacgccacaggcggatcgtccgtgtcgttcgactgggaggagaggcctgggacgccgaagagggggctcggcgggggcgtgcccgccgcggacgtggcggcatgggacacgggattcgagttcggcaagggccgcgccggcagagacgcttacggcggccgacgagctctttgagaagggcaagatcaggcctttgaagccgaggcccaagaagacggccgacgacgagcccaagattcgtccgttgaagccgccgccggggctgctcgacggcgggagcgtcacgccgtcgccgcggtctccggtcgtggccagaggcgcaggcgccacgtggtcgccgcggcggaggagcagggtcggctccggcgtcgacttcgacccgttcgccgccgcgctcctagaggcaaccaaggcgccatcgccgctcggcggcaaggacgacgagggcggtgttgctgttgccccccatggctcgccgcccacgagaccggccacgcgtcccgcgtcgaggagcgccgggtggagacggtggcggctcagcgatctcctcctgttccggagctcgtccgacggcggccgcgtcaacagctcgacgtgcccgtcaagagggcgagcgcagcagccgccggtgatgacgatcaaagccagcgccgcaaagcgcgaggacatgggcaagggctggaagcacggcgacggggacgcggccgcggcggcggacagcgtcgccgggatgtcctcctccgacccggacgacgcccccgacgggggcgaggactcgcccctcttccgccgcagcggggggccgtcctccggcggcaccgttggcgacgtccccgtctcgcagtcgctcatcaaggcggcaagcaactcctcggccgccatcaccacctcgctctcccgcgtcctccccaactccaccttcctcgtccccgacgactcgctcctccccaccggcgaggatttcaactcctccaccgccgtcccagccccggtgcgggatgaagatgacgcggctgcggccgtcagcgccgcctccgccgcggccgcgggcaacaggacctgcgacccggacctgcgacccggattcgcggcgggggggagtgcttcgcgcgggcgcttcgtggcgggcggcgtgcgtgtggtaggtgaggagttcggtagcggctggcgtgcgggagtcgcggcggctggcgtgcggcgggcggttcgcgcaggcgggggcagtctacaaatgggtcttaatagttgtagagatatcaaatgctctgggtggtctcgcggtggctcctggctgtgtggtctccacgtcgtcatgtggaacgggccaggcgccgggccgcaggagagaaaattatttttagatacccgtcataaatatccctaccggctgcactgcactgttctgccccgcatggccgcgggcgcgtcgacgagcgccccagcgacgagggcgcttcgtttcttccgttggggaggcgggagtgtgtgtgtgatgtacggcgcgccggtgcccaaggacctcaacctaccagcagccctgccgcagccgaccagggccggtgcgaggacgccaccgcagcagcagcagcagatgagctccgcggggctgctgcgctacaggtcggcgccgagcacgctgctcggcgaggtgatgtgcggggatcaggacttccccgcgacggatggcggcggagggcacggaccaccggaccacgccgccacggacaacgtcctcgcgctctttctcgccgggcaccactcagaggcccgggactgcaagcctccccgccccgccgcggccgctcacttcatggacgaagctgccgcctcgcaacagcagcagctcatgtaccagtcgcagcagcagcagcagatggccgccatggaggggctgtaccacaacgtcagctccggtggcacggagcacggtgcgggcgttggcgctggtaataacagcctgatccgccagagcagctcccccgccggcttcctcaccaacgggtacggcggcatgctccgtgcgggcatgggcatggccggcggcttcaggaacggcgtcagcgacgcgcggctcaaggggcagctgagcttcccgtcccggcaggggtcggtgatgtcgcagatctcggaggtgggcagcgaggagctcgacggcggaggcggcggcagccccgaggcggccggcagcaacgccagcggcgcgccgcgcggctacgtcggcatcccggggtacccgatgggcggcggcacgtccggcgcctggtcggacgagccgtcgccgtcgccgacgtccggcgcgaagcgccgcccccgcgactccggtcccgcgccgcagaacgtgcagcagcaaccgctggcgccgcagctcagcctgcccagcggcggcaagccggcctcggcggagatggcggcgatcgagaagttcctgcagttccaggacgccgtcccctgcaagatccgcgccaagcgcgggtgcgccacccacccgcgcagcatcgccgagcgggtgaggaggacgaagatcagcgagcggatacggaagctgcaggagctcgtgcccaacatggaaaagcaaaccaacactgccgacatgctggatctggctgtggactacatcaaggatcttcagaagcaggtcaag

SEQ ID NO: 29433 - DNA, 819 bp, Zea mays
  Peptide Sequence Number=SeqID_72808
atggagattaaggagttgaaggctgctttagagacctgctttgtgccaagacaaaggttgccaaagtttgacttgcatctccaggtcgcagcgacaataaaggcgagcaatggagcgccaggggttcatcagcagcagaagaggctgctctcagtgcttgtagcgcccaaggttgcaggaaccagcaatgttgtgtccctcaagctgatgggtggtgcccttattgggagacgctatgcattgagtgcggcagcagttgactccacggacccgccagcagagaagcatgagtaccaggctgaggtcaacaggctcatggatttgatcgtacatagcttgtatagtaacaaggaagttttccatcgagaactggtcagatgtgtggtaacggattctgttgcattgcttggtttatggaagaacatgaaaatatgttggggacaattaggtatgactctggtgaaaccgttgggttgttactcatttgtattttattccggaatgaccaaggcgccaccggacgactctcctcatcctcctctggcggaggcgggcgccgccacgccaagccgttcgatatcgtcggggttcaagcagctggacgggcgagtcaaggtgcttcagatagtcggcgtggcaccaccgggagctgacctcgtcgcaggcggagtagctggagaggatccaaaagctgaaacaggaggtgcagaactggcgctccaatgtagagacgcaggtcaagacatgccagaatgtgagttctctgctcttccctttttcactcaccttggaaattcaaggctgctgcttgtagtataa

SEQ ID NO: 29434 - DNA, 234 bp, Zea mays
  Peptide Sequence Number=SeqID_72809
atggcgcacagtgacgccgaggggacgcttcggcggggcagtactggcgagtacgctggtcaaggggaggaggacggagcggtgccaaacttccctgtgcggcgaggagacggtgatgaagagacggcggtgaaggacggcggtgaagggacggcgggcgtcgtatgcggggaggatgacgaagcggctgaccggtgggaccggtctgccagtggaagcgggcgcataatctag

SEQ ID NO: 29435 - DNA, 1345 bp, Zea mays
  Peptide Sequence Number=SeqID_72810
atggggaccacaagtcatgccggctcgccaactgcgccttcgcgcgcgctgaggctgcgtcccgtcgcgccgcgctgtacttcgccaggaggcgctgcgcgccttccgatgttgtcatcgctcgacctctccgtgtgcgtgggtcttgacgatgcctccctcgctgccacactgcccgaggagccaccactgtccgtccgccaggtgcgcctcacgcgggctagctgcgtcggctggtgtggcctagaggcgctcatggtggtgtgcccgaggctggaggcagttgacctctcgcactgcatcgccgccgacgacagggagatgaccgcactcaccacggccgctgggctcatggagctcatcatcgcctcagcgtcaccgatggtcgggctcgagaatgtcgtcgtccgatgccctgagcgccagagactcaaccacaaatgtgacatcgccttcctcaccaatcgtgccaccgcctacctccacatgggcaaggtctctcccggttcgtgttcccactctccattcccacatgaggcgacaaaccatggtgctctcctactatccacaacgctctccttcaatctgtggccccactgccatcaacaacgatgtcgccccactacatccacggacatcgggaaagacgatcaactcggaacctcctcaaggctccgtccctctacgccatgcgtggggtcccccactgtcacactaaccctcaccttcgacctcgaggactccgattttgtagcagtccatttacctatgcctttcagtgtccatggtgctgttgttgtgaagccttgcaattcatttgttgggttcagtagaaccatcaaggaagcgaagaacataatactttcctccacaagctaccataggtgcagagccaaaaagtgggcatgctacaatctgctgaaggagcacatggacattcaggttctctaccatgatgatggagtgaaagacagcccctctacaaatggcagcaaagagcaacagggaagaaggccagcactggattgcaaacgggctcggttcgctatgaaggatactggaagtcacggtggcgtccctataaggcgtaggcctgacgtcacccacgccctcgcctcgcacggggcggcgcggcggccggcggagggaatggcgaggcgaagcagaggcagcggcagcgtcacggacgcggcgtcgaaggcggacgcggcggcgatgcggatggtgtcccgcaggggcgccgtgcggctggtgctcgtgtcggccaccgcctgggccatgctcgggctcgtcgcgctcgccttccacctccggccatgcagctcccgcgtcgcattcctctcag

SEQ ID NO: 29436 - DNA, 525 bp, Zea mays
  Peptide Sequence Number=SeqID_72811
atggccggatctggctgccgtctccggggaggcccgctcggagtcgagctcctgccgcagcccccgcacgacgtcctctgcggcctccttctcctgacgcagccgctgcgccgccagctccttggggagggagcaatcttcagggggtcgagcgcggtcctccggcccgcgcgagctcggggagccagggacgcacgcgggggagggggtggtgcaggggcgacaacggtgtcgatgtcggctactcggcttgacggacgtgacgctaggatgaacacatcttgttggaaggcggcacatcggcgaggacaccctcctaggaaagggggaggaggcgacgatgacgacaagcaagaggagcttttgggtttgggtctaggtctgaccgacccagggtgtggaggagcgggcgagcatcgcgcgcatgatgaggtgcgagggggcgagggagatttgggtcgaggggaggttgaggagagactgcgggctggggaggcgacgaggggagggcggatttcacggtga

SEQ ID NO: 29437 - DNA, 228 bp, Zea mays
  Peptide Sequence Number=SeqID_72812
atggccggccaagctgttcggaggatcctccagcctgtgtgggagaagctctccaaattctctggccatgctgctggcggctcctccatagagtccttgatgaagatgtcggagccggctgtgctttcgcacttcaagcccgcggactatatcaacatactggctcagatacacaaggagctggagtgctgccctcctgacgacaagacctccctatacctcctataa

SEQ ID NO: 29438 - DNA, 543 bp, Zea mays
  Peptide Sequence Number=SeqID_72813
atggctagcgttgtgtgtctcaccggccttcggctctcctggttgagcttggtggcgccttcctctcgatgcacataccacggtgggggtcagatcaggacttcaccttcacttgttcctcttgaatccactcaaatcctcgccatccagggcccccaaatcaccccgaattcacaagaaaacgccgggaatcaaacccccgcgccagccacgggcaacagaagaggtgtggaggagcgggcgtggacgggcgagcatcgcacgcaggatgaggtgcgagggggcgagggagatttgggtcgaggggaggttgaggagactgcgggctggggaggcgacgaggggagggcggatttcacggtgacatgcgcagatttctcggcgacgactttcgcgggggaggcgggtgcacggtgcgaagggggtaggcgggagcatgcgcgggcatcgcgtgggcgaggagggcggagccgtggtgaggtggtggacgccctccttacactcttaaagagtagtagagctaaaataattctagcagtgtag

SEQ ID NO: 29439 - DNA, 1227 bp, Zea mays
  Peptide Sequence Number=SeqID_72814
atggcctcagggcggacgccactgcaaccttgccctcgcccgcgccgacgcacgaggggcgaggacaagtacaaagagctggaggcccggagcgcggatggtggcggtgatcccgtcggcgacgaggacttctcgagccgcatccaccccggcaccgacgacaggagccgtcagcccatcggcagatccccactcggatcctcccggacgagcggggcaccgacctcagcgcggaggcgccgtaccggagggggcaccgggagccaagccagcgagcccaacgcgctgaagctgacgacgcccgtcgttgaccagccccgcgttgtcgaagtccgcccctctcgctgggccagtgagcgccctctccctcgaatactgaaggagaggctaacccacgaacccgcgcgggaggtagagctccggctcagcccggcctccgccccaacaaggatgatgaacatccttgaagctgagggcgggaccaagatcgcagcccgacttgcttctccccacctaggggctggtgaaggcggaaaggcacaatgcataagggagcgtgaagacatggtcacctttcaagggggtcaccctccttttaaaggcaactctccctacttgcgtccccagccatcgcgggctgagtcttctccaacacgctccaaggtcctccccctatggcgcgggggctgggtcccacgcgtcatgcaagctggcccagggcagaagaagccaaaccgccgcacgtggtgcatgcaactgcccagcggttacaagcattcctccactttcgcccagaccagcgggcccacgcgtcatgcaaccggcgcgccggttgctacgtgcaagcaactgcaccgccactcacaccactaccacgcctcctcgactgcggaaccagtaccgcgactcgaggcaaccctgcgtatgacccagcagtgccagccaggcgcgacggtcaatacggccaaaaatgggccggcagtaatggcggtggcaggcgagcaggagcagcggtcacgtcgtcagccaagcttacgtcccatccaggggcagcgagagaaccctctctcacggcgtgaagacggcacgcccgtgttccgttcctcaaacggctcacgcacgcgcaacggccgcctcgcgaaccactcgccccgtcgcattaactccgcggcgggacaggcggcgcctcaggcaggagaagcaagcgacgcttcgccttcaccataa

SEQ ID NO: 29440 - DNA, 1695 bp, Zea mays
  Peptide Sequence Number=SeqID_72815
atgccctacgtgcccccccgttggggcgccggcgccgtcgactcgctcgacagccgacgaggtgccgcctcctgcttggccttggttgccccgcctcctcctccgtcggcgggggaggggacggggcgagctcgaatgttgttcttccaccacgcggggaagacgtcgtcgattcctccgccggcgggcgggctgtcggccgccattgtcgctgtcgcgcggcgagggaaggagtatcatgtcgtagctgtcgtcgagggacatgaactcaatactcccgaaacggagtaccgtcccgggctggaaaggttgctggagactgcccatctgaagcttgacgggaagctgttcgtcaacacgcagcaggcccctacctggcgcgccaactgtcgtcgtttcgaacccggggggtccctggaccgacgagtaaattatcgccgcgtgccccagcccagatgggtcggcgcgagacggagcgcgaaggggggaagaagccggagggagacgggcgtgagaggtggaatcccgcggccttcgtgtttgtcccgcgcccaggtagggcgcaaggagaggatccagcctgagtcagcttggggcagggtaatgatggcgcctcctgttgacgtggtcggtcagtgccctagtttgggcgaggtggaggctcctccgaggttgaggtcgagtctgtcttccaaggtcgaggtcgagtccgagcccccgggtcggacgaggcggagaccgtcggctgatgccagggctgagtccgagccctggggtcgggcgaagcggagttcgtcgtccttcggggctgagcccgagtccgagccttggggtcgggcgaagtggagttcgtcgtcttccggggctgagctcaagtccgagccctggggtcgggcgaagcggagttcgtcgtcttccggggctgagcccgagtccgagccctggggtcgggcggagcggagttcgtcgtcttccggggctgagcccgagtctgagccctggggtcgggcgaagcggagttcgttgtcttccggggctgagcccgagtctgagccctggggtcgagcggagcggagttcgtcgtcttccggggctgagcccgagtccgagccctggggtcgggcgaagcggagtttcccatggcgcctagggccggacttggctgctgtcagcctcactctgtcgagtggctcagcagtcggtgcggcgcaagcggcgctgtccccttgtcagaccagtcagtggagcggcgaagccacctttgcattaaatccccctgcgatttggtcggttggcgtggcgatttggcctaggttgcttcttggtgaagactgggcctcgggcgagccgaagctttgtgctgatgggggttaccagctgagatttaggagtcttgaggaaaaccaattccgccgcccacgtccggacctgcacggcgggaggttgacggagatactggagccgctgccggagccgagggagacatcctcggcaccagcccgagaagaggaacaccgcgcagcagggagcccaagcaccaggccacggtggacaacaatcagaatggatgcacggcacctcacaggtgctgtagcaaatcaacagatcacgaacgcagcaccactcccttcctctctcaatcagtaccagctagaaccaccaccggttgacagcgatggaaacgaaccagagtag

SEQ ID NO: 29441 - DNA, 1254 bp, Zea mays
  Peptide Sequence Number=SeqID_72816
atgggatatcctgtcaaaagtttgaaaactgtgcacatcaataaagtggtactcaaggtccccttcatacagcagggggcacccaaaagggaggcgaggtcaagatctagaagccaagagaggttctcagtttactcctttcatttgtctgccaaggctaaatgtgctttaaaatgttttctacacatgtgggaggaggatgctgttaaccgtgggaatactctgtatgtgactgggctctcttcgagggttactgaaagggatgttaaggattatttttctaagcatggaagggtggttggttgccatgttgttcttgaaccccatacacgtgtttcccgtggatttgcctttgtcagcatggacactgttgaagaagcggagcgttgcataaagtatcttaatggttctgtaatggaaggtcgaaacatcacagttgaaaagaagatattgtgcaagctatgtccagcagtcaagatgctgagttcaccaattccagctttagctcatacggctcgatcagtggacagcccaaaggtcacgccgtggtcgcccaaggacaccaactcctggaagctatcttggtatggaagcagcatttttagttctgtagatgctaaatcattttacaacattcttttgaagcctttcagccatcggtacgagcgtagggagcgtgggaggttccatagaggctatggtggtgggcgtgatgagtattacggcaatggcggcggcgggtatggctaccgcaggtctccgcctcccatgtactcttcctacagggagagtcgggattattatccctcctacaaggacagccgggactaccctccctacagggacggcagggactactctcctccccacagggaccctcgggactactacgaaagcaggggtggccggggctactcgccgcctccttatggtggtggtaatgtagaggttttctctccgccggtggctgctgctgcgatggctgcgtatggctctcgcagctctggtgatatgacgcactgtgctgcatgctgtgtgatggacgcgcgcggatcgagcggcaggctgctgcgccgcctgctcgtgtgcgctttgccgttcccggagaagggcacgctcgccaacgcagatagagcggagcgcagggggcattgggcggcggcggcggagctcaactgcaactccggtttgagcggatgggcggccgtggcttgcgcgtccctctgcgtgtccgcccgcttctcgtctccttaa

SEQ ID NO: 29442 - DNA, 348 bp, Zea mays
  Peptide Sequence Number=SeqID_72817
atgggggccacgggtcagtcagctgcggggacagatatggcagttggcgtgaccgaaggcgggttgacggcagagccccgatgctgccacgtggcatactacgcgcggcataagccaatggacggaacccggcgtgacgcctctaggctacgcgcgccttcattatggataagacgtgcgcctatccattccactaacaggcggcgtgctcagtccacgatacgtgggccacgcagttactcaccattactcccgcattactcgtacggtaactgcccgtcaatgcagcatggattgcggacatcaagactcccgctgattactcatgcgttactctatcagcattag

SEQ ID NO: 29443 - DNA, 288 bp, Zea mays
  Peptide Sequence Number=SeqID_72818
atggctcggctggtgcaaggggacagaggcgcaaggcgccaaccgggaaggcgagcgagtaatggtgagacgacggggcagtggcgaccggcggtgatcgcgtcgctagccccggtcacgggcgcgaggaaggcactgacgggcggggcccgcttgccagggagggagagatcgcgagggaggggagcgcgggctgacgggtgggggcggggtgtaagtggcgggaatctcgccctcgagattcagacggggctcgagaaaaggcatttgcggagctgggacacatga

SEQ ID NO: 29444 - DNA, 1005 bp, Zea mays
  Peptide Sequence Number=SeqID_72819
atggaggttcgctgccaaaccaggttttgccagaatgaagatgctttccccaagttgttgagagcatgcacagttcgcctcggaatcaggagccaaccagagtatgatggtcgtgaattcgtcgagcatggcatagagaagtgtgtcgtgactgtatacattggatccagtccgcaccatgtggaatggagtgtcactgctgctgggcacagattcaaagacacctgccaagtcatcgctcgcaaggcattgagggccctatgtcagatctatgaagaagaagtggccgacacaccgctcagattctttccgccctttcagagagaccgtccagtttggatggccaggatgcgtgcattggaagggaagcagctacttgaggatgaccccacagtcgtgcacctcactgcatacctgctcaccctggatgcacaatatgatttcttggctcggcaccaccgtcagatgattgcccgagcagaagatgcagagaagcgcaaccgtaagctccatgtggatctcaccacagctcaagcccgtgcaactgccttggaaagtcgtgaagtcattgctgttgaagccctgaagcaagccaaggatgagcatgttcagaagttgatggaggcctacttggtaacccataaccaacgtcacccggtctctaccagaggagaaaacaaggcttgggaactcccggaaggagccatagtcttggaaagaatcccagtcttccctcaggctatggataagcaagagcaacccgagtcctcccaagatcccccgccggagttgtgtgagtccctcaccatgaagaagattccagcaccgtcccgtgagatcaaagaagctgcaagcaccccaccagcattgccgccctctgaggagctacaagagccagtcgcgcttgaagaagagttcgaccccgtcttgccatctcagtcgccaccggaagaagtcatcaacatcagctccctcttgacccatccaggagatatctcagattga

SEQ ID NO: 29445 - DNA, 429 bp, Zea mays
  Peptide Sequence Number=SeqID_72820
atggtgcttgcggtcgtggtgctgctgggcgtcgtggccgtccttgtggtggtgctgctgctgcagccccgcgtgtcgtacgtggcggtgtgggcgggctggcgatgctctgcgcctacccgttccgcgtgcccgccaggggcgtccctcccgctggcgtacgtggcgcgcgcgcagggcgccccgctggggcgacgccgggcaagcgcccgccatgggaggcccgcgctccgcgacgggcgtgggtgccgtttccggggtggaatgggggaggcccgggacgcgaatggaaaggtcgcggggattcattcgggcgtcgaccagtgggacgcgccctgggcgtgcccagctccgcttttttctggccccaacgggcaccgtgctccccttcaaatgcatctccaagtcccaatttcttgttttttctga

SEQ ID NO: 29446 - DNA, 219 bp, Zea mays
  Peptide Sequence Number=SeqID_72821
atgaaatcccacatcaccacagagcttgaagctaaattgggcattaatatgtccttagtgcttagcacccagaagagccgagacaagtatgtcgacacctatcttgcccctctagattgcagatggatccaaaacaaagtcctaggcatgagtgctttaagctctcttatcgggtcattgataaatgcaatcgaggctgaaccaataatcgcaaaatga

SEQ ID NO: 29447 - DNA, 987 bp, Zea mays
  Peptide Sequence Number=SeqID_72822
atgaagctgtggaaggagacttccaggagttccaagactacgacgagttctaggcgtgggttagcggcaacccccagtcggctgcctgtgaaggccgcggttatctacgtttcgttttcgcactttgatttattatggctcgacttagacacactgcacgaaagtccgtcatccccttcttaccctcccgccttgctgagcgtccgcttcgccgtcccgtggccggacagtccagccacttggagagactgcaccaccgcctgcatgaggagcaggaacgtcgacgatagctcgagccacgacaccgacttctctgctaaccatgagccggaaggatgggttgctcgacccatcactcgtgacgctgctcgcgggtgtcacttccacgatgcgctcgacaccctgctacgtcgggcacttaaccggcatacttggtccatcgagtatcgctgtgtggtctaccagcatagtcgcggggtctacccggaccgctgggaggcaacctgcttggtgcgccgcccggagaacagtctccagggtgcggaggcctgctcagagcactattctatctctgagcgggactcagctgaggcagccatgcaagatgctgcacggcgtgcgctttcgcactactgctcggtttttggtggggtagctgacggccttgacctgaagtattacccccgccgtccatctggcagcacaggaggcgtgattgtctcacctgttggtgagggcaatcctaggttgagcagcacagtcaacctagccgccgtgctaaacacggagctggaccatgcactagacgagctgagtagggctcgtgctgagatcgccctgctgcgggctgagcgcgcggaacgtcgtcacctgaatggtggttcccccgctcccgtcgggactcaacacccgtaccgctcacctcggcgtggacaccagtcttatggcaatcccgactgcaagaccaagataactctagaaccatag

SEQ ID NO: 29448 - DNA, 252 bp, Zea mays
  Peptide Sequence Number=SeqID_72823
atgcctggtggttttgttgggcaacgcgcgaggtgcctcgttgctgctacattggttaaaatattaccttctgtcttccgcagcggctccaaggaggcgcactacaggcgtgcgcgacgcggccccaaggaggcgcactacaggcgcgtgcgatggttcgctctacaggcgcgcgcggcggttcactttttccgcacccgaagttcagcgcacaatctgtatgacttgtggacccgagtccccgtgtcatag

SEQ ID NO: 29449 - DNA, 501 bp, Zea mays
  Peptide Sequence Number=SeqID_72824
atgaccgccatcgcagcaaaatcatcccaagggcctccctacactgaccactcccctactgcccttgcccctttcaggtaccaagatgatcttcagggaatcccccacacgtcggagggaggaaacacggcgctgctcaacgccggcaagaaattaaacctgtcccgagagcacccgcgcacaaattcgatcaggtacaagaccctcgtccgagctatcgccaacgacaccacgcagcaccaaagacacaatctacacagagatcaggcgtggcggccactggcgttcctggtggcgatggcgaccgatgtcgcagaggaatgcggatggggaaaaggggtgcccgagtctcagctttataatctggaggcaaggattcccccgaccagtcggtttcggagctcagcgcaaaacatggcggagtcgcacgcgccgagcgcgtggttgttgagacttctgtccgccgtgctcgctgtttctgttgggggaaggaggagataa

SEQ ID NO: 29450 - DNA, 501 bp, Zea mays
  Peptide Sequence Number=SeqID_72825
atgaccgccatcgcagcaaaatcatcccaagggcctccctacactgaccactcccctactgcccttgcccctttcgggtaccaggatgatcttcagggaatcccccacacgtcggagggaggaaacacggcgctgctcaacgccggcaagaaattaagcctgccccgagagcacccgcgcacaaattcgatcaggtacaagacccccgtccgagctatcgccaacgacaccacgcagcaccaaagacacaatctacacagagatcaggcgtggcggccactggcgttcctggtggcgatggcgaccgatgtcgcagaggaatgcggatggggaagaggggtgctcgagtctcacctttataatctggaggcaaggattcccccgaccagtcggttccggagctcagcgcaaaacatggcggagtcgcacgcgccgagcgcgtggttgttgagacttctgtccgccgtgctcgctgtttctgttgggggaaggaggagataa

SEQ ID NO: 29451 - DNA, 114 bp, Zea mays
  Peptide Sequence Number=SeqID_72826
atgggggcggttccaggaagaagctctatggcaaactcaacttttcgctcaggtggcatgcctggcggactaactcggtcaccacttcctctcctagtggggacatcaacttga

SEQ ID NO: 29452 - DNA, 450 bp, Zea mays
  Peptide Sequence Number=SeqID_72827
atgaacaaaaaccctggcaatcgaaatgccattacaaacggaactccggttccccctccgcaggtacggataaccccactccgagggggaaggcctgcggaacaacggaaggccgacgaacggcgcaccgtcacctgctccagcagcggcgacgacgatgacttccgctccgaggggccgaacagcggcaacgctgacctcagggtggatgccgctgccaggaggcccccgcccgtgccaaaattcgtgaggcaaggatgggcagaaggccgtagagttggaggtcagtccgtggccggccctggctatctcgccggcagaagaacctcttcaagctgcagtggcggatgccagtaccgcgagcggctccgaagccactcgcgcccgagagccaggcacgctgcagctgccagcgccacagacaacacccgctcctccccccatcactga

SEQ ID NO: 29453 - DNA, 177 bp, Zea mays
  Peptide Sequence Number=SeqID_72828
atggggtccaggcacagtgcttgctctgccgaggctgagtgtcgaggttctttcgttttgctctttgttagtcactctcctgtggggaggggttgtccgcattgtaaccgctgctcaggagaaggtgaagcagtggaaggagacttccaggagtttcaagactacgatgaattctag

SEQ ID NO: 29454 - DNA, 201 bp, Zea mays
  Peptide Sequence Number=SeqID_72829
atgggtaacatgacttgtgggcacagggtacaacatctgcagagtgtaaaactgatggtcaatactaggaagggaggcaggattgatctacctgccaaccctttcaaccggagggtacttagacaacaacaacaacaacaagctgagatgaatcctctgaattctccaccagccagaactgatccaatagttgtagcctag

SEQ ID NO: 29455 - DNA, 778 bp, Zea mays
  Peptide Sequence Number=SeqID_72830
atgggcgtgagagaggtggaaatcccgcggccttcgtgttcgtcccgcgcccaggtcgggcgtaaggagaggatccaggtgtacaatgggggtgtagcggagtgctacgtgtctagcggggggagagctagcgccctaagcacatgccaatgtggcagccggagagatcttggcaccctgctgctgagagccaccgtcgtcacagggcttgcggggcgccatcattgcctatctggcggagctagccagatgggacaccggtcttgttgtctgcggcccgagtcggctcggggtagggtgatgatggcgcttcctgttgacgtggcgggcctgtgccctaggtcggtcgggcgacgtggaggctcctccgaagccgaggtcgagtctgtcttccatggccgaggtcgagcccgagcccctgggtcgggcgaggcggagtttgttcggcagaggccagggcggagtccgagccctggggtcggggcgaaacggagttcgtcgtcttctggggctgagcccgagtccgagccctgggtcgggcggagcggaattcgccgtcttccagggcctatccccgagtccgaacccagggttgggcggagcggagttcgccgtcttccggggcctagcccgagtccgagccctgggttgggcggaacggagttcgccgtcttccgggggcctagcctgagtccgagcccctgggtcgtgtggatcgggatttcgccgtcttctggggtctatcccgagtttgagccctgggttgggcgggagcgga

SEQ ID NO: 29456 - DNA, 348 bp, Zea mays
  Peptide Sequence Number=SeqID_72831
atgtcgccgcgcaccgcccgggtgaaacccgccgccgccgtggaacgagaaaaccaaaggcactcgggccaattgcgttggtggagaagcttcttcagggtgcggcggaagtctccttggcactattggggggaaaagtactcgcggttcgtggtgaattcctcaccggaacccatcaccaccgccaaaccgctctgcgccgtggaccacatctccccaacactcaaccacgcgatgtttaattttgggcttgggggtagtggctggccagattgcgcgctcgccggtgagctattcgccacgggagccgagctctggcgcatgggcgcgctcggatttggggattag

SEQ ID NO: 29457 - DNA, 162 bp, Zea mays
  Peptide Sequence Number=SeqID_72832
atggtgggtacaagtgcggtcactgcacggcggcgaccagggtcagtggagcattgtatgcttcaggacatggtttatggtgtgacttggcctaccaccctgccaccgggttggacggtcgagtgggatgctgctccggcaggtgaggagcaagagaagtag

SEQ ID NO: 29458 - DNA, 519 bp, Zea mays
  Peptide Sequence Number=SeqID_72833
atggagcctggcggagggacagctgtcggagctgttgagtccttgctgacgtcctcttgcttccgtaagggggctgagagccgccgtcgtcacagagtatgcggggcgccatcattgcctatctggcggagcgagccagatgggacgccggtcttgtcccccgtggcccgagtcagctcggggttgggcgatgtggaagctcctccgcggccgaggtcgagtctgtcttccgtggtcgaggtcgagtccgagcccctggttcaggcgaggcggagaccgtcggctgaggccagggcggagtccgagccctggggtcgggcggagcggagttcgtcgtcttctggggctgagcccaagtccgagccctgggtcgggcggagcggagttcgtcgtcttccgggacttagcccgagtccgagccctgggtcgggtggagcggagttcgtcgtcttccgggacttagcccgagtccgagccctgggtcgggcggagcggagttcgccgtcttccgggacttag

SEQ ID NO: 29459 - DNA, 411 bp, Zea mays
  Peptide Sequence Number=SeqID_72834
atggccatcgctgcactagcgctgtgcatcgccgctcggcccgaggtcgggcgaggcggaggctcctccgaggtcgaggctgagtccgggcccgggggtcgggcgaggcggagaccgtcgtccgaggtcgaggctgagtccgagccctggggtcaggcgaggcggagtccgtcgtccgaggtcgaggctgagtccgagccctggggtcgggcgaggcggagtccgtcgtccgaggtcgaggttgagtctgagccctggggtcaggcgaggcggagcttcctatggcgcccgaggctggacttagctgctgtcaccctcactctgtcgagtggcacagcagtcggagcagggcaggctgaaagttccctatgcccgggaacaggatctggatgtcgcctagagggggggtga

SEQ ID NO: 29460 - DNA, 267 bp, Zea mays
  Peptide Sequence Number=SeqID_72835
atggcgaagaccccccggcaaccacgtggaccctactgctggcatcggcggggaacgacgtcggtggtcacctcctcgcggcttcgccccccctccatgaccgccgctccctcaccggcgatggtagttgggctctcagggcaaggggcagatggcatggatgcatttgttaaatacccaggggtcaagtttgaggcggtggtggcaacccgactggtggaaatctccggtgaacacagatggacacacaatgttctgttacgatag

SEQ ID NO: 29461 - DNA, 360 bp, Zea mays
  Peptide Sequence Number=SeqID_72836
atggtgattctcctcgttcggggtcaccttgtcgtcgccaactacgacgactcccgtgtcatgctcgtatgcgtggatgaggataaggcagcgtctgtgccaacgaccggcagcacgatcagcgtgcaatcaacgggcgacgcgtcgccagagccaacggtcaccaggccgcaacggactatccggtgtgcaccggacactattcggtatgccaaggggaccgtggctgaaatggtaggcttcgccaaacaaggaaagaaatcgtgcattgttcatgtccgatgctgcaccgggctgtctggtgcgcccatggacagaaggcaagaattgcctaccaaatggagctccaacggctcctag

SEQ ID NO: 29462 - DNA, 1323 bp, Zea mays
  Peptide Sequence Number=SeqID_72837
atgggcaccgaacatggtgtctccggtgagctgcaagcggggtggccgttgcgcgtgcgcgagccgttcgagggacggatcacgggcgctctgtcttcacaccgtgagagggggttctcttgctgcccccggacggggctggcgccgctgggtcgtgcgctgggccgcctcgagtcgcggtattggttccgcaaccgaaaaggcgcggtggtggcgcaagtggcggtgcagttgcttgcatgcagcatctggcgcgccggttgcgtgacgcgtgggcctgggcctccatgctggcgtgttgggagtcggagaagtgcgtccaccctgggcgtgattgcatgccgcctgcatggctgcccgccccttccgcccgttggcctgggaaaaagtggggggtcgcttgtaactgctgggcggttgtgtgcaccacgcgcggcggtttggcttcttctgctccgagccggcttgcatgacatgcgggacccagcccccgcgccgcaggggagggccttggagcgtgttggagaagactcagcctgtgacgtttgggggcacaccccggctgcacccctccaccggcggtcacccaagatggtgacctccagcttgatggtgggggaaagcgagccgggctgcggcctctccccctccctcagcctcaaggattttcatcaccaaggctggggaggggactgcagcgtgcccggctttcggacgcgagtggcttcggagccgctcgcggcgccggcgtctgccacggcagctggaagaagttcttccgccggcgagatagccaaggccggccacggaccgacctccaactctacggccttctgcccatccttgccttacgagtttgggcatgggcggggacctcctggcagcagcatccgccctgaggtcagtgctgccgctgttcggccccccggagcagaagtcgtcgtcgtcgccactgctggagcaggtgacggcgcgccgttcgtcggtcttctgttgctccgcaggcccacccctatcgagtggggttccgggttgtccgtcagcggaaccgatgccggagttgatcagccgaggcctcggaccgggctggcgcccttggaagatggttggccgaggcccctgggggatgtttgtgcgagcgagagttgcttctcgcggaaggtgatgagtgagaaggtgatgagtgagccgaagcaccaggtcgcccacctggaggtctcggggccggacccctcgggcgtggtagcgtcgcagggactgctggccctcgtcctcggggagccgtattccaggtcagtgggcaagatggcctcggccccgtag

SEQ ID NO: 29463 - DNA, 2700 bp, Zea mays
  Peptide Sequence Number=SeqID_72838
atggaggtcgttgagttggttccttgcgcccgcaataaatggggcaactggtatgagttttggttctacgttgcggagggcacggtcgaggaccatccggggctccccgtggccgagatgtgctcgcattattactcagcatacccgcagtttgaagtggcggaggaggatgcagacgaaggggccctttggtgcgcggccggcctgagcagcaggcgcgatttggttgaggtgtttgtggcgtatggggtgtggcctttggcgcatggctgggcgctgggcgaagtatgccctcgccagatgccttcccgtggtgggatgctggtgcgaagtcccgcctttgcactggatctacatagtcgtgatccggccgcctttgtgcatgaggcggaggatggggcggtgcggattgttggtcggtacgtgccgaagacagagggccagcgtagctgggatatacgcgggtccaatgaccgcttgaacagggtcttcgagttgaaccgtctgccgtatggcagttatctcgggcaagacgatgtggatcgtcgcgggaagaagccgacggcagagattggagacgaccccgcgccggcggccgccccatcctctaagaagaggaagctaggtattgctacgggaggactgggggtttccaatggttttgctagggaattgatgaggacatgcgtggcccccgggaggaggatgtcttcgcccgagctccgggagtcttcggcgcggatgctgaaggttaccgggggttggtggcctaagaatgttcctatcccccacgcggccggcgaagacttttttacatctcgcatggttcgtgactggagagtgtttccttatgggcgaaatattgctgctgttgtgtcggcagtgatggacaaggatcgtcagggagctgcgcagaagcgccaggcggtcgtcaggctgcctgaggctaggccgaagaggtcgcgggggactgcgaaggctgctgcccccggcggcagccaaccgacgctggcggcgaagtctgccgcccctgggtccagcagggtgccggaggccgtgaaggcggccagcactggcggaaccaagcctgccccggccgtagctgcgaaggcccgagaattgcctccaccgggcaagcgcgttgccgacttcgccactgatattagcgtggaagattatctcgttgggtcgggcgaagggcaacttgttgttgttccgcctgcggtggcgaccgcggcggctgccgtggtgcctagggcgaggggtagcgctgtcagcgctggtggtgagattccggcactcactgccgtcaaggatgaggcgggcggtgtgtcccgccggttgaaggaggcattaagtcaggcagctgacttcactgaccgcgtggcgtcgggggcccttacggcggttgtgtctaccgaagtcaagagacttcgggcgcaacatgctgacgccgtccgggaaaagtcggccaccgacagcaagtgccgcaagctggcggagaaggtggccgcgctggagggcgagaggactgacctccggcgccaactggcggaggagagaagggaggctaatgaggccttcgccaaggcgcagtctgcgcaggtggaggccaatttggcttgggtggagggtagccttgccagacaacgcgccgaggaatgggaggagcggttcaacgctctgcagacccgtgtggagagggccgaggcttcgacgcgcacgaaggctgagcggacgcgcaaacagcttatggactcgtaccacgagatgggcgcgcggaccgctgactttgaagtgccagaacaagagcccggacttcgttgcctcgagtggctgcagaaggagttgctggcgctccccgccattgtggagggctttatgtcctatgcctccctggtcacctgcgaaggggcgatgaacgcgctgtcccgcgaagggtgccgacactatgaggtcttcgaccaatctgatgaggatttcgagcgcgagatttacaaggttgaggaccctgtggtgaaggaatctgcgggagccctcttcgaccggatgtggggtccccacggtcgggaggtggtcagggagcggttcgacacggcgaggggtcaggcggcgcgtaacgagaaagtggaggacttcggggctttgaacagcgcgcagcctgattcggagtcgaacccggtggcagctgtgtccgaggtcggcccggcgccgcccccagaaactgtcgaaggcgcccctgatgcccccgcagccactgcgaccggcggtggctcgtcgccgactgctgcgccgagggctgaggatcctatgaagatggcagcggagtctgcagcggaggatcccgcgacggctgggtcttcgcaggttcaagattttgggcctgcgcacgcaaccgctactgctaattttttggcggcttcgaccgtggatgatgggaatgaatcggatgaatctgtgtctaagttttctgattttggtgactctgggagttcggttgagtggactgaagagtcgtcggatgaggacttggattactttgcggccttggatgtggcagcggtggaggcttcgccgcgtgctgtggatgctgaagttgtgcctggtccaaggctggcaggcaggaactgttgtccttgtcggccgctgcgagtgtgggtgagggggagctacgaggtctttttgcgggtgaggagctga

SEQ ID NO: 29464 - DNA, 465 bp, Zea mays
  Peptide Sequence Number=SeqID_72839
atgcaggcggcatgcaactgcaccacggggacgcatcctttcgactttgacgcatccagcatggaggcccaggcccacacgtcatgtaaccggcgcgccggttactacgtgcgaaaaactgcaccaccacttgcgccagtaccgcgccttctcgactgtggaaccagtgccgcgactcgaggcaaccctgtgcatggcccaactgtgccaaccaagcacatcagtcacagggaccgggaaaggggatactcggaaagggatccttctccgcgaaggaagcgggccccgagccctcctactgatcagagaggctcgggggctgctctcgcaaacccggctccagccaaaccgttgacagcgtcaacataccagcccgagaactcggaacctgaccatgcacccgggctacgatcagatcgcatgagggaacaaccagaccggccgaggcatcacgaaaggcactaa

SEQ ID NO: 29465 - DNA, 1173 bp, Zea mays
  Peptide Sequence Number=SeqID_72840
atgcattgcgcccttccaccttccgagcccccgaatggggagcgcccgcattgctttcgtcttgctgctgttggaggagcgcaacttcgtggaggttggcacctttcatccattgcttggcttcaaggattttcatcaggcagcccggctgcatcccctcaccaatggtcacgcaggagggtgaccaccggttcgatggtggggagaagcaagtcgggctgcagcctctgccccgccctcaacttcaaggatcttcatcatccttgctggggcagggggcgagctaagccagagctctacctcttgtatgggccggcgggccacatcttccttcaacattcaggggagagggcgctcaccggcctagcggagggggcggacttcttcaacgcggggccgatcggccgcaagcgtcgtcagctccagcatgcctggttcgctggctcagctggctctggtgcagcttccggtgccacctcccaccgctgggcggagtgtggctatctgcccgccgtacgggcggctgttgcgtcgcgcgcaccgggggaccgcccaagacgttgcatgccgttagggcggcgttcgtgttcttgggttgtcccgccctcgctccggcacgacgcctccacgcggaggtcggtgcttgcccgtccgggaggacttgagtggggatctgcctgtgggcaagtggctgccgtcgtcggtgctgaggtggtggcagccggagaaggcttctccgccgacgagaccgtcagcgccacccgcggaccgacctccggctctttggctttgataacttgtccttgcccctcgagtggggacacaggcgagggccttgtcgcagcagcgtctgccctgagctcatcgctgctgctgtttagccgcccgaagcggaggtcattgtcgctgctgatggagcgggtggcggcgagccaactggagtttgtcgtcccgcaggccctccgatgtggaggttgttcataccggcgggagtggaaccggagttccatttgtaatggcaccttgagtgtcggtgtctgttcattgtggctgtcggggcctgaacatccaggtggagatcctccgaccgtgtcgctgtccgaggccgggtcagattccgccgaagttggagtcaacgccgagggtgctactgctccccctattgatatctga

SEQ ID NO: 29466 - DNA, 672 bp, Zea mays
  Peptide Sequence Number=SeqID_72841
atgtcaggcagagaggagccagagccctatgtacatgccgacgtggctgtcggagaggccgagccctgggttcgagtgaggcggagaccatcttccgaggtcgaggttgagtccgagccctggggtcgggcgaggcagagaccgccttccgaggtcgaggttgagtccgagccctggggtcgggcgaggcggagaccgtcttccaaggtcgaggttgagtccgagccctggggtcgggcgaggcggagacagtcttctgaggtcgaggcgggggccgagccccggggtcgggcgaggcggagcttcctatggcgtctgaggctggactcggctgctgtcagcctcaccctggtgggtggcacagcagtcggagcagggcaggcggcgctgttttcctgtcaagcgatccttgcattgaatgctcctgcgatacggtcggttggcgaggcgatctggccaaggttgcttcactgcgaagcctgcccgagctgggcctcgggcgagtcaaaggcttttgcagcttgtgctgatggtgattaccagccgagtttaggagtcttggggcccgggtgcatggtcaggttccgagttctcgggctgggcgccgaacatggtgtctctagtgagttgctaatgggtgatccgagtggacgcccgtgcctcgttcgataa

SEQ ID NO: 29467 - DNA, 2226 bp, Zea mays
  Peptide Sequence Number=SeqID_72842
atgccatcctcttcttcttccgccgacgccacgccgccggccgccgcctcgtctgaggagacgttgagtaacgtgatggtggaggagttgcgcgccggcgactctgttgaatttggtgtgtcacggatgacgtcagcccgtattgaagatatgcagcggttgggctactttggcggcggagtcgctcatgctccggggacggaggaagtccccgagccggagggcgagttggttgttttcgaggcgttcttcgtcgccggactccgcttgcctgcgcaccgggtcttcgaattaaatcaactgccgtacgacggctaccctggtcaagacgaagcggaccgccgtgggaagaaaccggcggtggagactggaggcgaccctgcgctggtggccgccgcctcctcgaaaaagagaaaattaggtactgcgatgggaagacttggggtgtctgatagtttcgctagagagttaatgaggacgtgcgcggccccgggggagaggatgtcttcgcccgagctccgggagtcttcggctcggatgctgagggttaccgggggttgttggcctaaagacattcctatcccctgcgcggctgaggaggactgtttaacatctcgtatggttcatcggtggagagtttttccttatgggcgaaatatcggtcatgttgtgtgggcagtgatggacaaggatcgccaaggggcggcgcgaaaacgccaggcgactgtgagggttcacgaagctcggccgaaaaggcagcggggaacggcgaaggcggaggcctccggtggaggcaagccgccgctgccggcgaaggtgggcgcctctgcgcctggcaaggcgccggaggtgacggtgggcgccggaggccccaagctgacgaaggtggtgccgtctgtcagcggagtggcggaggctgcgaaggcggcccgaacgttaccgccgcccggcaaacgcgttgccgacttcggcaccgagattaatgtggaggattatcttggggggtcggacgagggcccgctcgctctagttatgcctggcgcggcgatcgcgacggctgcgccagcgccgaaggcggggggagaggcccttggcgccggaggcgaggtgtctgccctcgcactggtcagggacgaggcgggcgtggcgacccgccggctgaagggagcgacggaggcgttgagtcgagcgacggaggcgctgagtcaggtggctgacttcaccagccgcaccgcgtcgggggcccttacggcagctttgtctgccgaggtcgagagacttcggacgcaacatgctgacgctgtccgtgagaagtcggcctccgacagcaagtgccgcaaactggcggagaaggtggccgccctggagaaggagaaggctgacctccggcgccagctggcaggggagaggagggaggccaacgaagccatcgccaaagagcaggctgctcaggcggaggccaggctggcgcgagcggaaggcaatatcgccaaggagctcgccggagagctgcagcggcggcttactgccctggagagccgcgcggagggggccgaggccgcgatgcgagcggaggccgaacggacgcgcacgcagctcatgactgcatatcgcgagctgggtgtgcggacgggtgacttcgaggtgccggagcgagaggtcggacttcgctgtctggaatgggtgcaggaggaactgcaggagctccccactgtcttggcggggttgatgtcgttcacctccctggtcacctgcgaggcagcgatgaacgcgctctctcgcgaaggctgccggcactttgaggccctcgaccaggcagatgaggattttgggcgagatatctttgaggtcgaagaccccgtggtgaaggaatccgccgggccctctatgaccggatgtggggttcatacggttgcggagcgcggcgagcgggtggacgacttcggggcgctgaacagcgcgctgcctgacccggagacgacccctgcggaggccgcgactggagtcgccccgggaccgaccccggagactgcggaagatgcaccgggcgcccctgcacctgctgcggccggcgaagaccttcccccaaaggtggccgaaggcgcgcccgatgcccccgcagctgctgtgccgagcgctgaagatccagcggaggtgggggcggaggcagcggcggaggcctcggcggaggctcccgcagcggcagggccctcgcaggtggcatag

SEQ ID NO: 29468 - DNA, 303 bp, Zea mays
  Peptide Sequence Number=SeqID_72843
atggggcacgcgggggcaggcgtcgggcgtgctctggcgagctcagtgcgcgtcgaacacgtggagagcttattactaagcaaagctttaaaaatgcaacaaaatgatgaggataggaagaacgaagttattgtcaaaggtttagaggataaaatcaaaaaacttgaggattctttgaaagaaaaagatgagttgttgtgctcagccgaaggatcccttgacgaagtgcaaactcataacaagaaattgggcaaagagttggtggatgctcatgcatttttggaagaaacctctagccgataa

SEQ ID NO: 29469 - DNA, 184 bp, Zea mays
  Peptide Sequence Number=SeqID_72844
gtatccgtggcgacttccagttggcgtggatgaaggtgggggcatcgggacacgatctatagggatgaggagtcaccaggttggtgtgaggtcttcgatccaatctcaagcattagcagacttcattgctgattggacgctaggggctcaggacgaagaaagcataaaagacaacgaagcttag

SEQ ID NO: 29470 - DNA, 999 bp, Zea mays
  Peptide Sequence Number=SeqID_72845
atggagaactctgccgccgccgccgccgaacggccgcgcctcacccgcgcagccgccaagcgctcagccgtcgtcacggctgtggccgtcgccgccaagcgcaagcgcgtcgcgctcagccagctgcccacgctccccaacgccgtgctcggcgcgcacgacgacgacgacgacaagcccgtcaggaagcagcgcctcctccccgccgccaagcccaagcccaagcccaaggcagcgcccgcgcctgccgcgcccgccgccgcggatgacacggatgacgacattcagctctgcaagccctacgcttccgacatctactcctacctccgctccatggagtcgcaggccaagcgccgcctcgctgttgactacatcgcggcggtgcagatcgacgtcacgcccaacatgcgtggcatcctcatcgactggctcgtcgaggtcgccgaggagtacaagctcgtctccgacacgctctacctcaccgtctcctacatcgaccgcttcctctctgccaaagttctcaacaggcagaagctgcagctcctcggcgtctccgccatgctcatcgcatccaagtatgaggagatcagcccgcccaacgtggaggatttctgctacatcaccgataacacctacaccaagcaggaggtagttaagatggagagtgatatactgaatgtcctcaagtttgaggtgggcagtcctaccgccaagacgttcctgaggatgttcatcagatctgcccaagaagacaacaagaagagcaagaaggtgcaaacgctaacaggctataagccatctgagttgaaggactgtgttgctgccatacataatttgcagctcaaccggacatgtcaatccatggtggcgatccgggagaaatacaggcaacaccgatgtactaactgtggaaaaatctttgaacagttcaagggtgtatcagctttgctacctcctgttgagatccctgcatcatacttcaatacactgaaggagtag

SEQ ID NO: 29471 - DNA, 288 bp, Zea mays
  Peptide Sequence Number=SeqID_72846
atgggctccgagccctttactgatcaggggctcgtaggttggccccttggcagggttcaacaaccgccccagaccatagagtcagggatgcctatggttatgtccgtacatggacaaggctcgggctacaaccccgagattattccagacaggagaagctttttggaaaaacaggccaagcgcggaccatccgggcccttgcggcggaccgtccgcgacacaaggatgaccctcggacagaaccaatgcaaaaatccgagtctgcactatgaatcgtccgaaggataa

SEQ ID NO: 29472 - DNA, 120 bp, Zea mays
  Peptide Sequence Number=SeqID_72847
atggggctcggtgtatgcggctcgctctgccgagggtggattgccccttgggaggagtgtggtaaaggtgtcgaggcggatctccaggagttccaggacttcgacgagttcaaggattag

SEQ ID NO: 29473 - DNA, 849 bp, Zea mays
  Peptide Sequence Number=SeqID_72848
atgtcgttttgtttcgtgcgctctcttctttgcttgtgtgtgtggtgttgctgcaattgttctcttgtgtgcatttctactcccctccttactccggatttgattgtgaataattgtgtaaggcgtgagagactccagtttgtggaaattcctcacagctgggatattgatataaggaagacactgtggtgctctcattacttcaagatcccactccaaacctccgtgaggtacgagggcgaattgttctatgtcaagaatctagccgacaacgccacatgcttcatcggtcaagagttggtgccgacagatgactggaatcacggggcggagccgggtctaaatggcaaggtggaacctattttggtggcgctcaaaacgctaaaggagaaaagtctcacaggcgtgagattggggatcgatcctctagcgcctagccttccacagttccaccgctccctgagggggttgttgttaaagcgaagaagggtaagggcgtcgcgcgccctattgaatcgggagagggagtcggtcttcttcattcctcggaggaagcgtcttccacaattttcggtggagcgggaactgcgatgttgggagtcacgtggtggcagcttgtcgggtcgcgtcgcaattttttgttccttcgtcgatcgcgctagggaagccaacgtgtatgtgccacacaagtccgtgagggacgcaaccttggtggtcagagcgacgcctctatctccccaggactttgggttgcagccacagggaagtatgccccctctggctcataagtgtgtcccatcgggcggtgcgtcgtcctccttcccggtggcagcggtgttatcgtcctag

SEQ ID NO: 29474 - DNA, 87 bp, Zea mays
  Peptide Sequence Number=SeqID_72849
atggcgggtggaattgagctcgctggagctaaggaaaagtggctggccggtgagggatgtgttcaagggaatttggcacaactttga

SEQ ID NO: 29475 - DNA, 396 bp, Zea mays
  Peptide Sequence Number=SeqID_72850
atggcgggtggaattgagctcgccggagctaaggaaaagtggctggccggtgaggaaaaggaacgaactcccagacgcatcaacgctgatgtggtgagcgccttcacctacgacaccaccaatgaggccctagtccacgagctcgaacaggagcgagcaaaaacggtcgacgacctcttcgacattgctaccaagtttgctgtcggggaagacacggtgggtgcgattttctgcaagggaaaaagcctgcgcaacgccggcgagcccaacggcgaaaggagggatcgatgggagcaccccgacagacgccagaggaactaccgcccaaagtcgctatcgtggatcggtcgcccaggccgccaccaaagaacaacaacgaccatttccaaaagttga

SEQ ID NO: 29476 - DNA, 541 bp, Zea mays
  Peptide Sequence Number=SeqID_72851
atggcgcctcctgttgacgtggtcggtccgtggtgccctaggttgagcgatgtggaggctcctccgaggtcgaggccgagtctgtcttccgtggccgaggtcgagtccgagcccctgggtcgggcgaggcggagaccgtcggctgaggccagggctgagtccgagccctggggtcgggcgaagcggagttcgtcgtcttctggggctgagcctgagcctgagtccgagccctggggtcgggcgaagcggagttcgtcgtcttctggggctgagcccgagtccgagccctggggtcgggcgaagcggagttcgtcgtcttccggggctaagcccgagtccgagccctggggtcgggcgaagcggagtttcctatggcgcctgaggtcgggcctggctgatgtcagcctcactctgtcgagtggcacagcagtcggtgcggcgcaggcggcgctgtcctcttgtgagaccggtcagtggagcggcgaagtgactgcgctttgtgctgatgggggttaccagctgagaattaggagccttgagg

SEQ ID NO: 29477 - DNA, 492 bp, Zea mays
  Peptide Sequence Number=SeqID_72852
atggggagaagcaagccgggctgcgatcttggtcccgccctcagcttcaaggatgttcatcatcctcgttggggcggaggccgggctgagccggagctctacctcccgcgtgggttcgtgggtcagcctctccttcagcattcgagggagagggcgctcactggccctgcgagagggacagacttcgacaacgcggggctagtcgacggcgggcgtcgtcagcttcagcgcgttgggctcgccggcttggctcccggtgccccctcccactgcgagagcggttgtcgcgccgcgcgcacgggaggaccgcccaagacgtcgcgcgctgctagggcggcgttcgtgttctggggctgtcctgcctttgcaccggtacagcgcctccgcgtggagagtggagatcctccggccgcgtcgccgtccgaggctaggtcggacctcgccgaagatgtagttgacgccgagggtgctgctgctcccttcaactgttaa

SEQ ID NO: 29478 - DNA, 291 bp, Zea mays
  Peptide Sequence Number=SeqID_72853
atgacctgcaaatggaaaaggagagggtacgtccaagggccagacaggaaattggagatttcagataacgggcatagggtaaacaccaaggtaagatcgagagatgagaaaggtggaggcaataagaaacaaaagcacaacaaaggacgggattacaaattcgcgagccaaagaagaggatacgaccaagagaaagaaggtaagcatagaaagataatgagtatgaaagatttcaaggagatgagcataccaataccaagagacaagaaaattggcccaaaagatagctga

SEQ ID NO: 29479 - DNA, 309 bp, Zea mays
  Peptide Sequence Number=SeqID_72854
atggcactaactactctaatcttccacaaattgttcgtactaaattatctcagacttattagttgtatgaagccaagtttggtgctgtgcgatcgtgcacagatcatcaacctagtggtacttcagataagggtattgaagcttggaattacatttatggtgatgacataccaggaccgggagttagctgattcccacatgcagcactgcgtcgacaaggagacaaaggaatttgaagatgaacttgagaatatgaacctggatgaaaaagttgtagctcctagacccgggacaagtaggattagatga

SEQ ID NO: 29480 - DNA, 405 bp, Zea mays
  Peptide Sequence Number=SeqID_72855
atgaacaacaaggacatcctcacgcacaagtttgatgaacaagggagttgccgacctttctctaggttcctgcctgatgactcatttctccagttctttgatttcaccacaaattcgaaggttcaagaattagaatttgaacgcaacctgtgcagactagcagtctggtcttactctattagcttggcttgcaggtcaacaaaattcttgagccagttcactccaacccaatgggacaaggatcagtggtatcctttcatggggccactgcggtccatccaagtgttgttcatttgtgttgtcttcgtgatcgtggagatcaacacattcttccttaagcttacgtccttattgccgagttcctcaaaaggactaagtcgttactgtggttcagtctctacttga

SEQ ID NO: 29481 - DNA, 246 bp, Zea mays
  Peptide Sequence Number=SeqID_72856
atggagtgggcggcggcggtaggaatggccgagtgggagaggacagaggaggagagaatgagagatggaggccgactagccgagcgagggcttcgctggattgctggaagcctagagaacgcttgtggcgttgtgggctgtggcgatgtggcccgtgggacgggtgtaattttaacggatattcgggcactcgccctcggggaaccgtattctaagtctgtgggcaagatggcctcggccccatag

SEQ ID NO: 29482 - DNA, 558 bp, Zea mays
  Peptide Sequence Number=SeqID_72857
atgaagctgtggaaggagacttccaggagttccaagactacgacgagttctaggtgtgggttagcggcaacccccagtcggctgcctgtgaaggccgcgttatctacgtttcttttccgcactttgatttattgtaagaactatatggacgtctcagacaagggtctgccatggacaactagtgttctatctagcagcgaagtccctaattccatttatgaaaccatcattcttgagtcatcatcaagggtcaccacctccctagttgcatccatcttcaccgtcgtactagtctcctaccatgcgcacaccttaatacaattcgaatgggcaatcttctcatcggagatcccttgtcaccccaaccagaaggtatatgggaacatacgagttagagacctagccatgaaacaacaagaccctaaattcaaccaattggaacgaaagcacattgggcagatagatccactctccaaacaagatctaatggtgacggcgatcacaaagacgatgagatgtgttaagcgaaacacatgctccactctcgaccaaccctaa

SEQ ID NO: 29483 - DNA, 168 bp, Zea mays
  Peptide Sequence Number=SeqID_72858
atgtcgccctgtagcactctgtggcaggccatcgtcgtccgtgccctggcacccgccatgccgcgcctagtgagatctggtagctacgccatgatggttccatggtcggccacgcgccacccctccacggcgggtccctcagtcgagaccctgtccctgtctcactag

SEQ ID NO: 29484 - DNA, 246 bp, Zea mays
  Peptide Sequence Number=SeqID_72859
atgggcaagaacgactcccaagggattgccgcggaggtctggacctacatctgggccgtcgagcgctccgggctcgagggctcggatgagtcgaagtactcctcgggcgaggaggactcctcggactcgtccgaggagggcagcggcggtgatgatggcgacgacggaggcgacggtggtggcggcggcgacggcggcaggggcagcgacggcggcagcaagggcggcaacaaggccagtggttaa

SEQ ID NO: 29485 - DNA, 72 bp, Zea mays
  Peptide Sequence Number=SeqID_72860
atggagagagtcgagaccaaggtatggggctcaaacgcgtactggagcctatcctatggagacgctacctga

SEQ ID NO: 29486 - DNA, 453 bp, Zea mays
  Peptide Sequence Number=SeqID_72861
atggcgcctcctgttgacgtgactggtctgcgccctaggttgggcgatgtggaagctcctccgaagccgaggtcgaatctgtcttccgtggccgaggtcgagtccgagcccctgcccgagtctgagccctggggtcgggcgaagaggagttcgtcgtcttctggggctgtgcccgagtccgagccctggggtcgggcgaagcggagttcgtcgtcttctggggctcagcccgagtccgagccctggggtcgggcgaagcggagtttgtcgtcttctggggctgagcccgagtccgagccctgggtcgggcggagcgaagttcgccgtcttccggggcttagcccgagtccgagccctgggtcgggcggagcggagttcgccgtcttccgggacttagcccgagtccgagccctgggtcgggcggagcggagttcgccgtcttccgggacatag

SEQ ID NO: 29487 - DNA, 2160 bp, Zea mays
  Peptide Sequence Number=SeqID_72862
atgccgcgcacgaagaatgtgtcggcgccagggggaggcgatgatgaggatcctcgtcgccccttcaggcaggtcaagggcaagacagtttacttggagcagcaggaaggccgcaagaagcggcgtacggatagagcagcccgtgcagcagcagcagcagcagccgctgcgcaggccgagcttggagatcagccgcagactccgtcagatcagattgcataccgtgttcgtcgtctcgcctcccggcctcgctcctcctctcacaccactgcttccactccaccacccactctgcctgctcccgtcacccctattgcgccatccaccaccacagccatacccgctacctccactacgccagcttccactgctcctcctcccgctcccgctacagctcctcctgtccctccacctcgtttccgggagcgtgatgagactgaggtacaaccacttgctgcggatcctatactatttgaccttcagcgtgctacagcggcacgggtacgtaggttcagatacgtacccgtggagtcttggttaccagctcagagggactctgcagtagttgacctattcagcacacatattcaggagtcgtttttcagagctcagatgtctgctcagatagctctgcgagtgcaccggcttttggatcttccagcctttctgcttgcagccggtgctgactctgaggcgcacctcacatatctgcctggccttctgacccttttgactaccagcggcaggtatgttgaggagtgggtacgagtcttctacgcctctgtatggatagacccggatcatcactggatgcggtttcgttttgagcgagaggatgtcaccattactgccagtcagatccgccagctctttggattccccgagtcgacgactcgtcttcacagcctctgctacggcacttctgaccctcctcgtcgccctcacggcggtgtggctccgggtacagctcacgtcgcagctctgttccgctcgcccttcacagatgggtcgcgacgttcatcggcagattttactacagcagccaagtatttatatgagcttatcagacggactcttctgccgaggatgggatacagggaggctaccacacatattcaactttggctccttggtgccctggtctctcactctgagttcgacgtcgtggacttccttatttgtgagatcgaggacaccgttttggatgggattcgtgctcgtcggcagttgccctatgctcactacttgtgccacatctttgcgcagctgattcagcctcctcggtttcagggcacacttgaggcctcacgcctcgtttttggatcctaccgtcctgcgcctgagactcctgtgccagcttctgctcctgagactcctgtgccagcttctgctcctgtttttgcctctcaggccgaggatgcagctcttcatcagttcgacactcaggctacagcagttgatgatgatgatgatgatgatgatgattttggggttcctcctccgcctcctatgcctccacgctcacatgatcatgaggctgggagttctagtgctgcccctgctacccctcaggctatggaccctgctcttgcttcgattctccagtctatcactcagcagcaggctcacctggcagccgagcaggcccggttatccgagaggatgctctcgatgtttcagaacatgcaggacaggcaggatgcgcttcagcagcagctacttcaggatcgggctgagagcagggcattcatggctcttatgctacagcagtctggtgtctcagttcctccagttcagtctgctccacctcctccgcttcacgctccagttgtgccatcgattttgtcaggaccccctgttggtacttctccgctccggccggtcactttggcgttcacctctccggttctcagctctgtctgcccgcagccaccagtgccaccagcatctgctgttaccactactgctgtggcagtatctgtgaccacttctgttccggcagctcctgcagcgcggcctcagtccgagtcagtaccagctccagcttctaccgcagatcctggatccgagactgactctgaccctccgccggcgttcgctctgctacctcgaccgcgaccggatgcgcccccgccgcctcctcctgcttcagatgtttag

SEQ ID NO: 29488 - DNA, 363 bp, Zea mays
  Peptide Sequence Number=SeqID_72863
atggaaaagatgactttagctgttggcatcagagttatcgactacggtagattagagggattgagatcctctgcagtcaactgcaagctttcaagtgggcctaggtgggtgccggacccaactgcagtcacaattgccctatgcaatgactgcagagggtccattttcagagtagagatggcggccttccccttatttctaagtagaaatagattagatctcgttaggtctatgttggcgagcaggtgtgaagaacatcgctcacgtgcaaaccttattatctatttaattgcatggggtcgtggggtgaagttgcgtcctcgatcagagaacgagagaggtttagcttggtgccctgaatga

SEQ ID NO: 29489 - DNA, 1110 bp, Zea mays
  Peptide Sequence Number=SeqID_72864
atggacttagcaaatttggattttcggtcggggatcgtcttcgaggattctcttaagctttgtctggcctcttcggtttgtcctgctcgtccgagccttccgtcgtctttctggttggtggtttcttttggaagatgcattttcaagctgaactcagattctgttggctaccttctccaagctgccctgggaggttttgcggcaggctttgaggctgtgggttttcatatctacaattctaagtgtatcgatcatgcggaattcagagcctttttcaatctttggaaccgtggtggccctaactggattcatgaattcaagaaatttattggtgaggagaatgcttcttggttgactgttcggggcaagaagagcttatcttatgcagatattgttaatctccctctctctggtgctaatgcggtcccgatcctcagcaaaaacaagttctcttgcggtgttgggcatccagttcagactagaatttctgtgttcaatcgcctgggttcttctattcgtaattcaggatttcagggatcgtggttctcgtctcctcagcgaaggttagggcctactggtcttcggattccgtcgactgcgaagatcaagccaactcccatgattgctcctcgtcggggggcgtcttcctcggtgattcactctgatcttaatggaggtgtttgtggcagcgggcttcatgggcgttcaaactttcaaaattcaaaatttaattggactaggcctcgcaaccttcagtggcgtcccattcgaaaacgggggcctattgggcctccggttgggctgtcagatgcttgtcgtcttgggtcaccaggtgttgacccacctgcttttctctgccaattttgtaaagcgaaagggcacttgaaattattttgtcacttaaagaaatcatctttcagatttcctttaattttgttcccttcctttgagagccgagccaattcggtgggaaaactaaaattcctggaccacagctcttggtttcgttctcccgcggagcccctgatcggtggacctcctagctatggctgcttcgaagagttcgcctgggtagtcctattaaaaaaatctgaaacgacacctctctag

SEQ ID NO: 29490 - DNA, 603 bp, Zea mays
  Peptide Sequence Number=SeqID_72865
atgaactccaagaggctcaccgccgcctacttcaatagtagcgacaatgacccccgctccgggcggccaaacagcagcagcgatgacctcagggcggacgctgctgtgacaaggtcctcgcccacgtctccactcgaggggcgaggacaagctatcaaggccacaaagctggaggcctggagcgcagatggcactgacgaccccgtcagcgacgaggacttctcctgctgctgccaccacctcagcaccgacggcggcgtccacctgtccgccaacaccgcaccagtgggcgccgcccgcccccaaagtgcaccggcaggtcctcactcccgtccttgccacgagaacgagaatgggaccatcccagaacatgagtaccgccctcacggcgtacgacgtgttgtgagacccccccggtgtggctggccaccgtcgcccggacagaggacgaaatgctacaccctggctgggcagcagcagttcgctttccccggcatggctgaaggaagcctccgcggggctggaggatgcctttctcccccaaacgtcgggggaagaaaagggttaccgacccacgcggaggcaaccccccactcggtgtga

SEQ ID NO: 29491 - DNA, 332 bp, Zea mays
  Peptide Sequence Number=SeqID_72866
gtgctctcagcgaggcggagatcgtcgtccgaggcgaggtcgagtccgagccctggggtcgggcaaggcggagattcctatggcgcccgaggctggacttggttgctgtcagcctcaccctggcgggtggcacaacagtcggagcagcgcaggcggcgctatttttatgtcagacgatccttgcattgaatgctcctgcgatccggtcggctggcgaggcgatctggccaaggttgcttctccgtgaagcctgcccgagctgggcctcgggcgagtcgaaggctgggctcgggcgaggcgagatcgtgtcccttgagtggacggagccttaa

SEQ ID NO: 29492 - DNA, 237 bp, Zea mays
  Peptide Sequence Number=SeqID_72867
atgcaggcggcatgcaactgcaccaagggggcgcaccctttcgacttcgacgcatccagcatggaggcccaggcccacacgtcatgtaaccggcgcgccggttactgcgtgcaaaaaactgcagcgccacttgcgccagcgccgcgccttctcgactacggagccgggaccgggaaaggggatactccgaaagggatccttctccgtgaagaagcgggccccgagcccccctactga

SEQ ID NO: 29493 - DNA, 1194 bp, Zea mays
  Peptide Sequence Number=SeqID_72868
atggctgcagacccagacgcggaggtggtgtcgctgtcgccgcggacgctgctggagtcggaccggtacgtgtgcgagatctgcgggcaggggttccagcgcgaccagaacctgcagatgcatcggcggcggcacaaggtgccgtggaagctgttgaagcgggaggccggggaggcggcgcggaagcgggtcttcgtgtgcccggagcccagctgcctgcaccaccacccctcccacgcgctgggcgacctcgtcggcatcaagaagcacttccgccgcaagcacagcggccagcgccagtgggcctgcgcccgctgctccaaggcctacgccgtccactccgactacaaggcccacctcaagacctgcggcacccgcggccactcctgcgactgcggccgcgtcttctcacgtgtggagagcttcatagagcaccaggatagctgcaacgccgggcaggcacgggcgggcgccggtgtggctgctgctagtgccgggtcgcagcagcaggcgccgccggccatgtcactgtcgaggaccgcgtcgagcaccagcccgtccagcgacattgccatcagcccggtggccgcctggcccgccggtccggcaccggcgattccaagccctgcatcgaccgccgcgttccactggttcgaacaagtcccgtcgccgcggacaccaccgccatcggtccaccaccgcggcgggcacaacctcgagctgcagctcatgccgccgtcctgcagcggcgcgggcggtgacgcgccaccacgtactccggcggctccgtcacagagccacgccgccgccatggccatgcagctgcagctgtccatcggcgtctgcggggacgcgggcgacgaggtgctggccgcagcgagggaggaggaggcgcgggagcagctgcggcaagctgtggcggagaaggcggcggcggacgaagcccgcgcgcaggcgaagcggcaagcggagctggccgagcgggagctggcgagcgccaagcggatgcggcggcaggcgcaggtggagctgagccgcgcccacgcggtccgggaccacgccttgcgccaggtgaacgcgacgcttctccagatcacctgcctcggctgccgccacaagttccacgcgcgcccgcagctggacgccgttccggcgaggtggcctgcagctgctgctacatgtcctccatcgtga

SEQ ID NO: 29494 - DNA, 345 bp, Zea mays
  Peptide Sequence Number=SeqID_72869
atggcggtggtgtccgcggcgacgggacttgttcgaaccagtggaacgcggcggtcgatgcagggcttggaatcgccggtgctagcacggcgagaggatccaaagaggccggctggcctcggagtcagcttgtcaggcttggagttttgggccctggcggggctgccggctgcggcgctacgccgtgcagccatcgagtggcgcgccaagacgacgctggcctttgcccttcgccgcgctgcccgctgcagcgcgggcacaaagccgaaacccccagcaaaaacttgcagaaccgtggaagcaataggaaactcccagcaagggaaaggccaccaccgacattga

SEQ ID NO: 29495 - DNA, 702 bp, Zea mays
  Peptide Sequence Number=SeqID_72870
atggcctccccttgtggcgtggtcggtccgagcgaggtggtgactccttcgaggtcgaggctaagtctgagcccgggggtcgggcgaggcggagaccgtcttccggagtcgaggtcgagtccgagccctggggtcgggcgaggcagagaccgtcttccggagtcgaggtcgagtccgagtcctggggtcgggcgaggcggagaccgtcttccggagttgaggctgagtccgagcccaggggtcgggcgaggcggagatcgtcgtccgaggcgaggtcgagtccgagccctggggtcgggcgaggcggagattcctatggcgcccgaggctggacttggttgctgtcagcctcaccctggcgggtggcacagcagtcggagcagcgcaggcggtgctgttttcctgtcaggtcagtcagtggaggggcgaagtgactgcggccacttcggccttgtcgactggaaagcgtgcgtcaggataaggtgtcaggcgatccttgcattgaatgctcctgtgatccggtcgactggcgaggcgatctggccaaggttgcttctccgtgaagcctgcccgagctgggcctcgggcgagtcgaaggtgcgcccgttgcttgaggagaccctcgggcgaggcgtgaatctgccttggtcttccgttcctgcccgaggctgggctcgggcgaggcgagatcgtgtcccttga

SEQ ID NO: 29496 - DNA, 492 bp, Zea mays
  Peptide Sequence Number=SeqID_72871
atggcccaagggcacatttccctttcactcgcccgacccccgggctcggactcagcctcgactccggaagacggtctccgcctcgcccgaccccagggctcggactcgacctcgactttggaagacggtctccgcctcgcccgaccccagggctcggactcgacctcgactccggaagaaggtctccacctcgcccgaccccccaggctcggactcagtctcgacctcggaggagtcaccacctcgctcgggccgaccacgccacaaggggaggccatcattaccctacccctagctagcccaggctacggggaacaagaccggcgtcccatctggctcgccccggtaaaacaagtaatggtggcaccccgcgtgctccatgacaacggtggttctcagccccctatggaagcaaggatacgtcagcatggatccgacagcctcgacagctgtgcttctacaggggctcaagcgctcctccgacggccatga

SEQ ID NO: 29497 - DNA, 177 bp, Zea mays
  Peptide Sequence Number=SeqID_72872
atggacagaaacgatgtagaagagaaggatcgagattacagagcaaaagttcagattcttctgcagaagcaggaggggggcgacgaactggccgatctggaggagcagaccgcgcagctggagaaggagctcggcgtagtctttgctaacaggagatctgtgtattgggatcattaa

SEQ ID NO: 29498 - DNA, 354 bp, Zea mays
  Peptide Sequence Number=SeqID_72873
atggccgccattaattgcgccaatgaatggaacgtttgcacgcagaagaacgtgaacataaaggattgggtgttggtcaatgggatggaggttcaacaagaaaagcaaaaaattagtgagttggaggcgggaagggttcttgttccagaaattttggctcatgatgaaccgatagctttggagtcatttatttatgtttgtgctgatcaggaagtagtgccaggaaatagttcttttgtgaggtttgtgatgggatctgatgagctaaataaggccgatcaagctgctgatggccatgatcaggcatcaggagggtggcgcttgctggtggtttattcggtgctgacggactga

SEQ ID NO: 29499 - DNA, 657 bp, Zea mays
  Peptide Sequence Number=SeqID_72874
atgacacagtggtttatcacgtggttcggccaagtacaaaacttgcctactccacgttgtggcgtcccaacggacgagagttgcactcaactcctttcaagtgatccaatgatcagcttgaatatcacggtgttcttgttactttgctcttttcccgtttgcgaggaatctccacaacttggagtctctcgcccttacaataagaaccaatatgaagcacaagaaaatggcccaagggcacattttcctttcaatgatgaccttgcctcccactgcactcacctaaactcccgggtggaaagcctggagcaacaagtcagggaacttacaagggaaaaggcgtccctccaagagagtctcgagatagtggaaggcgaggaaaccaacacctgtgaagcctatcgaaccctgaagatggattacgacaagaagctaaagaagctcgcccctgcaaagaaaatccgcaagaagaccagaagccaaggatgccagactgagcagaaggaagaagcccctccagccctacctcctatcaggatagagaactcgttcgacaccgaggaaatgtccctagctagccttgatgacctcctcaaggaatttggggacactttagagaaggagtttgggagtaccctagatagcactcgcgtgtaa

SEQ ID NO: 29500 - DNA, 918 bp, Zea mays
  Peptide Sequence Number=SeqID_72875
atggctggaggaagtctccgcgaaactggaggatgccattctcccccagacgccaggggaagaaaagggcagccgacccatgcggaggcagccccccgactcgcctcatcctccatcttggcctggatgacgaaaatccttgaggccgagggaggggagaggccgcagcccggctcgctttcccccaccatcaagctggagaccaacgggcggaaggagcgggcagccatgcaggcggcatgcaaccgcgccaagcaactgcaccgccacttgcgccaccatcgcgcctcttcggttgcggaaccaatgccgcgactcgaggcgacccagcgcacgacccagcagcgccagcctggcgcgacggtcaatgcggccgaaagtgggccggcagtaatgacggtggcaggcgggcgggagcagcggtcacgtcgtcagccaggctcacgtcccatccaggggcagcaagagagcctcctctcatggcgtgaagacggcgcgcccgtgatccgttcctcgaacggctcgcgcacgcgcaacgaccgccccgccaaccactcgccccgtcgcattaactccgcggcgggacaggcggcgcttctggcaggagaagcgggcgacgcttcgccttcgccggaccgggaaagggggataccccgaaaaggatccttccctatgaaggaaccgggctccgagccccccctactgatcagaggttcgaaggctggccctccgaggggttcaacagtcgcctcagatcacgtgggccctacacccactactggtcagaggctggcccccgaagggttcacagtcgcctcagacgccgagcgagggatgaccagggggctcggactcgggctaagccccggaagacggcgaactccgctccgcccgacccagggctcggactcgggctaa

SEQ ID NO: 29501 - DNA, 1326 bp, Zea mays
  Peptide Sequence Number=SeqID_72876
atgtcggaggaggcgacgctggaggacacgcctacgtggatcgtggcgtccgtgtgctccgtcatcgtcctcatctccttcgtcttcgagcgcgcgctccaccacctcggcaaggcactggagcgccggaggaagaccctgtacgaggcgctgctaaagctcaaagaagagctcatgctgctgggcttcgtctcgctgctcctcgtcgtctcccaggacttgatacagaagatctgcatcgacgacagcctcatggagcactggatgccgtgccggggtgcgagcgccaccgcctcggctcattacggtgtctcctcctcctcctcctcctccgcggtcggtggcgggaggaggatgctcaaaggcggcggggcagctttcgggcactgttcaagcaagggaaaagtcccgttgctatcacttcacgccttggagcaggtacacattttcatcttcgtcctagctatcacgcaagtcgttctcagcgtcgccaccgtcctcctgggacttctgcagatgcggatatggatgcactgggagaacaccattcagcaagagggcagctctgctcccaagatgatcgcccgtgtgcagaaaatcaggttcatccaggaccggtgtaaggggttttgttcttcggaatctatgctttctgtaactttattctgcaactggcgcattagtgacttgcctcccaatattgtagatgggtggcactcctacttctggatctcattagttccactggctctgctgcttctgattgggacgaagctggagcacatcataaacaggctggcctacgaggtggcctcgaagcacgccgccgggcaaggcgaagggggcatcgtggtgagcccttcggacgagctgttctggttccgcagcccacggctggtgctcgtgctcatccacttcatcctgttccagaacgcgttcgagttcgcgtatttcttctggacactggcgatgttcggcgccaactcctgcatcatggacagtctaggatacagcgtctcgcgaatcatcatatgcgtcgtcgtccaggtgctctgcagctacagcacactcccgctctacgccatcgtgtcccatatggggagttcgttcaagagcgctgtgttcgcggacgacgtcgccgacaatctcagagggtgggccgacggcgcccggaggcgcgtgcggagatctgccacgggtgtcgacgccagttgcctgggtacgccggcggcggcgggacggggctgggaaggcgccgccggctggagattgattgccgggaggccgagccgcccaactcagcagcctcggagcatctccttctga

SEQ ID NO: 29502 - DNA, 348 bp, Zea mays
  Peptide Sequence Number=SeqID_72877
atggagttcattccaccaaattgtggaatttctccaaatcctaaggaacataaagaagagaaggatgaacaaggacatggggaggagggcaaggctgaccgaaaacaacatagtcaacgagggttgtcggagtacattcaaggtagctggtggtgtgcactcatgaggggcggtgtgcagcatggaccaatgaagttggcatcaataccgaagtgggaaggcttcctcaccgcaggatcaacgccgtacaagagccaagcagggcgcaagaggcaggcggcgagcgcggaggcagggggggctctacttcttttgtgcttcttccgcgtccgcgaggggaaccaatag

SEQ ID NO: 29503 - DNA, 324 bp, Zea mays
  Peptide Sequence Number=SeqID_72878
atggcgctcgctttgccatctgccccatccggcgagctcgtccctaaacgtgtgtcgccgtcccgcgcctggcttccgcggccagccacgcgcacaacatcccaacctcctgtagcgtggtcgtgccaagaggccagccagtcgagccctagcccctcgccgccgacgcttgccgtggtcgtgtttgccagctcgcaccgcgcaacacgtcattggagcccgatgtcacgtgtcggctcgttgccatgcctgtgccactgttgtgccacgtttgcatacgcgcaacacgtcatagggactttgacgacgtccttctacccctag

SEQ ID NO: 29504 - DNA, 317 bp, Zea mays
  Peptide Sequence Number=SeqID_72879
actgtaaccttgctgacggagagtacgtcctcgtgccggagcaaggagctgctcaggaggtagccccaggtccagcaccagagcctgcaccagaggacctgcctgccactgctttggaaggcaagccccggtgcggtcactgcacgacggcagtcggggtcagtgaggcattgtacgccaaggcgccttgcttgtggcataattttacaggttctctggaggacatggttgatggagtgacttggccgtccatcttgccaccgggttggactgtcgagtgggaccccgcctcggctgaggaggagcatgaggagtga

SEQ ID NO: 29505 - DNA, 369 bp, Zea mays
  Peptide Sequence Number=SeqID_72880
atggctagagcccaccttggcactaaaggctatgatcacatgtggaagaacttaaggagcaaaactttccccagccccatccaaccctcggagacgagtgtgcacaactcagtaaggctccccgagcgaggaatcgaagcctgcttcgccgaagaggccagtccacgatcgccggagctctcaaccccgccggagtgcgtggaccggatcgccgtggtttggccggtacactcgccgccgacgagaacacccgcctgcgcacgtggaccaggcgattccggccatccccgccgtcaagccgcacctcgctgtgaccgccagagcctccccgagccaaccctgcccttcgccggacctatctcgccgccg

SEQ ID NO: 29506 - DNA, 297 bp, Zea mays
  Peptide Sequence Number=SeqID_72881
atggcgcctctgcgccagatcctgttcaccaccgcggatcggcgtcgggaggaaggcagcgaaaacaataattccagagtaatgcgtttgcaattacaggattgcgtgaacagtaaaggagtactgttcactatttataggcacaggacgcagcctgtaagaaattacaatcatacccttgcaaaagattacaattatgactcagacccttatggactaaaaagtcattccatctttaagtcagttcgatccttcatcttcagatacgctataatatcgaagctttatgagcggtag

SEQ ID NO: 29507 - DNA, 2232 bp, Zea mays
  Peptide Sequence Number=SeqID_72882
atggcgatcgaagctgcgcgcctctcaccgtccatcgccgccgccgccttcctcgccagccgcccccctcttgccctccgcccgttctcccttcgtcgcaggtttcccctcctccgcgtcctcgccaactcatcgggaggggacggacgcgtcgtcgctctgtcctcgtctgagctccgaaagcgccgaggcctgtcttcctcctctggggctgcggactccgcatctgacggggatgagaagctacgctcgcttcgtcgactcttcgcgcggcccgacgttgctattgacgcctacatcgtcccttcacaggacgcccaccagagcgaattcattgcagaatgcttcacgaggcgtgcctatctgactgggttcactggcagtgctggtacagctgtggtcacaaaaaataaggctgctctctggactgatggccgttattttcttcaggcagagaaggaattgagccaccactggacactcatgcgcagtgggaatcatggtgttccaactactagtgagtggttgaatgatgttttaccatctggttgccgagttggtattgatccgggcgtcgggtctttgggtgccggtagggcattcgcctgttctggtcgatacttccgtcccaaggccttcgcttggttgaggatgcagtttcttttctcatttgatgctgctgaagaactgaaggattcaatcgccaataagaatcatgagttagttttggttcagggcatgaacctagttgatgagatatggggagatgcaaggccaaatcccccaaaagaaccaactagggtgcatgacatcaaatatgctggtattgatgtgccatcaaagttgtccttcattaggtcacaacttgctgaaaatgggtgtgatgctgtggtaatttcaatgctcgatgaagttgcttggttgttgaacatgagaggaagtgatgtcccacattcaccagtattttatagctacctcattgtggaggttagcactgctacactatttgtagacaacagcaaagtttctaaagatgttctggagcaccttgagcaagctggtgtgaaacttaagccatatgaagcaattatttctgaagtagaaagactggcagagaaaggtgcaaagctctggttggattcttcaagcgtgaatgcagccataattactgcatttaaatcaagttgtgacatgaaaaagaaaggaaaagcaggtgaagaagttggagaaaaagaagcatcttcaaacgaccggataactggagatcctagtgtccacaatggagtcataagtgctgtatacaatgtttcaccggttgcacttgccaagtcagttaaaaatgatgcagaaattgagggaatgaagaattcacacttaagagatgctgctgctttagcagaattctggtgctggctggaggaggaaatctgtaaaagtgtgccccttacagaggtgcaaattgctgaaaagcttcttgagtttcgtcaaaagcaagatggatttatcgagacaagcttcgacactataagtggttatggtgcaaatggtgctataatacactacagaccaaccccagagagctgcagctctgtaggaagtgacaatctgtttttgttagatagtggtgctcaatacattgatggaactactgacataaccagaacagtgcattttggtgaggcttccccaaggcaaaaggaatgcttcaccagagttttgcagggccatatagctctcgatcaagcagtgttccctgagagaactccaggctttgtgctagatgttctggcacggtcatctctgtggaagattggactggattatagacatggcacaggccatggagttggagctgcgctaaatgtccacgagggacctcagagcattagctatcgatatgggaatttgacagccttacagaagggcatgattgtcagcaacgagcctggttattatgaggacaactcatttggcattcgtatcgagaatttacttctggtaaaggagcttaatctggcaaattcgttcggtggaatttcataccttggttttgagaaactaacctttgttccaattcaggagctccacctctcaattaagaagaataggattgacccagttttaaggaaaatcgagcccaaaacctacacagggcgcacgacaaagaaaccggcggaaagccccacaaacaacctagacaacgacagcctcacactcacaaaccccatctag

SEQ ID NO: 29508 - DNA, 672 bp, Zea mays
  Peptide Sequence Number=SeqID_72883
atggccactgtcgggctgcgactgctcgatttcgcagtggccgagtccatcctacagtcttgcagggaagtgcttcaggggtcgagagcaatgcttcacacacatagctttggtgctgatcgaaatgcatctaagggaaagtttgatccatctaaggctgctgcccttggccttaggcctggtcccaagtattgtgaactccaatttgggaattctgtgcagtctgatcaatttgatgaaatgttgagttctcaggcaaaacgaacactgaaattaaactcatggctaggggagccattcctgtattggatgggttcgtggccacgggtctgcctcttcgactacgagtcggtaaggcaggttcttttcaacaagtccggccatttcttcaaggacgacgcccacccgactattctggcaatgctcggcaaagggctggtcctggtggaaggcaccgactgggtgcgccatcggagggtggtcaacccagccttcggcatggacaagctcaaggatgggctggacgacatggccaaaacctatcctggccgctttaagatctactatgtgttaaatcagatcctgagatgtggtcctcctccgatgaacaaggccatggctgcacaccttgacgagctcaactacacaaaggagatgcagttccagttctaa

SEQ ID NO: 29509 - DNA, 276 bp, Zea mays
  Peptide Sequence Number=SeqID_72884
atgagcaagaacacaagagacacaagatttatcccgaggttcggtcacaccactaaggtgccctacttcctcgttgaggcgcccacaaagagccgggtctctttcaaccctaatcctccctttgccgaccacaaaggtcaagcccacacaataatctttgctcaaacgagcagactggcagaaaaaagtgaacagtgcaaaaaccggttgaacctgtttccaccagacaaaaaccggttgagtgtccggctgaaccagtattttccaaaaaggtga

SEQ ID NO: 29510 - DNA, 246 bp, Zea mays
  Peptide Sequence Number=SeqID_72885
atggcagagccaccagatgcgccagccaccaagtcgtggttacatcttgcagccccacgtgccatgggtaccagcacctccgttgagacatcgtggctccacgtcagggcgtcactgcgtgccatgacagacaaccaggggcaaggtcccatcgtgccaatgtgcaagcctaaccagctagtggccacccgacctggcctcccctgctttgctgcttgcagtactgggctgcagatggggcattag

SEQ ID NO: 29511 - DNA, 210 bp, Zea mays
  Peptide Sequence Number=SeqID_72886
atggcggggatggccggaatcgcccggtccacgtgcgcaggcgggtgctctcgtcggcggcgggtgtgccggccaacccacggcgatctagttcgatccaatggcacgatgagggtgaacatgtgtgatctttgtccaaaggttattaagtgtactacaacttttatatttggcccaagccatgatcataaggttttcatgaccttttga

SEQ ID NO: 29512 - DNA, 192 bp, Zea mays
  Peptide Sequence Number=SeqID_72887
atgaggaacatgtacctcaagaagacaaggaggaggaagaaggtcaacaagagccacaacctcgagtctacaccaccatctagagagatcatccggatcaaagaagctttgaaggatccagtctgggtgatggtcacgcatgaagagctcaacaacttcaatagaaatgaagttcaaatatggatcatgtag

SEQ ID NO: 29513 - DNA, 432 bp, Zea mays
  Peptide Sequence Number=SeqID_72888
atggctcaccggattgcttggtccacacgcggcggtgggcgaccgaagtccggcgagggtgaatccgcctctccggtgaggcaatgcctcggctcaagcttggagaagcttcacggcttcacggggaagcggtctaggggctgggggcgaggctgggggtcaacagaaggggctggccataacggtcgtgctcggggcagtgatggcgggcggtggtgcttgctttccacggcgaactctggtgatcttttggctcaggcggggctttgggtccgcaagtgcaaacggctaaggcctctgggggcatttataggcgagggcgaggtgcagacgcgcggggcacacgctgccacggccagtccgcgctcggctggcctgacacggcgtcgagcacgtggctctttgcttctgcccgagtttaaacgctcatag

SEQ ID NO: 29514 - DNA, 324 bp, Zea mays
  Peptide Sequence Number=SeqID_72889
atgggtgcacgtgaacttgcaagagatgctcgagccacaacacctgatgaccccatgaattctgttgttggtgggctagcaagtggagctgtccttggtcgaatacaagctgccggtaccgcattagactacgctgcactgaagttggcccctgaatggcattcgctgaaagaacaactgtctgaaaagaaagactggtttacactacccgagtggtcacctatccaggtgttggatgaggaagctttggctaagaaaaaagctcgagaagagaagttgtttgcccaacgagcactaggtaaacttgacaaggaggatccctag

SEQ ID NO: 29515 - DNA, 1566 bp, Zea mays
  Peptide Sequence Number=SeqID_72890
atggacaaggatcgccaggcagctgcacagaagcgccaggcggttgtcaggcttcatgaagcccggccgaagaggcagcggggggctgcgaaggctgcggcccccggcggaggcaagccgccgctggcagcgaagtcgggcgcccctgcatctagcaaggcgccggaggcagcggcaggcgccggtggttccaaatcgacaaaggctgtgccgccgtccagcagggtgccggaggccgcgaaggcggcccgagtgttgccgtcgtcaggcaagcgcgtcgccgacttcgccactgatattagtgtggatgactatcttggtgggtcggacgaaggccaacttgctattgttgcgcctgccgcggcgaccacggcggctgtcgtagtgccgaaggcgaagggcggtgcccttagtgccggaggcgagatgtcggcactcgcggctgtcagggatgaggcgggcgctgtgtcccgccggctgaaggaggtgaaggaggcactaagtcaggtggctgacttcgccgatcgcacagcgtcaggggccctcatggcagttgtgtctgtcgaagtcgagagacttcggacgcaacatgctgacgccgtccgtgaaaaatcggccgccgacagtaagtgccgcaagctggcggacaaggtggccgcactggagggggagaagactgaccttcggcgccaactggcgggggagaggagggagaccaacgaggccctcgccaaggcacaggctgcgcaggcggaggccaatctggcacgggcggagggcaatcttgccagggagcgcgccgagcagctgcaggagcgactcagcgccctggagagccgtgtggagagggccgaggccgcggcgcgcgcggaggctgagcggacgcgcaaacagcttatggattcgtaccatgagctgggcgcgcggaccggtgacttcgaagtgccggaccgagagcctggacttcgctgcctggagtgggtacaggaggagttgcaggcactccccactatcgtggaggggtttatgtcgtatgcttccctggtcacctgcgagggggcgatgaacgcgctctctcgcgaagggtgctggcactttgaggtcttcgaccaagctgatgaagattttgagcgagatatcttcaaggttgaggaccccatagtgaaggaatctgccggagccatctacgaccggatgtggggtccgcacggttgcgaggtggtcagggagcgggccgagacggcgagggctcaggcggcgcgtggcgagagggtggatgacttcggggcattgaacagtgcgctgcctgacccggagccggtcccggcggaggccgtgtccgaggccgccctggagccgcccccggagactgcggaaggcgctccggatgcccccgcggctgctgcggccggcggagacccgcccccagagaccgccgaaggcgcgcctgatgcccccgcagccgctgcgccgaggaccgaagatcctgtgacggtggcggcggaggcgacagcggaggcaacggcggaggctcccgcgacggctgggtcttcgcatgtggcgtag

SEQ ID NO: 29516 - DNA, 456 bp, Zea mays
  Peptide Sequence Number=SeqID_72891
atggtgggtacaagtgcggtcactgcacgacggccagtcggggtcagtgaggcattgtacgccaaggcgatccgagggattgacgggttattcccatttaagtgtggtctggcctctaaggcgggacttgggcacttaagttggaataattcgggcagttccgccacatttcccttttcccccaaatcgggtttccgcaccatcgtgaacgcctcgccgtggccagctctctgcagcaagaacacatcgggttgttctcggtttttgccatcgtcgtggacagagggattccaggctaggatcgtgcaattggtagagggatttgggtcgccaggattgaaattgggtgtcgaacaaaggagaagcctagccattgcattttccgccgagtacaagttcgccagaggtgtgctcgtcgtcgttcaccgtcgtggacttggtgcggtcaagaaatag

SEQ ID NO: 29517 - DNA, 981 bp, Zea mays
  Peptide Sequence Number=SeqID_72892
atggagccggccgccgatggcaacgacgtgcacgggaagagacgggacggagggcagcatgcgccggtggtgtcgctccgggcgttgggcctggcggacgcggacgccttcatggcgtgggcgtcggaccgcgaaatgcggcacctgaagcagccgctctgcgccacccgagagcaggccatggcacatattagggacaccgtgctgggccacccatggttccgcgccgtctgcgtcagtgactcgcccgtggggcaggtgtccgtgtggccgtacgccgacgagggcggtcgcagggccaacctcggctacgccctcgcgcacgaccagtggggctggggcatcgccgtcgccgccgtcaggatggtggtgggcagggtgttcgacgacctgccggggctggaacggctggaggcggtgacggacgtggtgaacgtgcggtcgcagagagtactggagaaggtcggcttccacagggaggggtgctgcgccggtacatcgccggacgccgcggcagcggggccagagatgcgaaccacatttaatagtccattttttaaggagtgtgaggaggcgctacggattgatccgtcctacgtccgcgcgcaccaccgcctcgcgtcgctgcatataagaggaccatactttagagcgttactggcttccatgtggtaccagtcctccgatggcgcacccggcagaggcggtaatgtcccgggggacgcgcttgccaaggatgaaggtgtgttgcaggtacgtggtgggggaggatcggaggaggccgaccacgggtgcgagctggtggagcatagtgagaaaaggaagaggcgaaggaggccgagcgtgagggagaggttgtggacgcttgatgcctgccgcgacatgaatcgtggtggcaccgtgaagcttgaagagcacaacaaaacgtgtcgtcttttaagaattctgatatatgagtcttcgattgcacaagctaactaa

SEQ ID NO: 29518 - DNA, 291 bp, Zea mays
  Peptide Sequence Number=SeqID_72893
atggatcccctctccgtgctccgtgactacgctagccgcaacgagctagacaagatcatcttctccggcaacgagattcactttggctctgactacactttcccggcttccacccccaccgccttcgcctcaaagcagtcaggccgcccattcccgctctctgcggccgtcttcctcgcgcagcaccactacctcaagcacaccgacttcatccaggccgcgcgcctccgccacatcccgcccgtatcgctccccgaccgcaagaccttcctcgacttcccccttgtgtag

SEQ ID NO: 29519 - DNA, 1065 bp, Zea mays
  Peptide Sequence Number=SeqID_72894
atgggcggatttgggcctgggccacctaggccgtggcccagagcacaacccaaaaatccattgtatatagtccaaaagacatcctgcttgcaccgattgagcctggcgctggcggcctccctcagccgctcaagtcatgagaacataggctcttccaattatttcgcaaacctgcgcgattgcgttttctattttgccagcggcgcggccgcctccattcagccctgtatcgctctccacgccttcaggctctacgaatccggcaagggcagaaggcatcaagttgctgccagcaacctccgaggcggccgggtaggctatgactcaggcatccaccaccgccagtccgacctccacctccgccagtccacctccagcgtccctgtgactatcacggaacctcccaagaaacaacaaactccgctatttcgtcacctacaacaatatgggttcgaaaaaactgagtaccgagtgtactttccgcaagtcttacccgacaaaagaaaagactatcaaggatatgctggcttgagggagtcaagggtatacgtgtcggtgtttgggacccgaccgcgcacccgaggttacccctcgaggccttatatactcgagtactcgaccgtggggcgttacatgcggcggaagcgcgagccaagtcccccctcggaggacttcggtgactccgagtacttggaggaggagttctcctccgagtccaagggatcgccggtctacgcctctcccccggtatcgtccgatgactcggacgattcccaggggatcactgccgaggtgtggacgtacatccgggtcgtcgagcgctccgggctcgagggctcgaatgagtcggagatctcctcggacgaggaggactcctccgactcgtccgaggaggggagcggtggtgacagcgacgacgagggcgacgacggcgatggaggcgacgacggcggtggaggcgatggcgacggcaagagcgatggcgtcggcggcaagggcgacggtggcaacggcaagggtgacagcggcagcagcaaggctagtggcatagcgccacaggcttaa

SEQ ID NO: 29520 - DNA, 204 bp, Zea mays
  Peptide Sequence Number=SeqID_72895
atgggcatagatttacatttaagcacttgtgttggcactcaattaccaaaatacttagaaatggcccaaaggcacatttccctttcaatggggacgggttctctggaggaaatggttgctagagtgacttggctgtccatcttgccaccgggttggactgtcgagtgggaccctgcctcggccgaggaggagcatgaggagtga

SEQ ID NO: 29521 - DNA, 411 bp, Zea mays
  Peptide Sequence Number=SeqID_72896
atggcgcaccagacagtgtccggtgtgccaggccgtacaactccaaaccagccactctcggaaattccagggcaggcaccgctaaaattcaccggacttgagtctttccccagccccatccaaccctctgagacgagtgtgcacaccccagtgaagctccccgagcgaggaatcgaagcctacttcgccagagaggccagtccacggtcgccggagctctcaaccccgccggagtgcgtggaccggatcgccgtgtttggccggtacactcgccgccgacgagaacacccgcctgcgcacgtggaccgggcgattccggccatccccaccgtcaagccgcacctcgctgtgaccgccagagcctccccgagccaaccctgcccttcgccggacctatctcgccgccggtaa

SEQ ID NO: 29522 - DNA, 738 bp, Zea mays
  Peptide Sequence Number=SeqID_72897
atggtgtcgccgccggcctttgcggcggcggtcgcggtggtggccgtgctgctatgcgcctcggctgccgccaaccccgcaggcgggccccacatggcggacctgagcgtgctgttgcccccgcggatgacaaagcctgtcgagtaccgtctcatcggcggggatggatgcttctcctggtcatgggatcatcatgaccttatttcagttaaaccagagtataatgatagcagcagatgctcgactagtgctcgtttggcatcaattgccccatactctggccggagggagacttctgtctatgcgactgatatcatcagtggaatcacgatacactgcaaagtattcgtagacaagatctcccggatcagtattttccaccatgctgttaaaattgatctagatgaaattgctacattacgtatacatgccttcgatgatgaagaaaatgtgttctcgacattggtgggcttgcagtttttgtggcaccttaccccgaggttggttgataacagtagccatcatcttattcgtattccactgaaagaaacacatttgagtgactgtggtggcttctgcggtgatatgaatattcggtttgagctagaagacaagaatcttggttcagatttctctgtggtgaagggtattgagattggccaagaggttgttaaagctcagttgtttgagcctcagtttgaacatgtgattgacacaatcacattaaactgttgctga

SEQ ID NO: 29523 - DNA, 234 bp, Zea mays
  Peptide Sequence Number=SeqID_72898
atggagagcgccagcgtagcgctggccgccacggcgccacgcacaggcgcacaacccgacggacgctacggcctacggttgcctgtatcactgctgggtggcgagtcggcaagaccgcaagaggaaaaagcagcgagcggtgagcaggggctgtggcccccgctggcccccctccctctgcccctgaagaggagcgagcgtgagtgcatgagccatgaggctgaattgggctag

SEQ ID NO: 29524 - DNA, 192 bp, Zea mays
  Peptide Sequence Number=SeqID_72899
atgggcaggggcagcaagttggggaggaagaacagggtgaaggtcaggaagacgaacgagacgtccgacgacggcgaaaatgatgccactgcgcgagtcggtgtcggggctagtgtcggacaaatatggggaggaggcacatgctcctacgccctctgccgagaatggggtggcgcggaggtggaggcataa

SEQ ID NO: 29525 - DNA, 813 bp, Zea mays
  Peptide Sequence Number=SeqID_72900
atggaccgtggtgccgaggtaacactgctcaccgccacaacctatggctccgaggtgccgacctcgctgcccacatcctcgccagctttgcctccacgcatcatcctcgccggtgcacaaggatcggcacccgcggccactagcgccatccgccgcccaagccctctcctccgccgcctaccgttcaccaccgcctcccgcgcgccgctgccgccacgcccctccgccctgtgcttggcctgctccgcgtttgttagtgaaagtgcattcatcccttttgtgagttttggtgatttggataacaacacatttaaaggtctaacaaatgttgatcctagggcaatagatcttgccatgagaatcgccgaaaggatgttcctcaaaatgaaggaagatgaggcgaagaaccagattgaagaagaagaaaatgatcgatggagaccaaacgacgaatccatctcttcacaaggtttgtctttcaaatccacttctcatatgtgctttgtcgctaatgggagtgacagtgaaagcgaaagtgaggatgaggaggagcaagaaagtgatagtgaagatgaggatgatcttcaacaattcttcgctcagctaagcaagaaacatcggatgagcttgctcaaactcatgaaaagagcgaaagaacaaaaagaaatgcttcataagcaagaagacttcctcatcagaaaaatcgaagacttagagaagttgaccaaagagcatgagaagctaaagtgctctcatgatgatttggtccaaagagaggagaccgtcggactccaccgccactgccactggtag

SEQ ID NO: 29526 - DNA, 390 bp, Zea mays
  Peptide Sequence Number=SeqID_72901
atgcaggaacagcaagaaccgtcggaagagcaaagaaggattacttgcctaggaggtttgatctgcgtaggacaacctgttgcaaaccaaaagcatgagggggagagatcagaacaggaagaagtagattcaacaaactgcgcaagaaagaagagtggaaggaagaacggggacttcaccttggcggcggagaagggctgcgaatccggcggacaagggctggtgagctcggcggcggagacagcgctggtaaccaatcaggcccttattgtcttcgaagttgggatgttgctcaatgtagacctcttacttgatgggtccattgagaaatacacttttcacacccatttgaaagagtttggaatcatggcaagtagcataggcaaataa

SEQ ID NO: 29527 - DNA, 369 bp, Zea mays
  Peptide Sequence Number=SeqID_72902
atgaaccagctaaagaaccctagcgtcctgatgagtcaccattgggtggatatgcaagggccacgggaggccatcgatggggcctctagtggcgccaacgagggcgaagaaggcaaggctaaaggaggcgccaccggagccgcctgtggtccaacggagactgacagggagcacacggtccaaccgagggcggcaagggtacaggagccatcaagggcatcggtgccacaagctgaagcggaggggccaaagccacctcattctgagagcccagcagagctcttggagactagagatacccaatcctcccagctcaagaggtcaacaatcacagggtatgagatcaaaattgtgcacaacctgagatga

SEQ ID NO: 29528 - DNA, 1071 bp, Zea mays
  Peptide Sequence Number=SeqID_72903
atgggcgccggcgtcctcctcggcgacgccgccggcctgggggcccacctcgccgtacgccgccggaggacgcgcctctaccttcgcaactgggcctccaagcccctgcgcccctcggtctggctcggcgtggccgcctgtgtttcacagaatcgcgaccgccgtggccacgtgaccaggttctccgcctccgcctcgagcggcagtgacgagcccggggagctgtccgaggatgaggcgcagagggagtgggaagcggagctgaatcgccgactgaaggaggccgaggagatggaggagttggagcgcaccgccgagcagctgcaaagccaggccgccgccgaggcccccgaggagtcggaggaggagaagcgcgagcgtgtccgccgcgagctccagaaggtagcgaaggagcaagcggagaggagggagacggcgaagcaaatgtttgagttgggtcaaaaggcgtacgggaaaggaatgtatggacgatcaattgaattcttggaggctgcgctcactatcatacgtccctcctctctactcggtggcgagatccaaatttggcttgcaatggcatatgaagccaataggaggcacaaggattgcattgcattgtacaaagagttggagagtagccaccccatgatcaacatcaggcgccaggcagctgagcttagatacattttagaggcacccaagttgaagatatcaaatgacgaggtggtcacaataccacaaattgggagcagctgggattggtatgctggaacatggagtgacaaaatcaaggaacaagaggacaagaaaaggaagatgagtgctgctagcaaccaagttcaaccttctccaaacatctttggagacctctctttcttgcgaccgccaaatgaatggaagaagagtgcatgggtggagaggaggactaggagaaagattgggtctagagtcaggagtaatgggttgtggttcatcggtcacgaggagtcagcattgagagcagctgttgaaggggatgtgaaggagattctgctacatcatcgtaagtcggttgtaccccgtaatgtttaa

SEQ ID NO: 29529 - DNA, 1437 bp, Zea mays
  Peptide Sequence Number=SeqID_72904
atgtcggcagctgtgtctgccgaagtcgagagacttcggacgcaacatgctgacgctgtccgtgaaaaatcggcctccgacagcaggtgccgcaaactgacggacaaggtggccgcactggagagggagaaggctgacctccggtgccaactggcgggggagaggagggagaccaacgaggccgttgccaaggagcaggctgcgcaggcggaggccaaactggcgcgggcggaaggcaatcttgccagggagcgcgccgaacagctgcaggagtggctcaccgccctggagagccgcgtgaagggggccgaggccgcgatgcgcgcggaggccgaacggacgcgcacacagcttatggatacatatcgtgagctgggaggagctgcaggaactcccccactgtcgtggggggggggggggtttatgtcatacgcctccctggtcacctgcgagggggcgatgaacgcactctcccgcgaagggtgccggcacttcgaggtcttcgaccaggcagatgaagattttgagcgagatgtctataaggtcgaagaccccatagtgaaggaatccgccggggccctctatgaccggatgtggggtccgcacggtcgtgaggtggtcagggagcgggccgagactgcgagggctcaggcggcgcgtggcgagcgggtggacgacttcggggcgttgaacagcgcgctgcctgacccagggccgacccctgcggaggccgtgtctggggtcgccctggagccaaccccggagaccgcggaagacgcaccggatgcccccacatccgctgcggccagcgaagacctgcccccaaaggtggccgaaggcgcacctgatgcccccgcagctgctgcgccgagtgctgaagatcccacggcggtggcggtggaaacaacagcggaagcagcggcggagccaacggcggaggctcccgcagcgtcagggccttcgcaggttcaagattttgggcctgcgcatgcaaccgctactactgaatttttggcggcttcgaccgcggaaggtggtaatgaatatggtggatctgcatctgagtttttttattttactgactctgggagctcggttgagtggactgaggagtcgtcggaggaggacttggactattttgcggccttggacgtggctacggcggaggcctcgctacacgccgcggacgcgcaagatgtgccaggtcctagcaccgggcgccgacgacaaagggcggttgcaaagcgtagggttagtacggaggaaggggctcggcttcgtgtgagcagggctggtcggcaggaactgttgtctttgccggccgccgcgagtacaggggaaggggaactgcgaagtctttttgcgggtgaggagcttaggataatgttatttaattatagggagatgggaattattcctaaggttgagccggtgtag

SEQ ID NO: 29530 - DNA, 690 bp, Zea mays
  Peptide Sequence Number=SeqID_72905
atggcgattaggttcatcgacggcggcaagcagctcgtgttcgaccacgcgacacagttcttcaccgcgagcatccgcaccgctgcagaggcagtcgtgaacaactatatatgcgcaagattgagcctaaggtataggcatctgatggaggacgtgttgtctctactcccgcatgtgaagaaggacaaccaggacaaggtcgagtccaagcagagcaaggggaacacgctgaacaagctgcttgagctcaggagctgcttcagctgcctttcttcgaggagggaggtcaagaagcctaagaagcccaaggtgaagcaacgattctcgcggatgccgcacatgttctggcagccccgcagacaccttttaaccactggatggagtgcctttgtcaacaagaagaagcttgtctcaagggacgccgtactatttttgaggggtgataatggggagctaagacttggagtgcgccgtgcagctcagcttaaaaatggatctgcttttccagctctttataaccagtgctcaaatcttggttcactacctaatgttgcacatgctgtggccaccaaaagtgtgttccacatctactacaaccctaggtctggtggtaatgcttatgtgattggtgattctgcaaagcctgagcagaagtggcacgcctactatgccactactgagcacccctga

SEQ ID NO: 29531 - DNA, 1257 bp, Zea mays
  Peptide Sequence Number=SeqID_72906
atgacagcggcggcaaggccatttcccctccttccggcggatctgggcggccgcgccacccgggccgcgagaagacccatggggctggcacacgtgcaagggagcccccacggcgacggcctccgcttgtcctccaccccactgggttggatctggttcggcctcgacggcgtggcgccgtggagctgcgggctacgctggtggtggcgccacgctccggtgtcagcgaggcagtgcaagacggcagcagggccgacagcgcctgtaccccgagtgtcgcggcgtgaaggcttctcttttgtgaggggcggcgccggccagtggcccaagacggcgcagggtggtggtggctgtgacagggtgcccagcggcagctggcttcagtggccgcgtgtgccagtgccatcgatggctgccggttgcggctctggcacgcgccagtgtgatgcacgtggcaaggaggacgacggtgacggtgactcttggcctgacgttggtgttggggacttcttgggcgaaagcctcggcgaaagcctcggcgacggcaacggcgacgcccatgggcactgcttcccctgttggggcgtcgcgttccccagcatattcttccttgggcgaagcccagtccatctcagactcgcgacgttgtcgtccccgacgtcactcgctgaaggcgtcgcattgaagtttgtctcggccccagcttcgccttcggtggttgctttcgattctcggcgtctggacggagattcaagctcgttggtgaagaatcggagctgcctcgcgtgggacgagggtggcgcgctggagggggttgtagagcacctggagaagctagcacagccaagaagcctctaccacgtcgttggacacaacgtggtactcggcctcgacgctggagcgagagacggcgggctgtcgcttagcggcccaggagacgaggcacacgtattggacagtgtaggcaatgtgaggcctggagaaggtcagatactggagcacgccggtgaagctccggaagagaccctaagcccgtcactcggcggtggtgccaaggaagtggtggagaggcccgaggtgcttcatcgcgaacttccgctgaagggcgatgatcgtgcgctgaagaagatcggtactggacgtcgtgagcacgatatcgtcgacgtagagcaggaggtatacggtgtcttcgacgtgccggtagatgaacaaggacatgtcagactggcctcgatgaagcgaaggaaggccaagtag

SEQ ID NO: 29532 - DNA, 1281 bp, Zea mays
  Peptide Sequence Number=SeqID_72907
atggagacctctagaggtgccattgatgacttttctaccaaatatgctggccaaactcatgaggaagaatacacattccatagtctcacagatgctattcagttgcagattgtttcttctttaagagtcacccctgaatatgtcttattagttttccatcctgaagcacaggttagagttgcaaatgttgactggattaagataacagcagaagagcaaatcagtcttatggaaggaagcacaaaagatttccaaatattagctggcacccaagatggacaaatatttggtgattctcagttcaaatatatggacattgagttgcatcttgacgatgagattctggagcttattggtccaagcgaatcaatggatggacccgaattttcaattaaagctgcaaaaatcggcattacatctctatatctttctgttaaaggtggtccaaaaactggagtttccattgaatactcaagtctgaacatgggaattgtagaagttcaaaataccactgggaaactatctgcaaaatctgtggggaactctttatacactcaatgtactgagctgttgcactatttagactcttttggaagagttgaagtggatatcccagtggctatgacattgaatactcaaagtgaacgtctttgtattggctgtagcatgccagtttatccatctctgcctaagggagatctattttccttctatgaaacttgccaaagttacagttggatgatagcagatgagaaggttgtgacattccaatcagctaaatcctggcgatacagacttgaccaaggactatattcagatggaaaaaagagtccatggttttccaatggcagcagcaaattttttatcagtcatatgcttggaaggtctgctggcaaaaccaaaatttccatttcagttgtttgtgatttcttgctacctggcacctctggatctgttgtatcatacaatgcctccaagatcattcttgtggttccagatcctccccttgcacttgcgctaccgatgacttggttattcccacccttctataccactatgagccttttgcctagatcagcaaattcccttggggaaccaaactcacttgacctggagagctccgttgggtattctctgctaaggggcaatggtaggataattgatggaagtaaaattcagactggagaaagcaatacagttgattgtattcaagcaaaagatcactcagctgggagaacggaaatagcagcatgtctacgagttgctcaggttggacgctga

SEQ ID NO: 29533 - DNA, 399 bp, Zea mays
  Peptide Sequence Number=SeqID_72908
atgccaaacggtggaggtggtgatagtggcaagagcaaggggggaggacacgtcggtggggaaagtggatggcaagtgaatagagtagaggaggccggagctgccacagcgagcgagcacggcatgagtgggaaggtgtcgtatggtgagcccctagggatcgaactccatagaatagtggttgtcactagcaaagcgacgaaccaagagaagggggtgagtcaaatgggctgcaacaaggacgtcgttaagggaggcaatcacagcatgggggaagacaagcggcccaagcatgtggtggctcgcttgagggtggagctcgatgcagtcacgaagggcaggattcatggcccgatagaaggccacgaaaataccccagacaagctgaacgtggagtag

SEQ ID NO: 29534 - DNA, 423 bp, Zea mays
  Peptide Sequence Number=SeqID_72909
atgcacgacctcgtcgccttcgcgcgtggcgtaggcgaccccacctgcgccacacgcggccccgtctccttcgcctacgccacgcgtgcctccgtcgacgagcgctgcaccgtcgtcttcaccttcgctcggtgtggccccgtcgcttgctcctcgtctaccgctgtcgcgagcggcccgctccatcagtacccgttgacctgccgacttgcctctacatcgagcaccgccatccactgtgaccctggtcatgtccacccgatggtgactcgtcgtgcgactgtcgttctctgccccgtcgatcaactggtactcactgccgacgctcctccggacgcctccccggtgccctcctctgtttgcaccgctctcgccgatcccgttggccgaccacacatgggacctgatgccacgttcgcctga

SEQ ID NO: 29535 - DNA, 630 bp, Zea mays
  Peptide Sequence Number=SeqID_72910
atgaggagggttgcagccgtcaaggtgggggcatcgcgcgagactgctgctggtaccacggtgggtggcagcgcccgacctagtggtggagagctaagaggggcagggccagcggcgaactgcacgacagccaccagggcgcggcgatggaggcacacgacttggcgcagaagagctgttgacagcctaggcgcacggctcgacggcaaggtcaggactggggccgagctcgtacgtctgggtgcgcacaccggagggagcaacacgacagggctgaagttgcccagaggccggcgatgcttgaggtgggggcgcgagcgcgtggctgggcggctcggagcggcccgaacagcagcgcagcaaaggggcgcggccagtgggcagcaggctatgcccagtgccgctgaggagggtggcgtgcttcgatccgacggtggtgtggccaaggggcggcaaaccggcggcgcggctcggcggagaggaagcgtggtcccgacggcggtgcctgtgcggtccggggaagggaggcggccagctgggcagaggcccaaggacccggcggttgtgggtgagggagggtgggaaagagagaaactggctctggtaccaaattggagaatgaagccctaa

SEQ ID NO: 29536 - DNA, 1767 bp, Zea mays
  Peptide Sequence Number=SeqID_72911
atggcgcctgctgatgaggatgcttggtggctccccacgtatggaactagaggtggaggcacgatggtggcagaggaaaatgagcttaaactggagagtagtaccatggaattctggaacttatcgcaggtgccagacagttctacaagttcctatgaagtgcaaacttctagattgttaagtcctattttccaggggcaagggcatttagatgcttccttaacttacctaacgggggcatctggaccaacaaaggtgctcaagcttgtgcaagaagttaatgtttgtagtaaggtgaaggcattctgggatgaaggattggagaactccaacgttatttacctgccctgggttcctggagttcaccaggaagttgaaatgatggcaattggagggtgtggtaagacgctggatgactacaagttattttcctctgatgaggatgttgcttctgtgtctgattcccgtatcgtgcgtgcaaaaaagcctggtcaagctgtcatccgagtagtttctgctttcgatttcttgaattttgatgaggtaattgttgaagtttccattccttcagtactgtctatcttgccaatctttcctgtggaggtgcctgttggaacacgacttcattctgctgcagtgttaaaaacatctgctggacacccattctcacaatgtacccattttaatgcttttataaggtggagtctactatccgaggatgaggcctttcacattcttaacaccgctgaggcctcaagcatcgacgacataaaacataattctggttattggggacaaaatggcaatccttgtgcctgggtctctctgagtgcatttgctgctggcagatcaacaatagttgcaacatttgctgttgattcagattcagatattgagacatttggtggacccatttctctggaggcaacttcaaaaatttctgcatattatcctcttgtagttctccaaggggggaatggaaatcattttggtgggtactggtttgacttatctggaattcatagtaggattaagaacatggataacaactctcccaaggagctgtacttagttcctggatcaacaatggatgtccttatcttcggaggacctgagcgttgggaccaagttattgattttgttgaaacagttgatgttattgatccatccaaaaatcatattattagttctaccgctgtgaagaaactatctagtggactatatcgagtatcttgcctaagcaaagtgagctataaattgctgttttcacgtgggaacatggttggtaaagatcatcctgtgcctgcaatttccaaatcagagttcactgttatttgtgacttcccatcagaaataacattgatagcaaatgaaaatgaaaaccgacttgatatattggaagctgctaggaaagctgaccgtggtccagatagattgcaagcatcacccattgtaatctccaacggaagaaatatacgtctagctgctgcgagtatacatgtaaatggaagatttttcgctaattcatcttctcttcgcttgaaatgggaagccactggatgtgaagggcttgcttactttgaagaaaccaaatctgttgaaatgcttgatgagtcagcttgggagagatctcttgtcctacagaattctacaggagtggtcagtatagtttatatcataagttgcattgtattgaactttggtttctttaattactcgtccaaaaatgaatgcaattcttacttcccgacaagtcaaacagtttga

SEQ ID NO: 29537 - DNA, 252 bp, Zea mays
  Peptide Sequence Number=SeqID_72912
atggctacgccttggccggaggtggtagggatgcgaagttgggggtcgcggcctgtagacgcggcggcggcggcggactggagacgacatgctggcgcacgacggctggctgggacgtgggaacgtgcttgttatggaacttttgaggcattcagatacaagatccctttattgctaagatcagacatatcgggcaaactactgttggcagcgctgcaatttttgggcttttcttgggggctgggagcttga

SEQ ID NO: 29538 - DNA, 1542 bp, Zea mays
  Peptide Sequence Number=SeqID_72913
atggcgcagtggtttgtctggtcagctgttgtgctgtgtcgagagtgtttggagctgaaaatgagtgaggcgaatactactcagcttgaccttgagaaaggattttctcaagtgtctaatgataatgattcgagtagccctgcgaccatgcacaagatgaaagttgagacagaagatggtggaagtgagattgaatcacccactccagaaaaacgtgaatctagaagcaaaggggtcgttgtgagttcactggcaaggaatttgcttgcagagaggtacagagacagattttcaaatcagctggtggaagatgagggtcagacagatgatgaagactataatggaagtgtttcgcctagtagtagccaatcacttttttcagaaagcattgaactgcttgataagaagttattatacagtcatttggcccagatgaagcatttattcccagaagcaatccagataaagaggatactagtacatgatgagaagagcctatgcatgtatgctgatatggaaatcacacttttaatggatgttgtggaatgcacaagtcctgatcagtctccatccatgacaatttgtgaggctttttactcaaagctattgagttttttggatgctcatcataagggtgcagacattcctgaggcaatcctaccggaactctttaattcaaagccaagggagaagttatatcttgaggcagtacacaatggatatgctgctgagtcacctctgcagggtgccactgaggagagattcttaaatgcttcccactttccacaatcttttcgaaaactcatgtcgcagaaaatcattgctgatggaattcaaaagactcaattgctgtctgatccagcagatttgagttctgtgattgcttatggtacaaaagggtcaaacggaaaccctaaaaaggaagatgaacatgctccagttccagggaagtatgaaatttctgctactccaagccgccatttgatctcttgttgtcaagagggtacgccaaaacaagggacctcagagtcaccattgttctctggaacacctgtaatgcagacaccaaaaaggcaattgccgacttcacttgacaaacccaaggccacatgtggacacattagtgaaccatgttcagccagttctgcccgcagatcactaaatacattgttaaagtttgaagtaggaagcccttattatgatggagtggaacatacggatacaactaaaaagggcatgatctcagaagactcatcgaattttaacaagtcatttgaggaagatagtcctgtcttatttattgataaagacaaaatcgacgaagtagactcagtggatagccaggaaaagatagcttcgctacataccacatttgacatagtctgcgacatttctcatcctaccaagaattcacttatcacgaaacaggaacttttccataatattcttgccaacaacttggagatagaagaaattggtaatgaagatcacttgatctgtgtacactccaaattatacttgacgtttcctgagctatgctga

SEQ ID NO: 29539 - DNA, 129 bp, Zea mays
  Peptide Sequence Number=SeqID_72914
atggcgctccggtctcaggttgtcgccacgggagtcggccagcggcgccggtactggaagggagagggggaaaactgggagggcccggagtaccgcacggcgaatggcaggcatgatattgccatttaa

SEQ ID NO: 29540 - DNA, 273 bp, Zea mays
  Peptide Sequence Number=SeqID_72915
atgctggctacccgcctgtggaggtcatcggtgggaagggggaccgtggacatctgcaaaccctccaagtcgacccccggcgtcatctccgaaagcggcagccgccactccgtcaaagggagcaccctccggcgatggatggcggcaaccacccccgcgacgggaccgggaaagggaatactccgaaagggatccttctccgcgaaggaagcgggccccgagccccctactgatcagaggttcgaaggctggcccctcggaagggttcgatag

SEQ ID NO: 29541 - DNA, 678 bp, Zea mays
  Peptide Sequence Number=SeqID_72916
atggtgaccaccagtttctgggtggggaagagcaagccgggctgcgatcttggtcccaccctcagcttcaaggatgttcatcatcctcgctggggtgggggccacgctgagccggcgctctacctcccgcgcgggtccgcggatcacccttttccgcggcgtttgggggtggaggcgctcgctggccctgcggacggcgcagacttagacaacgtggggctgatcgacggcgggcgtcgtcacctccagcgtgtcggagtcgtcggccgggcttccggcggcccctcctgccggagggcgaccgccgcgccaggccggtgccccactcgtctgggaggatttgagtggggatctgccggggggctggtgtcccctgccatcggcgccgaggcggaggcggctcgagaagtcctcgtcgccgacgggatcactgccaccacccgcgccccgggccaccgcgccggcgtacttgtcctcgcccctcgagcgtcggcgggggcgagggcaagatcgcagcagcgccggcccactgtcgccgtagtcagaacgggcggcggcgagccgctcgaatccctcggctcgatcggccttgtcgtctggggctcctctagcttagttaaagagacccctcggccgctcttcgatgagccgaggccaggggtagcgatatcagtatga

SEQ ID NO: 29542 - DNA, 1266 bp, Zea mays
  Peptide Sequence Number=SeqID_72917
atggcggcgccgtccccgaccactaccgccgccgccgccgccgccgccacgacccaccaccgcgtgctcctcccatccgcgcgcccccgcgccgcgccctcttctctccgcctcccgctccgcgcgcagccccacgcccacgcccacgcccagcgcgcgcgcctcgccgcccccgtcgcggccgcggccccggccccggcggcgtcgacggcctcccccgagtcccccgcgtcgggcgccgtcgcggggaagcccacggtgctcgtggccgagaagctcggcgccgcggggctcgcgctgctgcgggagttcgccaacgtcgactgctcctacggcctctcccccgaggacctccgcgccaagatctcgctctgcgacgcgctcatcgtcaggtccgggaccaaggtcggccgcgacgtcttcgaggcgtccgggggcaggctccgcgtcgtcggccgcgccggcgtcgggatcgacaacgtcgacctcgccgccgccaccgagcacggctgcctcgtcgtcaacgcgcccaccgccaacaccgtcgccgctgccgagcatggcatcgcgctgctcaccgccatggccaggaacatcgcgcaggccgacgcgtcactcaaggctggtaaatggcagcgcaacaagtatgttggtgtatctcttgtgggaaaaactctcgctattctcggatttggaaaggctgctcttgatgttttcactaaagaacccccagcagctgacaacaagttggtactgcacgggaatgttactgtcacacctcaccttggtgccagcacagtggaggcacaggtgctgtcagagcttgcaccttttgttgtgctcgcagaaaagcttgggcgcttggctgtgcaactagttgctggtggtggtggtatcaagtctgtgaaagtgacctatgcatctgcgcgggcccctgatgatcttgacacgagacttctccgtgcaatgatcaccaagggattgattgaaccaatctccagcgtttttgtcaatctggtaaatgccgacttcaccgcaaagcagaggggagttcgcatcacggaggagaggatcctgctggacggctcacctgaaacacctatcgactacattcaagttcagattgccaatgtcgagtccaaatttcccagtgcgatatctgagactggagaaatcactgtggagggcagagtgaaggatggtgttcctcatctaacaaaggttggagcattccaggtggattctcggtttgaaaggcagggttga

SEQ ID NO: 29543 - DNA, 1593 bp, Zea mays
  Peptide Sequence Number=SeqID_72918
atggccaagcggctcgccggcgccgacaaagaggtgctcgtcgaggtggtgaggttcacgcagaagagcggcctgaggggctgtgacggcggctggaaggatttcctggcccggaacgacaggaagtttggcgcgtcggtcagcgaccccaggaagcgctccagggatgtgctgctcgccttcctgcagaccttccccaaggatttccagaagtacttcggcaaattagtgaagcgtcataatgaaagaagtgctgttcagcagtatgtggctgatttccccgacgaagtttctccccagcagaaacttgttcaactgacggcagagcacccagagtacagaaaacactactgcttcccatcgtaccaggaggcgtcgaaagtattgcagatagatgtctctagtttaacgagctcaagtgctatgttgtcaattgactgtgagatggtcctttgcagtgatggcacagaggctgtggtcagagtatgtgttgtagacgacaagcttaaggctaagttggacatacttgtaaacccatcgaagactgttgctgactataggacacacatcactggtgtatctaagaaggatttagaaggagtcacatcatcattagttgatgttcagaaatcgctgaagagaatgttatccaaaggaaatattttgattggccatagcttacatagagatttatgcgccttaaagattgattactctcaagttattgatacagcatacatatttaagtatgcaaatttaccaactactgcatcaccttccttgaacagtctgtgcaaggctattttggggtattcagttcgagaagaaggagaaccacataattgcttgaaggatgcagaagctgcgatgaatctagttcttgcaaagcttaagaatgagtttaatgaccccattgaaattgctgcaagtagtgtaactgaatctgatgtggtgaagttgctcgctcatagaattccagtgtacctgccttgtcaagagctgtgcaaaattttctctgggaaccccaatattgatgacaagattgattcgagaatacgaggtgaattttattccacatgtatttcattcaatgacgtagatgaggtggacaaggcatttgaagaactggatggccaaaagaccaaggactcaggtgggagacttcaaaagcatgtactgctgaagcttgacaatggagatgtcgtgagcttctatgttcggaagatggtatacgattcctggcccaaacagatcgaagttccaaggaagagaccagagcctactgaggatccagagccaaagaaagagcatgccaagggggttcagcaaaagaagagaaataactttgtgagagatactgaggatccagagccaaagaagagaccagagcctattgaggatccagagccaaagaaagagcatgccgagggggttcagcgaaagaagagaagtaaaaaacacgcaaacaaggaagatactgaggatctagagccgaagaagagatcagatcctactgaggatccagagccaaagaagagaccagagcctactgaggggattccgcaaaagaagagaagtaaaaaacatgcaaag

SEQ ID NO: 29544 - DNA, 372 bp, Zea mays
  Peptide Sequence Number=SeqID_72919
atggtgaacagcagtgggattattgaatcaggggagcacgagaaggtcttgctgctcatggagagtggtgtcaggataccctggtgtatgcatttctgtagtgacaagagcaccacccctttagatttcaatctgaaactacgaaagctcattcataacaagagacttgaagatgtccatatgctcagatatgacaggattatccttttccaatttgggcttcatagtaatgcgctctacttctcggtgtcgctgatcaagttcctggagggcgcgtgggtgtctatcctcttggccctcatcctgctcgtcatcatgttcgtgtggcaccataccaccatccagaagtatgagtacgacgtgcacaacaag

SEQ ID NO: 29545 - DNA, 780 bp, Zea mays
  Peptide Sequence Number=SeqID_72920
atgtctgagattgtcaatcaaggaaaactggtgtctgatgagatcatcataaatctgttgtcaagacgcctggaagagggagaagaaaagggtgaattggggttcatccttgatggctttcctcgaaccatgagacaagcgaagatgacccagatcatgttcgagaccttcaataccccagctatgtacgtcgccatccaggccgtgctctctctgtatgccagtggtcgtaccacaggtatcgtgctcgactcgggagatggtgtgagccacaccgtccccatctacgagggatacgccctcccccacgccatccttcgtcttgacctggccggtcgcgacctcaccgactgctcatctgcgctagactcccagtatcccagatcaagtccactactccactcccattcccccaagtctagcagccaaagcatcgcccgccgcgatggcgtctccgccccactcagtcgaggtccggacccccagcgactcgccgcggcccaccgccgctctcctctccccctctgtggccgcaccccagccctccaccgcctcctgctcttcctcaccgtggtcgtcgccgccgctacggcctttgtcctgctccgcccgcccatcaccgtctacaaggcccccctcccgcacatccgccgcctcttcgccaacagcacatccgccgccgaggacctgatccccgtcttccccacgctcaccttccccaaccactactccatcatcaccggcctctacccctcctcccacggcatcatcaacaactag

SEQ ID NO: 29546 - DNA, 855 bp, Zea mays
  Peptide Sequence Number=SeqID_72921
atggtgtgcgatcttaacgcagtcgcgcagatgccgagatgcgggtcctgttcacttggcgaaaaagaaagatcacaacattttcatctcctcatcttagaccttaagagcagttctctgaacaaactgttgcagtgggctggccgttacgaggtggatgggtatgtgtacagtgcagcggaagaacccagaattatgattacagggaagtggaacaagtccctgagttgccaaccatgtgaccaagaaggcgatccgcttccaggcacggagctgaaggagatctggagagttgctcctgccccacagggcgacaagtatcagtacacacaatttgcacacaaaataaacagcttcgacacggcacctaagaagctgttggcatctgattcacggttgaggcctgatagatatgccctcgagaagggtgacatgtctaagtctggggcagagaagagcagttttgacaccacccccgagtttctgcaaactttcaggctcgaggaacaacagagagctgagaaacgaactcgagaggccaagggcgagcaatttactcctagatggttcaacctgacagatgtggtctcccctacaccgtggggtgacctggaaatttatgaatacaacggaaaatacacagagcaccgggctgccatagacggctccgatgtcaccgacgagacaaatgtcacttcagtcaagttcagccccatggcaatatggactggatggattggtggcctccttggtaagatttgtgacaagcaagggataccatatgagtatgggaaaggacgtttggaggagcgctttgagctgttggaggagatcagaaaggtagttgtaggttag

SEQ ID NO: 29547 - DNA, 462 bp, Zea mays
  Peptide Sequence Number=SeqID_72922
atgtcaagccagccaccatccacccgtacatcgcctgacactaaggtgccgaggaccggggagctggccctgaggagggcgatccccgctaacccgaacatgaaggccatacaggaatcgctggaggatatttcgtacttgttgaggataccgcagaggaagccgtacggttccatggagggcgatgtgaagaagtccatgaaaatagcaatggacaacaaggaggcaatcctggcaagcattcctgaagagcataaggaggagggtgccaagctatatacctcattactcgaagagaagactggtttgcagactctcttgaaatatattaaggagaataaccctgacaaactttctatagcacttgcttcatcacttgacactgttgctgaattggagctgttactagagatggcaatgggtacccgaaacccgaaacccgatgggtttttaccccattag

SEQ ID NO: 29548 - DNA, 135 bp, Zea mays
  Peptide Sequence Number=SeqID_72923
atgccttacaaaaatttcagggtagaagtgacgacagtcgtccaaggatccaaggacgatatgctagacatccgtgggcctgaaggtatcgagacacttggacaaaccatcaagaatttcatcctttggccctga

SEQ ID NO: 29549 - DNA, 72 bp, Zea mays
  Peptide Sequence Number=SeqID_72924
atgcccaaccccgggctcgacgccgcggggttcgatcaggagcgggttatgcttggttccatggatgtctaa

SEQ ID NO: 29550 - DNA, 769 bp, Zea mays
  Peptide Sequence Number=SeqID_72925
ggctacccctgattcagggtaccggcagtggcccccgggcccgcctcagtggaggatgcaagcctacaggtggggccaaaccttctgcgacggcctcgaggaggcgcggtattggcgcgagcggcggtgcgactttttctgcacccagaaaccgacgcgccgggtgcatgacatgtgggcctgggcccccatgccagagctgttggaggggcctagcccccgggctctacctgtggtgtcctgtttcatccttcaggcggccattgtcgcctacttccgtgggatgtccgtggagcgggctgagccatggctccatcccacgcgcccccagtatcttggggtgggaagcgagccatgctgcggctccatctctttggctttgatggctttggtggcaccttcgacgctgcctcccgccgctgatcggggcgtggctatccgtccaccgcacgggcgacggtcgcgccgtgcgcaggtccgccacatccatggcgtcccccgcgccgccggccacactgttcggacgccgtccggagggtcgtacaagacgtcatacgccgtggaggtggcggccgtgttcttggatggtcttgtcctcaactccgtaagaggacgggagcgagaacctattcatgcgcactgtgatggccgccgttgccagcaagccaccagggcgaaggtggccactgtcgctggcgagccgttggtgcagaggcggccgctcggagtagaggtggtcgccaccgctggtgaggctgcccggagctag

SEQ ID NO: 29551 - DNA, 240 bp, Zea mays
  Peptide Sequence Number=SeqID_72926
atggcatcggacactgtccggtgcacacaggacagtccgatttcaatcaaagttccgaaacttgctaaacccatcaagacacttatgggaacaaatttgcatctcgacctcgacacgggaggtaaatccgtagatcaaaaggaaaagcacatcagggacttgtcagtttctaggaagatctctggtgtcttgggcttcaaagaaacaaaactcagtagctctatccactgcttaagctga

SEQ ID NO: 29552 - DNA, 433 bp, Zea mays
  Peptide Sequence Number=SeqID_72927
ccgagtccttgtccctctcgctgcccaagttcgctcctcgtcctcgctctctctcgtgttcacgccgcgccacaaccaccgcgcccggaccacctcgacggagccccacccgctgtcaaacctctgcccacgcggtgcccagctcgtcgccggacagtccgcatccatctactgttcactggagctccgcccgtgcttgcacgccgttgcagtccgccctgtcgtcgtggtcctctccgccgtccgtggagcctcgccggagcagtcgtgcccgtcgccgtcgaatgccctcgccggagcttgtgttcaccgtccgcgtttccccgccggattccatccgcgaagcacgacgatcgcgctcattccctgtccgccgaaccacttcctgctcgtcgacgttcatcccttcgcacgagcgagaacccaaggttga

SEQ ID NO: 29553 - DNA, 87 bp, Zea mays
  Peptide Sequence Number=SeqID_72928
atggtgggaggcgacgaaggcatcgagcgaagggtagctgttcgtcttcggcccaacatttgcccttcgagggaccagttcgactaa

SEQ ID NO: 29554 - DNA, 309 bp, Zea mays
  Peptide Sequence Number=SeqID_72929
atggagtttggcacttcgaggatctcctcggttcgcgtgcaggagatgcagcagcttggatactttggtggcggtgtcgggcgggttttgggcgccgaggagatccctgagcctgagggccaattggttgtgtatgaggcgtttttcattgccggccttcgtctcccgatgcatcgtttcgtggcggaggttttgcggaggttcgacgtgcagccattatgtgctctcacttctatgtggcgttcccaccattcgaggtggcggaggacgatgaggacgaaggggcccttcggtatgctgcccgcatga

SEQ ID NO: 29555 - DNA, 1920 bp, Zea mays
  Peptide Sequence Number=SeqID_72930
atggagggtgggggagggagtggaatgggtgggttcccggaagccacgggtaaccttctcgatgccgcagctcaggagttccaccctacggtctgtgccccctatcctctacagccgcttccgcaacagctatactgcccccacccatatccagccatgccggtgcctccgccgccgcaaatagccatgttacagccagtgcctccgatggcgatggccatggcgccgcagccggggtacaccttgccaacgacgacgccggtggtcaatggcccgtcgagccgcgtcgtggtgctgggccttgtcccgccgcacgcgcaggaggccgacgtggcgcaggcgatggcgccattcggcgcgatccgctcggtcgacgcgtgcgcggtggcgtccgagggcgtggccaccgtccatttcttcgacatccgcgccgccgagctcgccttgacctgtgtccgcgagcagcacatgcgccagcagagccgcctcgggcagctctacgcggcggccgccgtagccccggcgtgggctcctgcaccgacgccccaggcctgggactggccccaccccaacgacgacggccgcggcctcgtcctcgggcacgccgtgtgggcccacttcgccaccggcgccgacgacggcgacaaccgcggctccctggtggtcctgagccccctgcccggcgtctcggtcgctgacctccgccaagtcttccaggccttcggggacttgaaggatgtgagggagtcggcgcagcggcccagccacaagttcgtggacttcttcgacacgcgcgacgccgcgcgcgcgctcgccgagctcaacggccaggagcttttcggccgccgcctcgtcgtcgagttcacgcgcccttccggccccgggccccgcaggcgcgggtacgcaccccaccagcaccggcccaccgcgccgactccgccgaggcttcaagcgacgtggcgaccgtcccaaccgacgtcgtctcagccgccggcatcctcgtcgtcgtccggttccgtaagggcgagggaaggagtggtgcttctgaggaggagctcctgtaagtctagcgcgggcagcgaccagtcgtccaagggaggcaatgccggaacgagccatgagcgcaagaccaagggcggcaagatcgtggtggcggcggcggcggcatcctcgtcgaccccgacagcgtccgggaagcaaacccagaaaggcgtcgggagcagcggcggcgggagctggaaaggacgaaagagcgggtgggaggcgcgcttcctgttcaaggagcccgaggccggcggcggcgccgacacgcaagcaacgccggcttcggagatggatacgaggaccaccgtcatgatcaggaacataccgaacaagtacagccagaagctgctgctcaacatgctggacaaccactgcatccaatccaacgagtggatcgtggcgagcggcgaggagcagcccttctccgcctacgatttcgtctacctccccatagatttcaatgggaaatgtgggcgggggggtgggaggcgaggagctggctgtggaagcgtgagcttcaggatcgagggcctggaagcgctgaaggagcacttcaagaactccaagttcccgtgcgacagcgacgagtacctgcccgtggcgttctcgccggcgcgcgacggcaaggagcttacggatccagtgcccatcgtgggccgctcgcccgcggcgtcgtccgcgtcgtcgcctcccaagagccgggcggctagcgtggaccggcttgggcaggagctgatgccggcgccgtcgtcatccgcggacggcgcgtcgtcgaccactacgtccacccacgcgccgtccgaacacgacgaggaggaggaggagggagacatcaggctcgcaggcgagctgcggcggcttggctacgacgactag

SEQ ID NO: 29556 - DNA, 171 bp, Zea mays
  Peptide Sequence Number=SeqID_72931
atgggcgggggcctcctggcagcggcatccaccctgaggtcagcgttgccgctgttcggccccccggagcagaagtcgtcgtcgtcgccgctgctggagcaggtgacgctggacaccgccgtgtgggccccctcggtcgggctcatcttcttccccatcctgcgcgactga

SEQ ID NO: 29557 - DNA, 3255 bp, Zea mays
  Peptide Sequence Number=SeqID_72932
atggacggcaactccccgcggcggcctccccgccggcctgagcgggaggggagctacggctacgacatcgagagcatggacggctccggggccgggggcccgccgccgtggagcgcgcaccacaacggctcctccgaggccctgctccgctacgacgacggcggcgccgaccgcgggagcacgcaacagccgctgctgcggaagcgcaccgtgaacacgacctcgcagatcgctatcgtcggtgccaacgtctgccccatcgagagcttggactacgaagtcgtggagaatgaccttttcaagcaggactggcgatcaagaaagaagaagcagatatttcagtacatcgtactcaagtggagcttggtgctccttattggcctattaactggatttgtcggcttcttcaacaatcttgcagttgagaacattgctggattcaaattgctgctcacgagcgatcttatgctcaaggggaggtatattagagcattttttgtgtatggaggttgcaatttagttttggcagcagctgcagcagcaatctgtgcttatattgcacctgctgctgctgggtctggtattcctgaagtcaaagcttatcttaatggggttgatgcctattctatattagctcctagcacactctttgttaagggtggatcacgcaagtatcatcttacttgtaactggctacgctactttaagaatgacagagacaggagagatttgatcacatgtggatctgcagctggtgtggcggctgccttccgtgcacctgttggcggtgttctgtttgctcttgaagaagcagcatcatggtggcgaagtgctcttttgtggagaacattctttacaactgctgttgttgcggtggtattgagggggctgattgagttctgtcgtagtggaaaatgtggtctctttgggcaaggtggattgatcatgtttgatctcagttcaactgttgcagtctacagtactccagatctaattgcaattatagtccttgggataattggtggaatctttggaggcctcttcaactatctgttggacaagatcctccgagtttatagtattatcaacgagagaggtgctccattcaagatccttctcactataacaatatcaataatcacatcaatgtgttcctatggtcttccttggcttgctgcatgcactccatgccctgttgatgctgtggagcagtgtcccactgttggccgctccggaaattataagaacttccaatgcccaccaggacattacaatggtcttgcatcactcttcttcaacacaaatgatgatgccatccgcaatctcttcagcaacggcacatcgactgagttccaaatgtcatctcttttcatcttcttcactgctatttactgccttggactagtgacttacggtattgctgtcccatctggtctctttatccctgttattcttgctggagccacgtatgggcgcatagtgggaactcttcttggatccatatctgatcttgatcctggcctttttgccctacttggcgcagcatcttttcttggtgggacaatgagaatgactgtgtcagtctgtgtgatccttctagagctcaccaacgatctccccatgctccctttagtcatgcttgttcttctcatatccaagaccatagcagatagctttaacaagggagtttatgatcagatagtggtgatgaaaggcttgccgtacatggaggctcatgctgaaccatacatgaggcacttggttgctggtgatgtggtgtctggcccactaatcaccttttctggggttgagaaggtggggaacattgttcatgcattaaggttaacgggccacaatggtttccctgtgcttgatgagccacccataacggaaaccccggaactggttgggcttgtgactaggtctcatttattagttttgctgaacagcaagaatttcatgaagggacgggttaaaactagtggtagcttcgttctgcgaagatttggtgcatttgactttgcgaaaccaggttcaggtaaaggtttgaaaattgaggacctggatttcactgatgaggagatggacatgtatgtggatctccacccgatcacaaatacatcaccttacacagtggttgagacgatgtcactggcaaaagcagcaatccttttccgggaacttggtttgaggcaccttttggttgtgccaaagacaccagacgagcaggcccagcagggacacacggacgcaaaggtggtcggggaggaagggaaactccctgtcctggaggtcggggaggagcaggggggtctgctccagccgtccccgcggcggtcggtgggccgggtggccgtggaggtggcgccacggttgccgccttgccggagtgctggagctcgtgggggcagggcgcaggccgcagaggcggtcgcggctctgcagggacgcagcgcggcagggcgcagaggcagccgcgggccgcggctccggtgtccggtcggcggtcgcgctcggctgcagaggcaggctgctcggctgcataggcagggacacagggtcagggcgcagaggcagcaggcagccgcgctccggtcggcgcctcggcgtttgcgctcgtgcacggcgcaggagaggccgcgactccggtcggcgcttcggcgctcgttgctcccgcagcggaggccgcgactccgagatgtattcggtggatacgacattatgttcaaagtatcatatcttgagttcaaatcaaatccaatactcaccgacgaatgggctccggtgcaacatgacccaccagccagcgaggttccagtaatgagcggcagtcccgatagggacccgcttgtcattgtccgtccgggccggacctccgatcgtgggtccggagagccagcgagtgagagccgtgccggagtggcttgcggccaggtagacgaagcacgggaaatctctcgccgcagctcggcctcgcgattccgctggagactgttcagctcctcgccggcggcgctgattcggtaccgcttcgcttcggcttgcgttcttgcactcctgcgcccgggacgacttcagcggtcggggtccaagcgcgggctggaacccaccggtggcggcgacgacgacgaccatgcgcccaagcgcccgcgcgtccccgccctcgctaggaacaggaagtttgcctatgagtctttttgtcgatttgattacctgtcggaggcacaaattgccagaaaaaggatgtccatgtga

SEQ ID NO: 29558 - DNA, 555 bp, Zea mays
  Peptide Sequence Number=SeqID_72933
atgatgccacccgcattatgctttggagccgagttcgtgatctgcccatatctcgctaggtggtgcaatttatttgctctacgactgattggacatttgatggacgctctctgtctagtcttcacgtcgcttctgtcggtcatattttgtacttccctggctatatttgactttcctctgatccttactgatatctcatttttgtcttgcggtattcattgcatgccctgcacggatgtgacagttttgaaaaatatactgataattcctgggcgtcccccccaatgggtgtgggcaagggacggcttgcgctccgggctcgagggctcggatgagtcggagtactcctcggacgaggaggactcgtccgaggaggacggtggcggcgatggcgaggacgacgacgacgacgacgaaggcggtggcggcggtgacggtgacggcggtggcaggggcggcagcagcggtggcaaggatgacgacggcggcagcagcaggggcggcagcagcggtggcggcggcagcagcaagggcagcaacaaggccagtggctaa

SEQ ID NO: 29559 - DNA, 93 bp, Zea mays
  Peptide Sequence Number=SeqID_72934
atggggagggtggaggccgggccgtcgcatttccctaagagacccgcgcctcagaactccgccagatccggtttaccaattttggtgcactaa

SEQ ID NO: 29560 - DNA, 2044 bp, Zea mays
  Peptide Sequence Number=SeqID_72935
gggatgcctgacgccgtatcctgacacacgcgcctcagtcggccaggccgaagtgaccgcagtcacttcgcccctctcttttactgtccgatatgacgagaaaaacagcgccgcccgccccgctctgactgccgtgccaaccacccaggcgaagctgacaacaagtcacaatcaaccaccgagttcggtctcgggcgcaacaggaagctccgcctcgcctgacctcaagctccggcctcgggaggaggctacaaggaacaagacccggcgtcccatctggcttaccccggcgacgggtaatgatgggcttaggcgcttctccgacggccacgctatcacgtgtacagggctcaagctctcccgcgacagccacgttggcatgtacacaaggcttaggcatttctctgccgacacgttagcgtatagctacacccccattgccgcaaggcccaatgacgaaatgacccatctcgctaactgggccagagggcagaggccacgacgctccccacgaccccaccggccgcctacggactcgggcagttggcggcgggagcggtgctccaaggcggaaggcggtcggtcgccggtcggtacgggcacgcggcgccgcggcggctccctgcttggccgctccccgctccctctctcagatcccagtccgccgtccgccactgccgctattgttggcagcttgccgaattcaattgtgctcgccagcggctgtctctacctctacgcgcagcctgagctcgcccgcgcctgcctcttcccttacgcgcgaccgccgaacgctgctgcacgtttgcgtgagcgtgttccccccaatgcccgatcacgctcggcagcggggcggacagtggcctcggaggaggacgaggcggcggtcccgtacgtggacgtgcctcgcgctggtaggaagtgggagcggaagccgtacgtgacgccgatgaaggtgctcatccggcgggccaaggaggagaggcaggcccgccgggagaacccgtgccgcgtgctcgagcacccacccgacaacggccttgttgtgccgcacctcgtcgacgtcgcccggcgcgtgcacgccgcgagggaggggctcctcggcggcctgaccaggctcgtggagggcgctgtcccggtgaagcgatgcaggttttgctcggaggtgcacgtcggccgcgtcggccacgagatcaggacgtgcgaggggcgtaacagtggcgcgaggaactccctgcacgtgtggcggccggggaccgtgcgggatgtcgtcggcttcccctactgctaccacctgttcgaccgcgtcgggaagcccagagtcgtgcacaaggagaagtacgacgtgccgaggctcccagcggtcctggagctctgcatccaggccggcgtcgatgtccagcgctacccgaccaagcggcgcaccaggccagtctactccattgaaggcaggatcgtggacttcgagcccgacgtcgacgacgacgaagcagccaggacgttacatgaaccgccagcgtgcagaccatcgctgcctccagcggtggcaatcgccgcgatcggaactagttcttcttcttctgctgctgttgttaacggagagggggaagaggcggagatcaccgtgcctgagctagcgtcgaggacactgcaatcgtggctggacatgaaatccggcgcagcgaagctgatgaagaagtacagcgtgcacacctgcggctactgcccggaggtgcaggtcggtcccaaggggcacaaggtgcggatgtgcagggccaccaagcaccagcagcgggacggacagcacgcatggcaggaagccacggtggacgacctggtcccgcccaactacgtgtggcacgtcgcggaccttgccggcgaggaatcgcctttggccaacgagctcaagcggtactacggtaaggcccccgcggtggtggagctgtgcgtgcaggctggcgcgcccgtgcccgtggcgtaccggagcatgatgcgactcgacgtcgtgccaccagcgcgcgacgaatacgacctcgtcgcctaa

SEQ ID NO: 29561 - DNA, 309 bp, Zea mays
  Peptide Sequence Number=SeqID_72936
atgtcggatgtcccttctcagttcattgattctatctccgtcggcgaccccaagcatcggtcctgtgttgcagcgctgcttgaagtcgactcactcgggcttcaaggtctccgatggggtcgttacttccactgctactgctttcatgtcggagagccaattgatgccgaggcaccccaattgcaaaagcaacaaaaatttgtcgcttcctcacctaaaaacaacaaagggataaaccctgagtatggaatactcagcaagtcttacccgactaaggaaaagactctcaagggtatgctggataaatag

SEQ ID NO: 29562 - DNA, 369 bp, Zea mays
  Peptide Sequence Number=SeqID_72937
atggcgcttcctgttgacgtggcgggcctgtgccctaggtcgggcgacgtggaggttcctccgaagccgaggtcgagtctgtcttccatggccgaggccgagcccgagcccctgggttgggcgaggcggaggttgttcggcagaggccagggcggagtccgagccctggggtcgggcgaagcggagttcgtcgtcttctggggcttagcccgagtccgagccctgggtcgggcggagcggatcggagtggcgcaggcggcgctgtccttctgtcagaccggtcagtggagcggggaagtgacggcggtcacttcggctctgctggggggcgcgcgtcaggataaaggtgtcaggccacctttgcgttaa

SEQ ID NO: 29563 - DNA, 945 bp, Zea mays
  Peptide Sequence Number=SeqID_72938
atgtccatggaggacgacgcctcgaagatcagcgactgggaggtgctctctgccacctcttcccgcgggggcggcgacgacgatgaggtattaactgtctccggcgggggcggtgacgtcgtcctccttgaccacttcgtcctcacccccgaccccgcagcctcctgtcccggcgacggcgagggctcgtggtcggacgaccggggcgcctggcaagggttagaattattggatggattcgatccgattccggaagcaagtttcgatcttgcagttggtgttaggagccaacaactgctgataagcgacgtggatgacgcccgcgaagaaggctcgattgttcaagccaccgtggcgcgcggtgcgacccgtagcgcagaaggaaatcaagatgatgtggtagaggtcgagattgagcaggagagcagttccgtgattagccgcggtgcattgtgcccggtgctgcaggtggcggcggatcatggcgtggaagaaactctggattctgaggcagttacacctacaggtggctcgctccaaagccaggtatcagagagttcccttgtgcaactggatgatggaggaattggtgctggtgaaaaaagatcatgccttgaggatgctgtgtcaagtgatgagattcatggtgaacaagaagagcaggagcaagggagcaacgctaatgctgccattggttgcgatgaaccagatggagaggccaaggatgatgctttgccactggctcacacgccagcggcacttctcggcctggtcgtgctggggaggaagatgtacaggatgaagcacaaggcaaggggcttgccccagattaagattgcgtttgatgataaggtgatgacaaccagtactctctgcaaaattttaatgaacattgatttgcgtgttcttatggatgaacttgctcacaaagttggtttaaggtga

SEQ ID NO: 29564 - DNA, 438 bp, Zea mays
  Peptide Sequence Number=SeqID_72939
atggcgaagaatcccaaaggtaacctaccgatcgattctcactgcgggcctcaacgaaccatcaccgatcgattttatccctcacctgatgtgagccaaccgctcataccatctcatcccctgttgctgctcccagatgccgctccggaggaggagatgcccgccgcggccgaggaacaggcagcgcctgccgcgacggtgaaggtgctcttcttcgcccgcgcgcgggacctaacgggcgtggcggattccgcggtggaggtgccgccggggagcaccgcgggggagtgcctcgcgcgggtcctagcccagttccccaagctggaggagatccggggctccgtcgtgctcgcgctcaacgaggagtacgcggccgactcggccgcggtcgccgacggcgacgagctcgctgtcataccgcccatcagtggcggctga

SEQ ID NO: 29565 - DNA, 1266 bp, Zea mays
  Peptide Sequence Number=SeqID_72940
aacaacccgagagtcgtcggcattggcaacgactatgaggtccccctgtttgacgatggacagcgcagtgcagccgctctggaccgcgtccaagtggcggttgcgccggagcttgccgtacacagcggcgcatgcggccacgtaggactgcttccagaggtcgaactggcagtcgccaagcttcttctcgtcgtcgatgagcgacgccaacgcgagcgcctcgtgctagtgggaacagaatggtgtgattcgttgattggattacagtctggatctctcttgcatcaaatggttgagcaaggcaaaccacgaagcatcccgacgaaggcgaagaaatcgccgttcgtggaggtagaggttgacgagattggccaggctagtggggtggtgtttgcaagggaatcaccgctggcgcctaagagcgaccaaggatgcagcgttagccatagtcatggcgacgacgaaacacatgaatcggatgggtgcgtgcaaagccaggggctagacgagcatgggtgggtggacttcggtcactcactgcagctggtgctgttctcgcgacagtggagcctcgctgaaagtcttgttgacctagcagatcagcagccgatgctggattatggcctgtcgattgcccttgatgccatatggtttttgcggacgaaacaggatcttgaggggctcaacagtctgatatcgaagattgtggcctcaggggcaaaggattttgcaagagcaatcctcaggacatcgctgctcgcgtcatgtgttgcagcgtgccaaagcaaggctatcactgtgggtaacagcaaggagatcgtcgcagagagattgcatgatcgtctgcgagattgtccaggtgctgagcatctaaaaatagaggcaggtgccaaggtgcagaagttcatggaatgggctttacagtgtattcatatgcatcattgttctgaagatacacatatgtacagatggaactacaatactctccaagaggtacagcttcatgtatcagcatttaggaccttcttggacatagctggtgacaacttaagtggcaagatttttactgaggcatttgatgcggtctgcttcccccttacactcttctcaagtttatttgaacctggatggtcttctgggagttcagcagtctccattaagggccttttatcattgctggtggaaggaggcgctgacaatgtaaatcagtgttttcttgaagcagcgcgctttggaagtactgaacttgtacgcattctgctgaag

SEQ ID NO: 29566 - DNA, 783 bp, Zea mays
  Peptide Sequence Number=SeqID_72941
atggagttgtgtttggatagaagtgcttggaaagaagctatccacgtcgcatatcagaatagcttggctgtggacaccgatctggctctggtgtatgcctcacattactgcaagttcaaaacaatggaatgcctagttgatgaagggaacgttgtccactggttcgtcagtcgaggcgtctctgacattgagatgtgccttgccctgacgactgctgcctccagcggccatttcgtagtggcgtcgtacatgcttgcacatatccctcagcaaatccttgaagctctcagcacacagatcctcaaagccgcgaggggccagggcagcaggccgcttgatggtgtcaccttccttctgagatccaacttcctaagagacgcagctgcaacatatgaggccgcagacatcattgcaaccgggggcaccaacggtgagctcccggacctggttgccttcctgaaagaacactggtcccaggacgcgtttgctgaaggggtgagcgccggtgaaatgcacttcgtgaatgtcatgagggtcctcaggagaggggcgtccccgatctgcctggaggacctcccgcctgagatggtgctcggcatcacgtacctgccactgtaccgtgagtgcctgagcgcgggtgggcagctgttgccccaaaggctgaggggggagctgctggaggcggtgcaccggctcggtgagcccgttggcccggagagccaggggaaggacctcgtgctggcactagagcgccacatgccgtcgttcttggttggatcctga

SEQ ID NO: 29567 - DNA, 225 bp, Zea mays
  Peptide Sequence Number=SeqID_72942
atgggtcgagctctcgctggcgcgtggggccgccctggcggaagccttcctctccgcggacttcgcgtaacagaagctgtgattcctccgcagggtgacctcgtcgctgcgcaaatgtcgccgcgccgggcggatctcatccctgcgcggacttctctgccgtgcaacaaccgcggccgtgcccagggtataaaggcgttggcgcgaccctccttccctaactga

SEQ ID NO: 29568 - DNA, 291 bp, Zea mays
  Peptide Sequence Number=SeqID_72943
atggggtgcaccagcgtcgccttgctcttgctgttgttggaggagcgcggcctcgtggagatcggcgcccttcagccaccgcttggcttcaaggattttcgtcgtgcagcccggctgcatttcctcaccaatggtcagtttggtggggagaagcaagccgggctgcggcctccgccccgccctcagcttcaaggatcttcgtcatccgagctgaggcggagggtgagccaagccagggtctgcctctacgtaggcagcggcccgctctttccctcagtgaactggggataa

SEQ ID NO: 29569 - DNA, 681 bp, Zea mays
  Peptide Sequence Number=SeqID_72944
atggccgacctgcgtacggtgcgaccgtcgcccgtgcggtggacggacagccacaccccgaccaggcagcaggtggcagtttgcctcctctgtaaggctggtggacgcccttctcccccgaatgctgaaggaagaagcggggatcgggaaaggggatatttcgaaaggatccttctcagcgaaggaaacgggcctcgagccctcctactgatcaggggttcgaaggttgcgccctacggggttcggcaaccgccccagagcactcgggctccgagccctttactgatcaggggatcgaaggctggcccctcggaagggttcgatagccgccccagagcatgcagagtgagggatgaccctaggtacgtccgttacatggccaaggctcgggctacgctcctgagcctcgggcgcaacagggagctccgcctcgcccgacctcaggcctcggcctcgggagaaggtctccgcctcgcccgaccccaggcctcggcctcagcctcgacctcaggagaaggtctccgcctcgcccgacctcgggccttggcctcagcttcggcctcgggaggagtcacaacctcgcccgacctcagcctcggcctcaggagaagtctccacctcgcccgacctcggcctcggaccgaccgcgccacagaggatacaacattaccctacccctag

SEQ ID NO: 29570 - DNA, 351 bp, Zea mays
  Peptide Sequence Number=SeqID_72945
atggctgaatcgagtgatggacgcgttaaacttttgaatacccagaatatgaaaggctttgacaaaggggctgaaggagaagaagctccttcaacgccctctgctgccgaagtagcagaaattttaaagaagaaagatcaaccttcggctgcaaaggagaaggctgaaggtcaaaagaaacgaagaatagtcaacgtgatgcaagccattgagcgaacaccgcctttagcctcagcgtccaaaatggtgactgctgcaagtgccgaagccgaagctgcaaaacttgcgaccacaatgtcaggaattgacaagctcatatatcagatatggtcgcggaagagacagttgtga

SEQ ID NO: 29571 - DNA, 168 bp, Zea mays
  Peptide Sequence Number=SeqID_72946
atggggaggctagaaccccaggcagaatgggaatcacggcttgtgggtaaagtgtgcaacctctacagagtgttaggaactggttgtccccactgctctcagtgctcaggaggtgaagctggcaacatcgatgacttcgaggagttccaggaatatgacgagttctag

SEQ ID NO: 29572 - DNA, 538 bp, Zea mays
  Peptide Sequence Number=SeqID_72947
cttcaccaaagactcgtggagcttcccaagccctcagatcgagcgcaaccccacaggaaacgccagatcaccctcgccggaattccttcgcccaccggagagtgtggaccgggtcggactcctcgccgctgacgagctcttccgccctcgtgcggccagagcaacaccgaccacctccgaccgccatcagcccatcgacgcgtttgccaggacctccctaacctccgtggacactttgttggagctagatcacctccaccacgaggagacctcctcgaaagaggtggactcctctgactccgaggagtggagaggcgacgagggtgatggcgacgaggacaacggcagcagcggcgacaacgacagcaagggtggtggtgacggcgacgatgaaggtggcgactacgaaggcgatggcgacggcgacggcaaaggcgacaacgatggtagcggcaaaggcgacggcgagggcgacgacgacggcggcaaggacgatggcggcgacggcaaggccggcgacataatgctgctggtttaa

SEQ ID NO: 29573 - DNA, 216 bp, Zea mays
  Peptide Sequence Number=SeqID_72948
atgggcaagaacaagaaaggtggaggttcatcgcaccgctccggcgataagcggaagcgtgagccaagtcctccctcggaggactttggtgacttcgagtactcggaggaggagttttcctccgagtccgaggggtcgccggtctacgcctatcctccagtgttgttcgatgactcggactgtaacacccctaatgttactatcactaaaacttga

SEQ ID NO: 29574 - DNA, 420 bp, Zea mays
  Peptide Sequence Number=SeqID_72949
atggaccaagtgtgttggtcgaagggcccggcgcagcagggtatcaagagcattgtggaagtgacacccgcgagcggcgtcacgattgatgggtctagtgatccatccatctcgctccggctcctccgagtgctccgtgccgtggctcgaactgccactggcgtcgtcgtcgtcgccgtctctggggcatctctggatgaggtgcaggggaaggaggcctctcagactccacctcctactgaggcaagggggaagagtcctgctgctcctgctcctggcgtcggcgctcctgctcctcatgcatgcgacgatgtagtctctccaggtggctggactgacctgacaccgtgcgacacaggggacgctccaccaggcgggaaggcaaaaaggggatcacagacttacgtgcagtgcacctga

SEQ ID NO: 29575 - DNA, 255 bp, Zea mays
  Peptide Sequence Number=SeqID_72950
atgtccatcatatttagaccatggagacccgtgcactctttgtttttgcttaggaatcagggagaagacgaaagggaaaaggattttgaacatgctggattcggactgcagaagaccaccaactttgtgacggtcaccacggacgagtgccctagtggccagggtgtcacgctccacaagatcgtgacagccataggaggtggtgtatcggttgctaaggcgcagcgtctttggaaggctgtagtcgggccgtga

SEQ ID NO: 29576 - DNA, 186 bp, Zea mays
  Peptide Sequence Number=SeqID_72951
atggcaatgggtacccgctacccgaaacccgtgggtatgggaaacccgttgggtacccgaaacccgcatgggtttgggtttgggcaaaattttatacccgtcatgggtattgggtttttagcgggcgtattttttattcgcgggtatgggtttgggcaatttaccgtcgcattagagcaaggctaa

SEQ ID NO: 29577 - DNA, 2187 bp, Zea mays
  Peptide Sequence Number=SeqID_72952
atgctagtgtcggagctggaggggcacgagggggacgtcaccgccgtggtggtggtggcgccgccagcgcaggcgaccgcggcggccaagcttgcgagctactgctggacggcggggctcgacggggtgctcatctactgggacttcttggccgcggaggtgatgcggaaggtccaggttgggctccccgtccactccatggtggttcctgacatatataggacctcaaaaggagttgaggtgtcgagcccctttgcattcatctctgtggaggatacgagtaagctggcaagtgaaccaaaagcgctgtgtgggcagatgagagtttatgacctgacaaaggggcgccaagtgggtggcctcctggccgagacacgtaaaccagaaaagatcgttgcaagtagttctggagaattcttgggcattacaaataaaagaaagctccatatatggcgcataccaacaaaagatttcaagcctgacaagataaggaagataaagctccggcacaccaaacacttgaccactctggcattccatccaactgagagaactgtggctggtggtgatgtaacagggcggatcctgatttggagatgttttggaaactcaaagttctctgaaagtagtgtacagtcgaaagaggatgacggaagggatggtgttaggggggatgatgatgcagacacttgcacaacatggcattggcactcaagcagttctttccctggaagacctgtacttctcaatgacaattttttctatgttaggtggtttggagggagttattgttgtgtggcaactagatactggaaagagaaggtgtcatgtacaaataaccaagtctatcttctaaaaatgcctaatatggaggtcatgagatctattgctggaatcaagctgccaattgcttcaccaaacttgggcggatctaatcgggctgtgtatggatttgattatactaatagacttgttgctataccaactgaagattactgcatacagttctacaatttgtttgagaacgctgaggtttcagaggtgcaaatgtacatttccatggtttcattgtcaatcgatggcgatttgatgtgcaccgtggatgtcaaacttcctgaagaaggtttaggtggtcttgttacattgaagttttggaatcatgggtcaagagctggacattattttttgtccaccgtcatttatgagcctcacagtgatgatggggtttcttctgttgcattccgcccaggaagaaatatggccgttagctcttcttttggtggtaactttaaggtttgggtccagagtttgtcttcacaatcaaatgatgaaagaaattgttctggttggagatgccaatcagttggctcatacaagaagaaacctatgacatcagcagccttctcagccgatggatctgttcttgcagttgcagctgagagtaccatcacattgtgggatcctgataataatgcgcttgttggtgtcattgcagaaacactatcgccagtgacaaatctttctttcgttgggacatcagtgtttttgatgtctctatgtcagagttcaagaccacagattgctctatggaatgtttcaaatctttccatgcagtggtcttacagcatttatgcagaagctgcatgctgttcgccagatgggagtgaatttgcagttcttgctcttcttagttgtcctgatggagaagcatcaacacaacaagatggagtaattcttctttttgatgcagaaagctcaaaccccattgcctcctggtcggtaaagaaggcatcgggtggcagcatttcttttgtaaaaggtgacgtccctttggatgcaaatgctgatagttcgagagacaaagagccaatgttgcttgtttatgtaaatggttctcatgaatacgccatctttgatccccgggagagtgaggaggtggtcattagcaagaacaagcacaagaagattcaagctgaggaacctgcaccaatcggctacgcttctatttacggagagcttacaaaactggagccaaagaaagaagtttcagatgttccattcgtcccttcggacaggccttgggaaaccatattcagcgggtcgtctcatgttctcccgcctctcacaaaactatgctctgcattcttgtcatcgctgctggagaaacggcctgttgcaaacgagtga

SEQ ID NO: 29578 - DNA, 507 bp, Zea mays
  Peptide Sequence Number=SeqID_72953
atggcatatgcctatatgagtaaatataaatttgtgcaattcagattacttgaaggcttgctgaatgcatttctcaaagattatccattatctttacctgagttgcgatatcttggggattgctctggattagcaagcaccagcaaattcaacattccaaagaacatgggagaggagagcataaatggtgcttccagcaaaagacagaagggttgcaagggcaaagtctcagaaaaagtgaatcctgatgataaactcaagcaacctacaatactggatgctttcaaaagagcaggagtaacagtcagtcatgcagcaaataaagcttcttcacaaccatcatcaagtgaaatgatgtcaaaggatattgaacaagatgctactgatcctggtgaacttgggcttatagatttaatggcagcaccagttaaactagatatacaaagatacaaattcagaactatctgtgcaacgtgcttgtctttgttgaactactcagagtgttga

SEQ ID NO: 29579 - DNA, 732 bp, Zea mays
  Peptide Sequence Number=SeqID_72954
atgtccgaattagagagttgttcagatgactggagttcacattcatcttctgctggcaacccagacataccatatgtggttgtctccaagtcatcaattatgactgttgtatgcaaggagattcttggctgctacaggaagttacttggcattcctgatctgttgaatcaaccaaacatgtcaattctgaagcaacttttgcagactttacagccaactgaaaattttgatgatgttctttccgagttccaaccatctcttgctccttgcaatgttgattacctgtattgtggagcatgtaaaatattggaggatattatggatctagacaaatctggggaaccaaatgggaaaaatatacacatgggatgctccaaagcaatcattccctttctacgaaagcgtcttggatactcagctcataagctgctcagtgccgatttccctagcgaagatgctggaaaaggatggcagagtaaaggtgatcttatacagaagatattgcaaatatacctctggaatagtgactctacttcagatctacttgctgagataggtcgtgaattgcctaagcacgaggagaacacagggagtttaaacaagacgatcaaacaagcactgaaggctagaggatcagttgatactattcttcaagagattcagaaatcagtggatgcatttgtctctctaataggaatgtgcaagtcccacgaaaagccttcaactttctag

SEQ ID NO: 29580 - DNA, 153 bp, Zea mays
  Peptide Sequence Number=SeqID_72955
atgtcgcgtgcgttcgacgactactatatcgaggattgtggcgtcatcttggcgccggaggtgacacagaggaggatcgacaacagtgaccagttcgtcatcctcgccaccgtcaggggttttaggattatggaaccattggagattacttga

SEQ ID NO: 29581 - DNA, 435 bp, Zea mays
  Peptide Sequence Number=SeqID_72956
atggtgagagaacgaagaacacaaacaaacacaatgagcaagaacacaagagacacaagatttatcccgaggttcggtcacaccaccaaggtgccctacttcctcgttgaggcgcccacaaagagtcgggtctctttcaaccctaatcctccctttgccgaccacaaaggtcaagcccacacaataatctttgctcaaacgagcggctcgaatcaagaagagcaagaaggatttagagatgaagcaccaaaatcacagctcttcaatctcactcaaagatttctctccaaatatttgaaatgggagagacaagaggtgtgtgagagagactgggaggtgtttctcaggttggaaatggagttttgtgcgtgctctactgtggggaagagtgtgggaggtgtatataaaggtgccccaaaagctggtggccgttag

SEQ ID NO: 29582 - DNA, 348 bp, Zea mays
  Peptide Sequence Number=SeqID_72957
atggaggcccgggcccacatgtcatgtaaccggcgcaccggttactacgtgcaaggaaaccgcaccgccacttgcgccaatgccgcgtcttctcgactgcagaaccagtgcagcgactcgaaggcagccccgcgcgtgacccaacagtgccaattaagtgcgacgatcatgggtcagtcagccgcggggataggcacgacagttaatatgaccaaaggcgggccgacagtaattgcagcaacagacgtgcggaagcagcggtccaaccaccaaccaggccctggtcccacctccaggctcgcatcctcccctgaagcggcaggagagcctccgagtcctgtcccatag

SEQ ID NO: 29583 - DNA, 249 bp, Zea mays
  Peptide Sequence Number=SeqID_72958
atggaggactttgagaagttccaggactacgacgaaatgactatgtcaagtaatgactctgtgtatgtcttggacatcttggacgctgacaatcaggcccacccgtcagctcacctatctgtgaacgccaaagtctggtctagggatggcagtggtaagggggaattggggctctggggtgctggccacgtgtgcgccggtgagctccaccgccgcgggcagatcggcaccgcggtctggtgccgctag

SEQ ID NO: 29584 - DNA, 66 bp, Zea mays
  Peptide Sequence Number=SeqID_72959
atggttgtaaaagccatccaggcaaactctggtgatagtgatgatgaaaaggtaggcatcttatag

SEQ ID NO: 29585 - DNA, 387 bp, Zea mays
  Peptide Sequence Number=SeqID_72960
atggaattcttgggaagctaccttgctaagctaaatctattagattatggttgccttcggttcttgccatcagtagttgctgctttagtgatgtttgttgctaggctgaccattgatccgcataccaatccttgggggagatgcctgcctctgtcagcccgtcgtctccaggttgtcttcggcaagaatggcgggctcgagcagatcagtattaggaagggctatgtggacatgtgcactgtcgatgccacaactttgaccaagattagtgacgtatctccctcttctgttctatcagattattcacttattccccttgatcttgaagaactttctgcattagaagttctcttctttgtagcttcgatcctcctattgcgagcataa

SEQ ID NO: 29586 - DNA, 338 bp, Zea mays
  Peptide Sequence Number=SeqID_72961
gggaagtcgggaagagggcttacactacagcagccgaatcaaacgaagatgacgagcggcgggaggatgatggaaaggaggatctccaggaaggtgcagcagcgaccatcgtcatcaggatctccaggaaagtgcaacagcggttgtccaccatcgggatccttgtggtcggggccctgccatggggatcagaccgcatgcaggcgcacagatcagagggccagcacgcgaggacgatgcgggatgcaggttctgggagcccagatccgtgggagaggcagcgggctggtgatgggaggatgaggcggctagcggggtcagtggcaatgagaggttag

SEQ ID NO: 29587 - DNA, 351 bp, Zea mays
  Peptide Sequence Number=SeqID_72962
atggattccgcccggagctggctccagaagctgcagccgcgggacaaggacagagagcggggcgccaagacgccggcgccggcgtcgcccaacggtggcgccggcaactccgcgaggatggccgccgcggcgggggaggaggcgctgtctagcgccaccaagcagaaggtggcggcggcgaagcagtacatcgagaaccactacaagtcgcagatgaagtcgcttcaggagcgcaaggagagcttgtctatgccatttttaggggagccgggttctgtaggcctattaacattttatctgtttgcaaatacttacaaaattgctaagggtctgtttggttccagggactaa

SEQ ID NO: 29588 - DNA, 399 bp, Zea mays
  Peptide Sequence Number=SeqID_72963
cgagttgaacagcgacgcccccaagatgagctgctcctaccgagtggcgcccacgtacggcggcacgagcaacatgccctcgccaccgccgccggggctcgcgaacgcgcacgacgcaccggggacggtgagccacggcagcgacgacgcgccgaccgtgggaaacactaccaccggcgggaaccgcaggccgcccgccaccgccggcatggacatcggcagccacttcacgtcgccgagagcgtcgtcgtccccgcctcgcgcccacctcgcggcctcatgcgccgcgcctccccttcgtgcgcggccaccagcactagtacaaataagctcaaagcctgcggcacgttcaacttttcactggcggtttccgttatcaaacgtcagtgaaagaaacag

SEQ ID NO: 29589 - DNA, 279 bp, Zea mays
  Peptide Sequence Number=SeqID_72964
atgggcaagaacaacaagcgcaagcgtgagccgactcctccatcagaggacttcggtgactcggagtactcagaggaggagttctcctctgagtccgaggggtctccggctcccatccctctgtgtggtggcggcgatgacagtgacgacggcggcaggggcggcagcagcggcggcaaggatggcgacggcggcagcagcaggggcggcatcggcgacggcggcagcagcaagggcagcaacaagggcggcagcggcagcaacagggccagtggctag

SEQ ID NO: 29590 - DNA, 423 bp, Zea mays
  Peptide Sequence Number=SeqID_72965
atgagctcccccgcctgcgcacgcggaccgacccactccgaccatccccgacggcgacccgcacatcgccgtgaccctcagaacctcccctacaccctcggccacctcaccggagcagtctcgccgccgcatgcttgtctctgggcatctgaggcatctgaggctgaggtggtggttgttgctgctgctactgctactgctgaatggcggctagagtctgaccgatggcttgaactgcctgagtctgcattaggaacatctgctcgatggtcatcgggggcggtggtggcagctactaacggggtgcctcatcctgcggggctgcctgctcctgctgagcacgccttcctcctctgcgcctattttctgacatctgcagaatgcaatcacacatcagaactgatcttgcaacttgcagcataa

SEQ ID NO: 29591 - DNA, 222 bp, Zea mays
  Peptide Sequence Number=SeqID_72966
atggccggggtgagcgcgagggagagggagggagtcgcgctgggccaaggaagaagaagggagggggcgggggaggaggacggagaggggttcaccgcgggcgaggatgacgcggcgggcagttccgagggtgagctcacccttgctgtactcacatccccccaggtcaagaacaagtaccccaggatgatgcgcatgaaggacgctgtgatgagttcgtga

SEQ ID NO: 29592 - DNA, 168 bp, Zea mays
  Peptide Sequence Number=SeqID_72967
atggcgggcggtggtgctagcttttcacggcgaactccggtgatctctggctcgggcgaggctcagggtggtgatgagaatgatggttttggtattggctatggtaaaggagaagatgaagccatggaggaagacttccaggagttccaggattatgacgagttttag

SEQ ID NO: 29593 - DNA, 426 bp, Zea mays
  Peptide Sequence Number=SeqID_72968
atggccgacgggcttcaagtgccatcaatggcttcgattacctccgaaggcatcaatgggaagagcaatgggagggagaaacggacacgcgggattcggggtcttcaagacgcaggtggcacggacgtcgggccttggggcgcgctcggactgctcggctgctcggcgcgcgggcatcgcggcgtcggggtcgggtccgggtgcgcgccttggcttctgggcggctgcgcgctcgcgtcttgggcgcgtggggaggctgatgtgggtgcaaggaattggaagaagactcaccggttagctcggtccacgcgcggcggcagaagaccgaagtctggcgagggtgaaaccgcctctccggtgaggcaatgcctcggctcaagcttggagaagcttcacggcttcactgggaagcgatctaggggctag

SEQ ID NO: 29594 - DNA, 150 bp, Zea mays
  Peptide Sequence Number=SeqID_72969
atggaaggaaagccatcgcgagaaaggaagtcagaactgaaacgagagtctcctccactggcgggggtgggtgaattcatctgcggaagggaatcaaaggcggggatgctcgtcagcggcgaggagtccggcctgctcacggcgagatag

SEQ ID NO: 29595 - DNA, 141 bp, Zea mays
  Peptide Sequence Number=SeqID_72970
atggccgtgatgggttcaacatcggaaaagatgtacctctggcaggtgaggaagcagcaaatttttgttgcttttgttccaaggtggtgcctaaggaagaaaaccaggattgaagcctcgggaggaagggtcctcctttaa

SEQ ID NO: 29596 - DNA, 879 bp, Zea mays
  Peptide Sequence Number=SeqID_72971
atgcctaataatggtggatctctagctaacatgtggggccgtgcatcagctaaacctaagccttcaagtaccactaattctatagctgtagaaagtgtttcagctactcttgatgcacaaatatgtgcaaaggaagaagcagatggagatagcaacgatgatgaacagggaataaagtacaagggggaatccaccaatgcaaataacagaaagcgaagagcagtatttgatttttcggatgatgaggaagttgataatattataagcattgcatctcctgaggtaccaaaacagcataccccagaccctgttattgaaactgctgaagacactaaagtaaatcaaaagaacttggaaaataaagatgatgtaccgaacactgaaaaaggttcctcaatggggtggattctgacttcacttctgaattacaaatcaagcatgaataaagaagaaaaataccttcaaggagaccgtcgagttggtgatggtcgaggagacgtcgaggccgagcttgggctatggtgcggcggcgcggcgttctggcggcgacgcgacggcgagctgggtggtggaggcaccgaggccgacgagattgggcagggcagcgacgcggcggagctggcgaaaagaggagaaagggcgacggggcggcgagccagcgcggcggcgcggcctactggcggtggcgcggcgacgcttttttgttgcggtggcacggtgagcgggaatgaggcagcagatgagagagagtcgtgcgtgggtgggttaggggatttaggtttttttattaagttcgacggtgtccatatggcccacgaacttaactcaaagggtgatgctggagactttgatggagattttaacgacgacgaattctaa

SEQ ID NO: 29597 - DNA, 780 bp, Zea mays
  Peptide Sequence Number=SeqID_72972
atggctgccgtcgtcgacgctgaggtggtggcggctgaagaagtcctcgtcgccgacgggatcgccgccaccatccgcgctccgggcctccggctctttggctttgatagcttgtccttgcccctcgagtggggacgtgggcgaggggctcgtcgcagcagcgtccgccctgaggtcatcgctgctactgtttggccacccggagcggaggtcgttgtcgctgctgccggagcaggcggctgtgagccacctggggtttcatcgccccgcaggccctccaatgtggggggttgttcgtacctgcgggggcggaaccggagttccgtttgtaatggcaccttgagtgccggtgtctattcattgcggctgtcggggcctgaacatgagtccctcggctcggtcggccttgccgcccgaggcttctcttgcttagttaaaggaaccctcggccgctctgcgatgagccagagccggaggcagcggtgccagcacggacagaggcagagttggctcgaaaagaagcttcgtcggccggagcctggccaggccgtccactggcgggaccgacaccggaatcgggttgccgaggccatgagccgggctgatgtcctcgggggacagctgactgaggctatggagcggccggttgagccgtctgctcgggccgggttcccggaggagaccctagcggcgatggcccaggcgcggtgccgacaggttccttcgaggtggagatcctccgaccgtgttgccgtccgaggccgggtcggattccgctga

SEQ ID NO: 29598 - DNA, 303 bp, Zea mays
  Peptide Sequence Number=SeqID_72973
atgcagacatccctcgtcgcagcgcaactgcggcctacactcagcgtgcccgacctgctctgccacgctaacttgttgtccttctccatggagggcaagctactaccgtggatcgagtgcctcgagtcgctgggcctgccgatgcgaccctatcctccctcccacgccatccctcccgctgcgcccttcttgtcttcccgagctcaggcaacctccagttgtagcggcggtgatggggtgaaggagctctgggatgtcctggactcttgcaagaagaagctcccgctccagcaccttcagtaa

SEQ ID NO: 29599 - DNA, 534 bp, Zea mays
  Peptide Sequence Number=SeqID_72974
atgggcgcgattaaggtcaaggctcagttcactcaagggacacgatctcgcctcgcccgagcccagcctcgggcaaaggcagccgacaccggaggattcacgtctcgcccgagggtcccctcaagcgacggacccaccttcgactcgcccgaggcccagctcggtcgacagggccgaagtgaccgcagtcacttcgccgctccactgaccgacctgacaggaaaacagcgccgcctgccccgctctgactgctatgccactcgacaaaggctcggactcaacctcgacgctggacaatggactccgtctcgcccgaccccagggctcggactcagcctcgacctcggacgacggactccgtctcgcccgaccccagggctcggacttagcctcgacctcggacgacggactccgcctcgcccgaccctagggctcggactcaacctcgaccgtggaggagtcatcgcctcgcccgacctcgggctcggaccgaccacgtcacaggggggccatcattaccctacccctagctag

SEQ ID NO: 29600 - DNA, 309 bp, Zea mays
  Peptide Sequence Number=SeqID_72975
atgaccctcggacagaaccaatgcaaaaatctaagtctgcactacggaccgtccggaggaaaagcaaggaccgtctgtgacctcgcgcggaccgtccggcctcaggcgcggaccgtccggcctcaggcgcggaccgtccggtacggggtctaccagtctcgattaggcgggaccccattccgctcttcctcgacgcgcagtgcctcaccctcgggggctgagggtgcctcgggccgagccgagggcgcctcgggcagggccaagaccttctcgggcttgggcgtgtcgtcggtcttgactgagggttga

SEQ ID NO: 29601 - DNA, 1518 bp, Zea mays
  Peptide Sequence Number=SeqID_72976
atggaggcccacacgtcatgtaaccggcgcgctggttactacgtgcgagaagctgcaccgccacttgcgccagtaccacgccttctcgactgcggaaccggtgccgcgactcgaggcaaccctgcacatggcccaacagtgccaaccaagcacaccggtcatgggtcagtcagccgcgggagaaggcgcgacggtcgatatggccaaaagtgggccggcagtaatggcggcggcagacgggcggaagcagcgatcaagtcgtctgcaagctcacgtcccctcttggagcagcaggagaaccctctcccacggcgcgacacctttggcaggcgaagcaggcgacgcttcaccttcgccatgatgactgcgtcaaaaaagggaccgggaaagggatactccgaaagggatccttctctgcgaaggaagcgggcccgagccctcctactgatcagaggttcaaaggctggcccctcggaagggttcgacagccgcctcagagcactcgggctacgcgcccactactggtcagaggttcgaaggctggcccctcggaagggttcgacagccgcctcaggccactcgggctccgcgcccactactgatcaggggttcgtaggctggcccccgaagggttcgacagccgcctcagagcatgcagagcgagggatgactctgggtacgttcgatacatggtcgaggctcaggctacactcccgaggtaccctaggacatttccgagaccagcaggagcgattctgtaacggaatcccatcagagggaggcatcgagccctcggaccctatcaaacgggaccaggggctactgtcggggaccataattaggggtacccccaagactcctaaatctcagctgcctcgggcaggaacagtagaccaaggcagattcacgcctcgctcgagggtctcctcaagcaacggacgcaccttcgactcgcccgaggcccagctcggggtgaggctgacaaccgccaagatcagccttaggcgccatagaaagctccgcctcgcccgaccccagggctcagactcgaccttgacctcggacgacggtctctgcctcgcccaaccccagggctcggactcgacctcgacctcggacaacggtctccgcctcgcccgacccccggggctcggactctacctcaacctcggacgatggtctccgcctcgcccgacccctgggctcggactctacctcggcctcggacgacggtctccgcctcgcccgaccccagggctcggactcgacctcgacctcggaagacggtctccgcctcgcccgacccccagggctcgaactctacctcgacctcggacgacgacctccgcctcgcacgaccccggggctcggactctacctcgacctcggacgatggtctctgcctcgcccgacccccgagcccggactcagcctcgacctcggaggagcctccgcctcgcccgacctcgggctcggaccgaccatgtcacaggggggccatcattaccctacccttag

SEQ ID NO: 29602 - DNA, 333 bp, Zea mays
  Peptide Sequence Number=SeqID_72977
atggggagcgcccgcgtcactttcgtcttgctgtcgttggaggaacacaacttcgcggaagttggtacctttcagccatcactcgacttcaaggatttttcatcaagcagcccggctgcatccccttgccgatggtcacccaagacggtgaccaccagtttgatggtggggagaagcaagccgggctgcggcctctgccccgccctcagcttcaaggatcttcatcatccttgctggggcggagggcaaggggagagggcgctcaccggcctagcggaaggggcggacctcgacaacgcggggctggtcggccacgagcgtcgtcagctttag

SEQ ID NO: 29603 - DNA, 213 bp, Zea mays
  Peptide Sequence Number=SeqID_72978
atggcaacccttttcaagggggggagcccccccccccccaaacggggtggggtgcccccccccttcaggggggttcagcgtcacatgctcagggatcagagggtgctgtcaaagtccaagacttcttcgtccatggttctggagggagtggccacctttcaagtggcggaggagggagtgaccaaaactccaacagtccgcaggagtgagtag

SEQ ID NO: 29604 - DNA, 423 bp, Zea mays
  Peptide Sequence Number=SeqID_72979
atggtcaccccggtcgggccatcacttgagcaaaaggggtgggcggcggaaaggactgggtgggcggtttcctttctctggctaaacctctcaggttgcgaaaaccctaagaaaggaagcgagaagcggagcaaagaactcgtcgccagaccctcccctgagtatataaagaccaaggcgagacccgttcaatgtttcgcccggacccgccgcgggattcaaaaactcaaagcgaaacggccgttcctcgaacggctcgcaacggtcgccccgcgaaccactctccccgtcgcattaactccgcggcgggacaggcggcgcctctggcaggagaagcgagcgacgcttcgccttcgccatgatgaccgcgtcaaaaaagggaccgggaaagggggataccccgaaaagggtccttcttcgtga

SEQ ID NO: 29605 - DNA, 399 bp, Zea mays
  Peptide Sequence Number=SeqID_72980
atgtcgactgagaaacgccacctagatcagatcgaactcctcagtgttaggcggctcctcctgaaccacctgatcatctcctgtggggggctctctctggattgggcctcaataacagaaaaccgcagggggctcggcgctaaaaataccgagacacagaaccctgggacctggaccgcgggttgcaaggttgcccatgacggaccacgaatccgcagcggcgacgatacttccgcggctcacgacgatggcgcactgcacggcgtccaggctccaacaggaaggttgcggcagcgcggcggcttttgtagccaggcgggacgggccgttacgagatcagctggtcccagcggggatctcgcgcggcaggcgagcgacgcgctggtcgtgcgaaggtag

SEQ ID NO: 29606 - DNA, 1965 bp, Zea mays
  Peptide Sequence Number=SeqID_72981
atggcccgaaacgtttacacactgcggccttgcttctgttctctcgcgtcgttctcccgtagtcccgtgccctcgcgtgcgctctatctgtttctggtggcgacgacttggcggtccccgctgccgccgtgcccaggcctctacttcgggaccttcaccggcgacgagcacccatcgggaggttgcacagagcccatccaacagggtgtctcagacatactgatggatggggtgcccaatatccttgagaaatcatcacatgaatgcatgtactcttggtacttcaccagggaagaactagagaaattttctccatcaaggaaagatggtattactgaaaacaaggaatcagaaattcggcatttatattgttcatttatccgggatgttggcatcaggctgaagctacctcagatgacactagcaacagcagtcatgctttgccatcgcttctatttacaccagtcccttgccaaaaatggatggcagacagttgcaacagtatgtgtatttctggcgtcgaaagttgaagatactccttgtcccctggaccatgtagttagagtggcctatgaaacaatgtataggcgggacactgctgcggctcaaaggatccgtcagaagcatccttatagaccacttcttgatgccatgcaaaatcttggcatcaatcaaaaagaagtgaaacaagtagcatggaactttgtgaatgactggcttaaaacaacattgtgtctacagtataaaccccagtacatagctgctggttccctttatctggctgcaaagcttcacaatatcaagcttcccttgcatggagcgcatgtttggtggcaccaatttgatgttgcaccaaagcctctggaagccgtcattcatcaaatgatggagcttgcggctttgaaaaagttgatgcctgctcgacccaatccggttaagctgaaggaaactttatgtgaagctaaactgagcttatctaatagcccagactctgtgttgaatcaatcaaacttgttaataagcagctcaagtcctgatattggcgagcccagtgacaaagtgcaggtggattcctgccaatacttgataagcagtcacatgggtgattgtagggtctcaggtcctgacagcagttcgttgaatacttgtgctaatagaaatgtctcttgtaaagcacatgatgaagagagcttggatcaggccttaataatcaaacatgacagtgggatgatgccttctagtaatcagacatcattatatgctactgtaggcactgagggcagtgctgaactgaagcaggatgtaagccattgtaatgacttcaatatcagagtcaatgacgaaagcttgaaccaggtgttaagaaatcagcatggtgatgctatcccattacctgacgtggtatcgctggatgccaaggtggacaaggaaaggagttggtgtgtggaaccattaattgcaaactctgattgctgtactgacagtgttaatgtggatagcttgtgcactgatcagagattggctgatgctccttcaggccccacagctgatgcaccatccatgctggccgaggaggaatcttatccttttagtgcaaagcttgaaaatattgatgttgccaggatcaaaggtttattgatgaagaggaagagccggagagagatccaagaccgagccattgcttcagatggtctaagtgaagaagactggatcgagagggagcttgaatctgggattgttacaaaccaagaagccaattgtgctgccatctcagacgagctaagtgacgaagcctggattgagagagaactcgagtcagggattgtggtcggaccaagaaatgagcaagcgatcacttttgatggtttgagtgaagatgattggatcgagagagagctggagtctgggatcatcgttgagccagcacctgctaccaagaagcggaagctggagtcaagctgttag

SEQ ID NO: 29607 - DNA, 177 bp, Zea mays
  Peptide Sequence Number=SeqID_72982
atgacctggacaccacaccgactagccatagtccatctcccctggctcaccgcccgcggtaaagtgctcaccgtcgaccaccgcctctcggccgtgcgccgcgtggctcaatccttccaccgcgtcgctgtaacttgctactgctgtcaaatcaacgccgaaccaaaacaattatag

SEQ ID NO: 29608 - DNA, 87 bp, Zea mays
  Peptide Sequence Number=SeqID_72983
atgggggtgctccacctgctgctgaccccaatgggagtgctccacctgctgctaaccccaatgggcattggtggacggaatggctag

SEQ ID NO: 29609 - DNA, 543 bp, Zea mays
  Peptide Sequence Number=SeqID_72984
atgcgccttgtaacaacctgggcgctcctctgtggctctgccccgttaaatgccagccgagactccccgtttgcttcatcttctcgaatcaccgtcgccaagaacacggagagaaagagcactcgggtgagagaaaatagaggagccgccgcggtcgttgtggttcaatcccgtggaaaaaccatcaatcaaagcctcggggagcttcgcgcaactgcgtattgtggattctcggaattggtggtgctcgccacgctgcgtcgaccgacctcatcatcaccaggattgagggaggaaaaacaccctcccacaccaaagtttattgttttcaaggtgggaggcaaacatccttccgcgactaacttcactactggggctctttcttgggtaccacctttgaacaaaaacagcaaaactctcatgtttcctcacctacaacaacatgggttcgaaaaccctgagtacagagtgtactttcgcaagtcttacccgacaaaagaaaaagactctcaaggatatgctggcttaagggagtcaaggtaa

SEQ ID NO: 29610 - DNA, 567 bp, Zea mays
  Peptide Sequence Number=SeqID_72985
atgggaaccctagaaggaagagatctctcactggtcctagggcaagattcgtacgttttggccgctcagaagagggaagaacaggggcagatgcaaagagccacgtgttcgacgcgctctgagctcgctagagcacgcccgacgcacgcccttgcgtgcccctcgtcgcgccaaagccaagctggcgccgttgcacgcgcccgcgcctataaagcagccagggacttcgaccgtacccctccgcgcacgctcgacctcaccggagcccgaaaccaccggcgtttgccccatgcacggcgtgcccgcggccacccgagcccttgccactgtagaccggccacccgagcccttcccagccacgctcgacccttggaagagactgtgcatgcctcgatgaagctccccgagcaaggaatcggagtttgcttcaccggaggagccagtccacggtcgccggacttcacccgaccgccggtgaacgtagaccgggtaatcctctgctccattcttcgattccttgtgcacacagtctctacatcaccccgtaaagctcatcgtgccatttga

SEQ ID NO: 29611 - DNA, 297 bp, Zea mays
  Peptide Sequence Number=SeqID_72986
atggggaagcatgtcccatcactcctcatgctcctcctctgccgagtgaccgcacttgtacccaccataaccggaatgggagaccacatctcaggtcgcatgaggggtaaagtctgtgggcaggatcactcaggtatccgcacgttaatccttattccaatttcatctcgtagattacgcatccccatggatccgtgtccacagaccatcttcattctgttatcaaggtggatacaatcaattcctaacctcgcgcgagtgctagaaaaatcactcgacttctaccgagatccctaa

SEQ ID NO: 29612 - DNA, 1176 bp, Zea mays
  Peptide Sequence Number=SeqID_72987
gtacttcagggagccggttacacgacgcctccccagtacgcggtgcagctgtttgagaagcaccgagtgtcccgctatagggtgaggatgaccctagagcctcatcccttacagccaggctggcgttcgttggactccgagtctttcggatactgggctgaggatactatcgaggcgattgctctccacgggctgaccaccttctgtggttttcaccccttggagctgtctactcatcccattggcttattccctgctgaaaaggaggacgaccaaatgtggaaagaccgagtggagcatgccaaggatatatgggctctttacctagggcagactgcgcacttgatggtgcgatgcatggatgctctgtatcgtctgcaggtgaggcggggagaggcaatgtctcatctgatggcattattggaggctaccaagatcaccttggataacagagtggaacttgtggtagacctatccactgagatggtggaaaaggacctacaggtggaacagatgtccaatgagatccaggagcttgaggaactagtgggaaccagggagaataccattgaggttctcgaggatcagctcatcaacactcagcaacaacttgtggaagctaaccaacatttggatatgcaccaccaggagatccaggatatggaggccaatgaggatgtcgacatcgagggaggagaggagccggagcctgcatccagcttggacacttctggctcagggagaccaccttcccccgagtcgagtgttgcctccagaatgagattctgcgatagttggctcagcgacagccgccgcctcagcattatggtggtggaagaggatctgctggatgctgatgtatggcttagggtagtggaatccaaattcccactactcaatggagtttgttcagatgtgactaaggtcaggttcgccacccagcagcttcgcggacccgcgctgacatggtgggaccacttccttgctatgcagcctgttgaccatgaggggaatcggacagtgttacagtatgctgaggccttcaatgacctgtgccagtatgtcggatatcatgcagacaccgatgagaagaaaagggacaggttcaggaggtggctcaacactaagctccgcgaccgtctcacaccatcagggccaacagttacaatgagttag

SEQ ID NO: 29613 - DNA, 396 bp, Zea mays
  Peptide Sequence Number=SeqID_72988
atggtgcagagggttactcggtccacgcgctccggcggggttacgaactccggcgagcgtgagcgcactgttccggtggggctggtcctcggctcaagctcgggaaagcttcacggcctctcgaggaagctattcgagggctcggatggagcggaggtgggcgggaaagggttggtccatggcgggcgccctcgggcggctctggcgagtcgcggggaggtcgccggagttgctggcgagcttgggagagttaggcggggtgcggacgggggctcaagtggatttgacctcgggttggcaagttacgaggaggtgaagttaggtctggtagaaaatgggcgccaaaacatgtcaaaccaattgggtttgctttcaaatttttccagagtgtcctag

SEQ ID NO: 29614 - DNA, 249 bp, Zea mays
  Peptide Sequence Number=SeqID_72989
atgaggaaatgggcaaggcctagcccactactcctcatgctcctctcctgccggagcaacatcccactcgaccgtccaacccggtggcagggtggtaggccaagtcacaccatcaactacatcctacatggtacctgcaaaaatggtgccacaagcaaggctgagtatactaatactcagctagacttaaccggcctcaccgccttggcatacaatgctccactgaccccggctgccgccgtgcagtga

SEQ ID NO: 29615 - DNA, 234 bp, Zea mays
  Peptide Sequence Number=SeqID_72990
atggggattagttcagcaaaaagccttcgaagagctgaagcagtatctgatcgatctaacgacgctaactccaccagcgccaggggctcctctgctgttgtatgtggcagcttcacactctgcagcttcgtcctgaccgcacttcatgttcgtaattctgagtccgaagattgcgatatgaacgaaggctttatgccgaaggtccgaaaaaacaccttccctttgctagaatag

SEQ ID NO: 29616 - DNA, 276 bp, Zea mays
  Peptide Sequence Number=SeqID_72991
atggggaagcctgtcccatcactcctcatgctcctcctcagccgagtgaccgcacttgtacccaccataaccggaataggagaccacgtctcaggtcgcgtgaggggtaaagtctgctgccaggttcaatcagggctggccttccaaagctggggcaggcagatcctcgatggcaggttctggtgctggatcctgggctacctcctgagcaactccttgctccggcacgaggatgtactcttcgtcagcgaggttgcaatctatcgaatgcaatga

SEQ ID NO: 29617 - DNA, 141 bp, Zea mays
  Peptide Sequence Number=SeqID_72992
atgacctcccctacgtcgtcgaccacttcactggagatatttcgccactggcactgcacggcggcgatcggggtcagtggggcattggatgccaaggcggtgagtcctggccgtgaatggggaatcgatggggacggttga

SEQ ID NO: 29618 - DNA, 594 bp, Zea mays
  Peptide Sequence Number=SeqID_72993
atggtggggtggttggggtggcaggccggacaacgcagccaggccgatacgttaatgcgcaatctggcgcagcagaagtcgaacgacccggagcaggtttacgcttacgggctgtacctctctggtcatgaccaggacagagcggcgctggcgcatatcaatagcctgccgcgtgcgcagtggaacagcaatattcaggagctggttaatcgactgcaaagcgatcaggtgctggaaaccgctaaccgcctgcgagaaagcggcaaagaggcagaagcggaagcgatgctgcgccagcaaccaccttccacgcgtattgacctcacgctggctgactgggcgcaacaacgacgtgattacaccgccgcccgcgctgcatatcagaatgtcctgacgcgggagccagctaacgccgacgccattcttggtctgacggaagtggatattgctgccagtgacaaagcggcggcacgtagccagctggcgaaactgcccgctaccgataacgcctcgctgatcacacagcggcgcgtgcgctggcacaggcgcagcttggcgataccgcagcagcgcagcggacgtttattaagttga

SEQ ID NO: 29619 - DNA, 1362 bp, Zea mays
  Peptide Sequence Number=SeqID_72994
atggcgcgcggcggcggggggcggtcgaagaaggaggaggaaaaaaaaaactgcggggggcgaagcgcggttacaaggaggcgtcggcggaggcgccgctgcgagtacgtcgaggccctccggtggcttcgggcggactacgaggtctccgtaaagcacctcccgcagcggcacctcctcccctcctgtcagtcgctcggcgaggtctacctccgcctcggccgattctcggaggcgctcacctaccagaagaagcatctacagctcgcaaaggagtctgatgaccttgttgagcagcagcgagctaccacacagcttgggagaacataccatgaaatccttctaagatctgaaaatgaccatagtgccataaggaatgcaaaaaagtactttaaatcttcgatgaagctggcaaggattctaaaggagagatccccttcccaaaagtcggactttctaaaagaacttattgatgcgtacaataatatgggcatgcttgagctggaacttgataattttgaagaagctgagaaactacttatccagggcctgaagatatgcgacgacgaagaggtagattcgtatgatgatgctcgcactaggctccatcataatctcggaaatgtttatactgaactacagaattggaaaaaagccagggggcacattgagaaggacatagagatatgtagaaaaatacgccatcttcaaggtgaggcaaaaggattcataaatctgggggagttacattatcgagttcagaagtatgacaatgcaaaactttgttacaataaagctcttgaagtagcaagatccttggaagatgaggatgctctaattgaacaaattcaccagaatattgaaactgttacgaaagcagttgaagtatttgagcagttgaaggaggatgaactgaagctaaaaaaacttatccgggacacttctaatgctcgtggaacatctaaagagagaaaactcctacttgatcagcatgcatggctggatagtcttattgagaaggccaggatgatatgtgcatggcaaaaacacaaggaattctcaaaagggaaaaaaagggtagcaaatgaacttcgcgataaggaaaagttgagtgattctcttctgtcgataggagaatcataccaaaagcttagaaacttcagtaaagctcgtaagtggtacatgaaaagttggaacatatatcggtcgatagggaacttagagggacaagcattagcgaaagtgaacattggcaatgttcttgattcttgtggcgactgggctggtgcattgcaagcttacgaagaaggctaccggtattatcttgatgtcttccctggtccaaaagtcagaagattttaa

SEQ ID NO: 29620 - DNA, 885 bp, Zea mays
  Peptide Sequence Number=SeqID_72995
atgaggacttcgaggccgacttcgaggactttgaagcagactccggagaattcggatttggagctcggggaaggggctgacgacgacgtcatcgagatcaagcccttcgccgccaagagtactttctccagagatggcttaagcaccatgactactgctggttatgatgcccctgcagcaaggttggccaaaaggaagaggaaagaatcaatacaggggtatccgccagcgcccttgggtccggaggaagctgcaagagcttatgatgctgaagcgcgcaggattcgtggcaagaaggccaaggttaactttcctgatgcaccagcagttggtcagaagtgccgttctagttcagcttctgctaaagcactcaagtcatgtgttgaacagaagccaattgtcaaaacagatatgaacatccttgccaacacaaatgcacccttctaccaatctgttaactacgcatccaacaatccatttgttccagcaatgaactctactgtttcttttgaggatcctatcatgaatctgcactctgaccagggaagtaactcccttggctgctcagacttgggctgggagaatgatactaagacaccagacatcacatccattgctcccattcccactattgctgaaggcgatgagtctgtatttgtcaactccaattcaaacagctcgatggtgcctcctgtcctggagaacaatgctgttgatctcactgatgggctgacagatttggaatcctatatgaggtttcttatggatggcggtgcaagtgattcaattgatagccttctgaaccttgatggatcacaggatcttggtagcaatatggacctctggaccttcgatgacatgcccatcgctggcgatttcttctga

SEQ ID NO: 29621 - DNA, 240 bp, Zea mays
  Peptide Sequence Number=SeqID_72996
atggcataccaccgtgtagaccccgctccattcctccatcagggtttcgccacggcccacatccagcatagggagataatggcatgtgcaatcacccgtgctcaaccaccacttcatgatgattgggcgatcgttcttattcagcctctcccagtgcttgagcttaactttcaaggcattattggtgttgtgcgagaatatttggtggatcagtggaacttggaaatttgtgctatctaa

SEQ ID NO: 29622 - DNA, 336 bp, Zea mays
  Peptide Sequence Number=SeqID_72997
atggctcaccggagttactccggcccgcccgaggttttctcaccgccgttctcccctctccgcccatggattcatggcctcttccccgccattgagtttgccgtggcgccctctccctctttgcccaactccagcgaccccggagccaccctagctcgcgccagcctttactccggcgacctcacagccgtggagaggagcggcgccgtctgcagtcacaacgagcagtccgaggttcctgagtgtgttgttggagacctccctgagcaacaacctggaggtgatgctagcaacatggatgacttcgaggagttccaggaatatgacgagttctag

SEQ ID NO: 29623 - DNA, 2629 bp, Zea mays
  Peptide Sequence Number=SeqID_72998
gattgctgtggaagcagacctacctaatgtgcaactttctgccctcgagaacatgcattacagtcatatggtcagatttgataatatcgaagaagccaagaaaatgcaggaaaaaatagacaatctgaagcaaacactgaatcaatgtgaagcaagggatactgttagtgactactgctcagaaactgacactgaaggtggttgcacatctgataacacgcttgatgctcagaatgaccatggacaggctgcaaataactacgaggaacctgatgatgatgttacgcttgcttcactcgttcagaggagtgggagctcatccaagattaaggtacccaagatacggaattcttctaagaagtttgatgaactatgtgatgtgactgaagacatacataattcttctaagaaggttgatgaactaggtgatatggctgaaggcactagggcagttttaagtagatcacgttctgatcactctgttggcagaaaacgtgtccgtgtgatcttatcagatgatgaatccgacgagaatcatgaaaacgttcagtttaaaaagacatcaactagtcctgcagatagtatgtcagtctcagcagaccatggagcaagcagcagcagaaaccaggatactttacaagttaatcaaacaagggatgcaccctatccagctgaggagagcatttgttcattcaaatcaagtagtcctattgatcatgcttttgaaggcataggattaggtgcttccagtgcaggaaagggaccaacctccaaatcagcagcaagtttttccaagctcagtacacctggctcaaacagtctgaatgaaagccaaaatgctgttggttctcaatccaaagatgctgataatcctcagaccctcatcaggcatttacttgcaagttacacagttactccaactatggatattctatggaataaaatgggatgcttcctctgcagcacttctgggccttcagaatcggcggccatctggtttacttggatggacgtgcttgtgtacatgaagatttctgatgaaaaaagggccaaaggtctattgcctatcattggggagctaaagtttcgtgggaaggtattggaagatgcggtatccatatattatgatgatcagctcgcttctgaacagaagtgtgttgatgttgttattgatgattgggtgccaaagcagctgatgaagttgtatgttgatttctgcatgaagtcattagaagcacccaataagaagctgctgacgaaactatataatcttgaggtctccgaagatgaaatcattgtttctgattgcggactgcaggatatgtcaattgtcccctttcttgatgccctaagatctcacaaaacaatagcagttttggatctttctcataatttactagtttgtaggatgatatgtgagtgcgctgttttgactgatcgattggaagtacttaatctatctgggaatcgcctcactgatgcatgcagttcttacctattcacaatcctgaaaaagtgcaaagcactttatagcttgaatgtcgagcagtgttctatcacgtcaagaactgttcagaagatgacagatgcactccatgaagagtctgtcctttcacatctctcattaggaaagaacaacccaatttctagcaatacaatgcttaaccttctatccaaacttgcatctctcacaaggttttcagaactaagcctgactggtataaaactgaataagttaatggttgataagttgtgcctccttgcacaatcctcgtgcctatcaggacttctgctaggtggaacttccattggaccggtggagacaactaggcttactgaggcattgtcttgtacatctcaagatttcctaaggttggagttgtctaattgtgggctcacaacacctgatttcacacaaatctgtacaaatctctcccggatcaatattcttgagttaaaccttggaggaaatccaattaacctggagggatgtgatgctgtacagcgaatgcttgtaaatccccaatgcagtattagatctctcagccttgacaaatgcaatcttggacttgctggaattgtccgtgtcattcaatcattaccagaaaacagccaattagaggagctgcgcgtgtctaagaacaccaacttggcgttggagacaacaacaaagtatgacgaagacatgcaggaagtatcaacagcttctgagcaaaagcaatgtaatgaccctgaaacaacgaatgatatagctccagggaacatagattttgcgaacatgcaggttccagacagtgaagatgaagcagataatgatgcccaccgtgccagatctggttcacgcaggagctgtgcaagttcatcgcagaaaaactcttactcttcttgtcagatgattgaagaactggcgaaggcccttatttcagcaaagcagttgatggtgcttgatcttagctgcaatggtttgtcggaggaggcagtccagtcactgtattctgcttgggcgtctgttccgagaggcgatggaatggctcggaaacatgtaaataaggaggtggtccacttttcagtggatggtatgaggtgctgcggcctaaaaccctgctgcagaagagacctgcaaatgtga

SEQ ID NO: 29624 - DNA, 591 bp, Zea mays
  Peptide Sequence Number=SeqID_72999
atgcgccgtcctcaacaggaggaagtggcgccctcgggcgtcaccgtcgccgagactttcgcccaagatgccctccatcactcgaaaggccaggaccccagtcactcgcacgcagcacgcctccagctccaacctctgcaggccaccacaacccagaacggccagagacagtggcgcctagccactgccaccgtcgacgcagccgtcgtcgtcatcaccacggcagccacagccgccactgtgccggccgcgaaggccagcagacccccgtcgtccccagaaggccaaaaggcaccgacgcaaagaaccgcacgtgcccctcatcccgataggccagcgtcaagagaggtgcaccaccgcgtcctgcacgcccgccaaggccgacggacctcagccacctgcaagagtgaccagcagccacagcacgaagacaaagcatctcggcgccagacacctgcattggccacgaccgccgtcggcgccgcccgagccggccgccgcccagcgtccagccgccccacgcacatcccgcaactctcgtcgcacgaccaccagatccagccggcggaaaactggatctggtggtcctag

SEQ ID NO: 29625 - DNA, 1191 bp, Zea mays
  Peptide Sequence Number=SeqID_73000
atgtcaggcacgtcttcgttcacaaccggggagtcgtctcgagccggcgagcaaccggagcgcgacgaggtggttgagttcaaggcccgcacgtgggtggcactctcctccatcatcgtcgtccacagcgccaacgacgaggggagacgggatgctcgcgctccgtgcctccgacatcttttctcgacctccagcccccgcaggtatgcagaccaccccgtcgtcttgtccgcctgctccgaccacttcctcttccgggctaccccggccgagggcccctcgaacctcatctgcttcttcgttggcgacgtcaacgcccgcaccgtcgtccgcctccccgaggtccccttccacatggccgtcaacaccatcccgcatccgcaatacagcattggcctcatcgccgacccgcgatcgcgacacggtggtcattacatggtggcccagctccacccgacctttacgacccaccacacgaccctgctatgctactccagcgtcaccgaccagtggaccgccaggccgctggcctccaccgagagcgaggagcaccatcgctggggcgcccacggcgtccttgcccatggcggcctcctctggtggatcgacctcttctacggcatgctcgtctgcgaccctttcgccgcagacgacaacctgcacctgcgcttcgtcccgctcccggtcggctccatccgcacgggcaggcgcgtccccggcccagagaacataggccgggaacgcttcatcaggccgagccagggcaagctgcgatacgtggagatccaaggagcccccagcggtatgcgtactagcaactaccagcccccgtcgaacccccaggtccgcatgttcacgctcgtcagccaagagggccagcatcactgggtacacgagtacacggcgaccttcctcgacatttggagccaccgcagctacgccgaggccggtctgccccagggcgtggtgccttggctcgccctcatcgaccccaacaacgccaacactctctacttcttccggggcacgacgctcttcgcagtggacggacaaaccagacaggtcttgttccgcgtgcgatgcttggtactagaatccgcacgcgggggccacaggttccagaactcccgcttcattggtgcgtgggagctgccaccagcgctagagccagacgattgtacatgccaataa

SEQ ID NO: 29626 - DNA, 741 bp, Zea mays
  Peptide Sequence Number=SeqID_73001
atggtaggggttacaagcgtccgcgtgggagagagcgagaggcttatgcgcgccgtcccgttcccccgcgcggccaacctcccgtacgagtgccctgggtattccttttataggcgtaaggagagggcccaggtcgggcgaggcggaggctcctccgaggtcgagatcgagtctgtcttccaaggtcgaggtcgagtccgagccccgggttgggcgaggcggagaccgtcggttgaggccagggctgagtccgagccctggggtcgggcgaggcggagttcgtcgtcttccggggccgaggccgagtccgagccctggggtcgggcgaggcggagttcgtcgtcttccggggccgaggccgagtccgagccctgggggtcgggcgaggctgagttcgtcgtcttccggggccgaggccgagtccgagccctggggtcgggcgaggcggagttcgtcgtcttccggggccgaggccgagtccgagccctggggtcgggcgaggcggagcttcctatggcgcccgaggccggacttggctgctgtcagcctcactctgtcgagtggcacagcagtcggagcggcgcaggcggcgctgtcctctcgtcaggccggtcagtggagcggcgaagtgactgcggtcacttcggctctgtcgactggagggcgcgcgtcaggataaggtgtcaggccgtcctcgcattaaatgcttctgcggtgcggtcggtcggtgtggcgatctag

SEQ ID NO: 29627 - DNA, 564 bp, Zea mays
  Peptide Sequence Number=SeqID_73002
atgtcttcgtgctcccttatgcatcgtgtctttccaccttccgagcccccagatggggaacacccgcaatccttccgccttgtcattggaggaacgcaacttcgtggaagttggtacctttcggccatcgttcggcttcaaggattttcatcagtcagcccggctgcatcccctcgccggtggtcacccaagacggtgaccaccagcccctgggtggggagaagcaagccgggctgcgatcttggtcccgccctcagcttcaaggatgttcatcatcctcgctggggcggaggccgggctgagccggagctctacctcccgcgcgggttcgtgggtcagcctctccttcagcatccgagggagagggcgctcactggccctgtgagaggggcggacttcgacaacgcggggctggtcgacggcgggcgtcgtcagcttcagcgcgttgggctcgccggcttggctcccggcgccccctcctgccgcatgggcggttgtcgcgccgcgcgcacgggaggaccacccaagatgtcgcgcgctgctagggcggcgttcgtgttctag

SEQ ID NO: 29628 - DNA, 720 bp, Zea mays
  Peptide Sequence Number=SeqID_73003
atgcaggcggcatgcaaccgcaccaagggggcgcaccctttcaacttcgacgcgtccagcatggagacccaggcccacacgtcatgcaaccggtgcgccggtttctacgtgcaagaaactgcaccgccactcgcgccactaccgtgcctcctcgactgcggaaccagtaccgcgactcgaggcaaccctgcacatgacccaacagtgccaaccaggcacatcggtcacgggccagtcagccgcgggggaaggcgcgacggtcgatacggccagaaatgtgccggcagtaatggcagcggcaggcgggcgaaagcagcggtcaagtcgtcagccaagctcacgcggcacctttggcaggcgaagcaggcgacgcttcacctccgccataatgaccgcgctaaaaaagggaccgggaaaggggataccccaaaagggatccttctccgcgaaggaaacgggccccgagcccccctactgatcagaggttcgaaggctggcccctcggaagggttcaacagccgcctcagagcactcgggctccgcgcccactactggtcagaggttcgaaggctggcccctcggaaaggttcaacggccgcctcaggccactcgggctccgcgcccactactgatcaggggttcgtaggctggccctcgaagggttcgacagccgcctcagacgcagagcgagggatgaccctgggtacgttcaatacataa

SEQ ID NO: 29629 - DNA, 870 bp, Zea mays
  Peptide Sequence Number=SeqID_73004
atgggagtagcatgggatggagggggagcaggggtggtggtcgcggacccaagcttcacaggggcgccagagacgaccacggggagcatctggggcagctcggcttctcgtcctccatcgtggagcagttcctgcgaccgttcctcgccgattcttcgactcgacgcatgcggtggcatgggcaggcatcacggcgacgacactggatctacgcgttggatgcggtgcgagggcagggaggatgaggcgaggccgaggccgagggtatggcggcgtagggatgcaggccaaggtgagcgcatgatggggcgagggcgcgagatggcggatatgctcgatctcaagacttggcgggcgcagcgaggctggagatcgcgcggcgtgttggggcgcggtgaggcaggggagcttggtgtggacggcgcacttggaggagagaggcgcgggcgccatccacgcgcgggtgaggaccaaccggagtcgacggtggcggcgaaactggcgcttgcggtggtggagcggtcggcaccgtgggttaggggcgaccgccatggatggaatggggcggtgggggaggcgcaaattgtgggggaaggcgcgatgggggaggcgattgagagcggcgtaggcgtggtgggagctcgtccgtgcgatgaggagcggagggagaggattgcacggcagaacctggcgcacgctcttcatcagctcctgcaccgcattttctcctctcgttgtttgctagttgctacccacgcttcagcttcagtacagaagcaggtgaagccgctgccactgccgctgccggggcaggcagagccatcagtcatctcccaagtgcgaccaacgaactgcaatgtgcctgattaa

SEQ ID NO: 29630 - DNA, 630 bp, Zea mays
  Peptide Sequence Number=SeqID_73005
atggaggaataccgctggctcagccttggtaggatgattggtgtcaacaatttcacaacaaataagcttcaagatcaactggcctttgctaaaatccccctgacagtaaatcagggtggcattcaaagagttcatattataaaaggatgtgtagatggatcacttctattagaattgtttacaggagatggagaaggaacaatgatcgctaggtttaggaaaagatacaatttcttatttgatgaagacgttcctactgaaaaagaaagactccaaaaaatgattaagaaatctgaggaccaagatgccattggagaaatgaagagttgtgtcacgtggattttggcttctcatcctccaaagaacgttgaatcagaaatcttgcgtgagcatatcaagaaagagagggaggcagcaaaggctagaaaacgatcatactatctgaagaaatctgaacttcgcgaaaggaagctgatgaacaagtacaatgagctcaaggtaaagtctacaaggtttaaggggatgcttgtaaatattgatacaaacaatggtgatcctcaagttgctaagaatgtgaacgacatgaatcagctatgcagtttgcatgtctacttcctgtttccctcataa

SEQ ID NO: 29631 - DNA, 186 bp, Zea mays
  Peptide Sequence Number=SeqID_73006
atggggtccaggcacagtgcttgctctgccgaggctgggtgccgaggttctttcgttttgcttttgttagtcaccctcctgcggggagaggtggtgacaaggatgatggttatgactatggtaatggttgcctttggtgcaatctatgctcaggagttccaggacttcgacgagttcgaggattag

SEQ ID NO: 29632 - DNA, 309 bp, Zea mays
  Peptide Sequence Number=SeqID_73007
atggggaggaaaaccaacggacaggaaaggaagagaaataaaaccaagatagtggatgctggtgcacttgagcccctgcttggttatttgcgatcaagcgatccaaatttgcaggagtacgccactgttgctctccttacactttcagcctcatccaccactaagcctgtcataggtgcctcaggagcaatccctctacttgtggaagtcctcaaaggagggaatccccaagccaagaatgatgttgtgatggccctgtacaacctctccacaatcgcagacaaccttcaagctatcctttctgcctag

SEQ ID NO: 29633 - DNA, 603 bp, Zea mays
  Peptide Sequence Number=SeqID_73008
atggcgcacgggcttccttctacgcgcggcttcctccctcatcaacagcgccgcaatccaagccgaccccgatccgtgtctccatggaaggaagcgcgcggtccgctcctcgacccgtctctccatggaaggaataggtaccacaaaaccacgaccgcgcggttttctccctcctccggctcccgcggcgcaagcgtagcccaaccaagcaccagggctgtcgccgcccccgacgccgacgtctacgatattccgtggctggagaagtatcgccccgcccgcgtcgctgatgtcgtcggaaactccgatgccgtcacccgcctggaggggcctccggggaccgagaagacgacgagcatcctggcgctggcgcatgaactcctcgggcccaactatcgtgatgccgtgctgggtctcaatgcctcagatgacaggggtttggatgttgtgcggaacaatatcaagatgtttgcacagaagaagtattggttgttgtttggacttggttgcccgtgcgttttttacaattgtgttcagttgagattctacaagcatgcttggtctcgtattggttataagcttgggttggttaacttaacttga

SEQ ID NO: 29634 - DNA, 582 bp, Zea mays
  Peptide Sequence Number=SeqID_73009
atggtaaggccgagcgaaagggtccaaggccagcgcaaacgtcgaaaaaaaactagacggaaaggaaaaaaacagggagggaagaaggactcaccggagcgacagaggtctaggttgaagctcgctggacacataggcgacgcaaaagagccgacagcggctaacccccttaacaagagcattgatacacgcttgatgaagatgctgtcgattctgatcttgactgatttggaggagttggagattgccaaatggacaggtgcaagaggaaagaatagcgagaaaagtgggcagagctacggcctgcaaggcgagcgagcgaagcgcagcggcccggagcagccagtcagtggggttcctgctactgctacaacaagaccaggcgccaacccctctgaactctccgggctctggttggtggcgaaattggcagagtcatggagtttaccttacctggatgctttcggtgctgccaagaacatgcatgtttatgaggtctcatttatagattcttgggtattatcattgagtcctatgagacgagcatttctcaaggtgatgaggaaatctaacaatcattaa

SEQ ID NO: 29635 - DNA, 642 bp, Zea mays
  Peptide Sequence Number=SeqID_73010
atgcagcccggctgcagtcccccaccagtggctatccagaaggatgaccgccagcctcgtggtggggagaagcaagccgggctatggcctccccccaccctcagcttcaaggatgttcatcatcctcgctggggtggagggcaagccaagtcggggccctaccctccgcatgggctggtgacccgcttcttcctccagcattcggaggagaaggatgttcaccagccttgtggaggaggcgaacctcggctacgcggggtcagctggctgcaggccgtcagctgtagcgtgtctggccctttgggctggatggcttcggcgccgcctccgacgctgcctcctgccgctctggccagggcgtggctgtccgtccaccgcacgggcaatagtcgtgctgataggaacggggtgcccgatcttccgtcaggtgtaggtaactatcgatttggtggagatgtcacacagacgattcggcttccaatcaacacgattagaaccccgcaatcgcagcaccacttctcctctggttatcaaccatgcgctgcgcgattaacctcaccacgagggctagtccttgcctacgaatcgaagacacaagcaagaacaagaaagaacacaatctggaatattgcggatgaatga

SEQ ID NO: 29636 - DNA, 336 bp, Zea mays
  Peptide Sequence Number=SeqID_73011
atggagtccgggacacctgtgctggcgtgtgctgctgcacggcgtgtacaacagcagccccagactcagggcggtcagaccggtcaggcgcgccgcctgctgggtgaccctgacgtcgtctgccagtggattggacaggacgcattaaatgctgggatggcacatcgcccgttagcgtggtggcaggcggcgcctgacgtatggcctgacgtatcgcctgacgtatgctgggatgacataagccaacgggcggagcctggcgtatggcctctacgccgcgggccgcaccacgggctacaccgcaagctacgctacctcagcattaaatacggatag

SEQ ID NO: 29637 - DNA, 141 bp, Zea mays
  Peptide Sequence Number=SeqID_73012
atggccgtgatgggttcaacatcgaaaaagatgtacctctgccaggtgaggaagcaacaaacttttgttgtttctgttccaaggtggtctcaaaataagaaaaccaagaataacgctgcgggaggaagggttcctccataa

SEQ ID NO: 29638 - DNA, 765 bp, Zea mays
  Peptide Sequence Number=SeqID_73013
atgcaggcggcatgcaactgcaccacggggatgcaccctttcgacttcgacgcatccagcatggaggcccaggcccacacgtcatgtaaccggcgcgccggttactacgtgcgaaaaactgcaccgccacttgcgccagtaccacgccttctcgactgcggaaccggtgccgcgactcgaggcaaccctgtgcatggcccaacagtgccaaccaagcacatcgttcacaggtcagttagccgcgggagaaggcgcgacagccgatatgaccaaaagtgggccggcagtaatggcggcagcaggctggcggaagcagcagtcaaatcgtctgtaggctcacgtcccctcctggagctgcaggggagccctctcccatggcgtgaagacgacgcgcccatgttccatccctcgaacgactcgcgcacgcacaacggctgcctcgcgaaccacccgtcccgtcgcattaactccgcggcagggcaggcgacacctttggcaggcgaagtggccgcctcagagcactcgggctccacgcccactactgatcaggggttcgaaggctggccccctgaagggttcgacagccgccccaggacatgcagagcgagggatgactctaggtacgtccaatacatggccgaggctcgggctacgctcccgagaggctcgggggctgctctcgcaaacccggctccggccaaaccgttgacagcgtcaacataccagcccgagaactcggaacatgaccatgcacctgggctatga

SEQ ID NO: 29639 - DNA, 1632 bp, Zea mays
  Peptide Sequence Number=SeqID_73014
atggctcacgctcgctccagccaccgccgcacgggcctcctcctggccatggccgtcgtcgtcgtggcgtcgcttatcgccgccgcggacgcgtccagcttcgggttcgacctccaccaccggttctccccggtggtccggcggtgggcggaggcccggggcggccctctcgccgcggaccagtggccggctcgaggcacgccggagtactactccgcgctgtcccgccacgaccgcgcccgccgcgccctcgctggcggcgccgacgacgggctcctcaccttcgccgccggcaacgacacctaccaatccggaacgctgtactacgcggaggtggagctgggcacgccgaacgcgacgttcctggtggcgctggacaccggcagcgacctcttctgggtgccgtgcgactgcaggcagtgcgcgaccatccccagcgccaacgggacggggcaggacgcgccgtcgctgcgcccctacagcccgcggcggtcgtcgacgagcaagcaggtggcgtgcgacaacccgctgtgcgggcagcggaacggatgctccgccgcgaccaacggcagctgcccgtacgaggtccagtacgtgtccgccaacacgtcctcctccggggtgctggtgcaggacgtgctccacctcacacgggagcgcccgggccccggcgccgccggggaggccctgcaggcgcccgtcgtgttcgggtgcgggcaggtgcagacgggcgcgttcctggacggcggcggcggcgccgtcgacggcctcatggggctcggcatgggcaaggtgtccgtgcccagcgcgctcgccgccagcggcctcgtcgcgtccgacagcttctccatgtgcttcggcgacgacggcgtcggccgcgtcaacttcggcgacgccggcagccgcggccaggccgagacgccgttcaccgtccggagcttgaacccgacgtacaacgttagcttcacgtccatcggcgtcggcagcgagtcggtggcagcggagttcgccgccgtcatggactccggcacgtccttcacgtacctcagcgacccggagtacacgcagctcgccaccaaattcaactcccaggtcagcgagaggagagtgaatttcagcagtggctctgcagatccttttcccttcgagtactgctacagactcagccctaaccagacagaggtggcgatgccggacgtgagcctgacggccaaagggggagccctgttcccggtcacccagccgttcatccccgtcggcgacacgaccggccgtgccgtcggctactgcctggcgatcatgaggaacgacatggccatcggcatcgacatcatcggccagaacttcatgaccgggctcaaggtcgtcttcgacagggagaggtccgtcctgggctgggagaagttcgactgctacaggaacgcgagggtggcggacgcgccggacgggagcccgggcccgagctcggccccggcggcggggccgaccaagatcacgccgcggcagaacgacggcagcggcagcgggtaccccggcgcggcgcccctgccgaggtctgccggctcgcgcaacgccgccgccgcgctgggactgggatgcctctacctgctgctggccgcagcgcttgtctga

SEQ ID NO: 29640 - DNA, 399 bp, Zea mays
  Peptide Sequence Number=SeqID_73015
atgatggtcctcgcctcagttgccaccgtctcgttcgccattctacttcttttctctctcccctcatgcctccacctccgcgccaccccattctcggcagtgggcgtaggagcatgcgcctgctccccgtattcgtccgacaccagccccaacaacgactcgcgcagtggctattgcacgtccacgaggacgtttcacatcatgcgtgcaccatcgtttttgtcgtcgtcggacgacccgttcatcttccaggccttcgccctgttcttcctccccaacctgctacccccgcctacggtcgcagccgcgagccgaccgacgctcgtcgatgcggatgcccaggtcttcgtcgtgtccttctccggcaacgaacaaaaaaaatattatgggaagagctga

SEQ ID NO: 29641 - DNA, 627 bp, Zea mays
  Peptide Sequence Number=SeqID_73016
atgaagtctcgcaaagcactggggttaccaagcccggagaaatcccaaccagagtcgggctcgccaacttcctcagaacccgggggcccgtacgaggctaacgcccatcaagtccttcgcgagcgtgctggcgtcatccgttcgcttggggttggcgtgttgcggggaaacgacgatcgtcttcgtctcagacgcgaggtcaacgcccgacgtgtcccccgctggggcgccggcgtcgtcgactcgctcgacagccaacgaggtgccgcctcctgcttggccatgattgccccgcctcctcctccggcggcggggaaggtgacgggacaggcccggatgctactcttccgccatggggggaagacgtcgtcgattctgccatcgtcgggcgggctgacggccgtcgttgtcgttgtcgcgcggcggaggaaagagtaccatgtcgtagctgccatcgagggacatgaacccaagactctcgaaacggagcagcgtcccgggctggagaggttactggagactacccatctggagcttgacgggaagctattcgtcaacacgcagcaggcccctacctggcgcgccaactgtcggcgtttcgaccccggggggtccctgaaccgatga

SEQ ID NO: 29642 - DNA, 1029 bp, Zea mays
  Peptide Sequence Number=SeqID_73017
atggttatgcgccccttcactttcggaggaaccaacggtcgggaagatgaaccgccgcacaaggagcgtgcaaccgccctgcggttcagcgcctcttcattttcgccaaaaccggcggtcaagaaggcaaaccgccatgcaggaagcgaaaaaccgcccaacggttgtgcgctccctcagcttcgctgcaatcggcggtccaacatgcggacccaggcccacatgtcatgcaaccggcgcgccggatactggaaccggtgcagtgactcgaggcaccccgcgcatggcccaatagtgacattaagtacaaaggtcacgggccagtcagccgtagaaacgggcgtgacagtcagcgtagccataggcgggctggcagtaattacgccaacaggccccacctgcaggctcacattctcccctaaggcgggcccgtgggccactgtcagtaccctcagtcaggggtaccctctactacagtataaagtagccgcgcacccgtgcaacacctcaaggccacccggagaaaggcgcccaaccccaccacatgggcaggtccaagggcaccgcgtggcaaggaaaggtagtacatcccagtattcatcgttgggtccggacctccgaggacaccggacccctatgcgtacaagtccagagcccccaagaaggcacgccgggtcccttgggagggccctagacctcctccgaggcgggtgcaatccaccacccgaccagagagatttcctctccgacagtcttgatacagcagtagggggcccttgcgtcagagactgggccgttgtcttcggcggagatgaagaggcgtactaccgcgggcggcagcacgctccccgcgtgtcggttcgccttctttgtacttgcgaaccagcacgccaagtgtatgacatgtgggcccgggcccccatgtcagaggctgggccgttgtcttcggcggagatgaagaggcacactaccgcgggcgatggtacgctcctcgcgcggcggtttaccttcttcgcacttggagactag

SEQ ID NO: 29643 - DNA, 372 bp, Zea mays
  Peptide Sequence Number=SeqID_73018
atggtgtgccacctgcttggatggaatgtgctggcgttcggtggaaggattcgcgccgacgccatcccccacggcaaactcgccgctagggagttcttgctctttgtctcctgtgtgttggcgctgccgatctcgtcttcttcttgctgttgctggaggagcgcaacctcgcggggggtggcgctcttccgcaagtgctcagtttcaaggatgtttatcagccttgcggtggtggaaagcgagctgggctatggcttcgtcctccgcatgagctggtggcccacctccatgaactggttgagccccggctacgccgcaacggccagaccgcaagcgccgtctgccgtcgtgcttccaactctttggctttaa

SEQ ID NO: 29644 - DNA, 744 bp, Zea mays
  Peptide Sequence Number=SeqID_73019
atggactacgctgcaccagcaggagtcgcgttggaagctggctccgggcagcctcaccagcggcggcgaccacctctgcaccgacggttcgccgccgacagcgaccacctctgcaccagcagcgacaaccacctccgctccgagtggcttgccagcagcggcgaccacctcagggtgtgggccattgcggggagcggaggcaaccacctctgcaatggtagcctcaccagcggcggtgaccacctcagcaccgacgacagcggacagctctgcaccggtggacggcggctgcctcagcacgcgcgaaggggtcctcgctcccgtcgtcccacgggagtgaggacaagaccatccaagagcgcggccgccacccccgcggcgtacggtgtcttgtatgactccccagtacggccggcggtgcaggggaagccgtggatgtggcgaacttgcgcacgacgcgaccgtcgcccacgcggtagacggacaaccacgccccggccaaacggcaggaggcagcgtcggaggcggcaccaaagccatccaggccaagagccaggcacgcggcagctgacggtgcctgccgccggccggccccgcgtagccgaagtttgcctcctccgcaaggctggtgaacgcccttctcccccgaatgctggaaaaagaagcggttcatcagcccatgcggaaggcaggaccctggctcggctcgccttccaccccagcgaggatgatgaacatccttga

SEQ ID NO: 29645 - DNA, 951 bp, Zea mays
  Peptide Sequence Number=SeqID_73020
atgtcttcttcctcccttatgcgtcgtgtcttttcatcttccaagcccccggatgggggcccggtcgcttccccccgctggcggtcacccaagatggtgacctccagcttgatggtggggagaagcaagccgggctgcgatcttggtcccaccctcagcttcaaggatgttcatcatcctcgctggggtgggggccgggctgagccggcgctctacctcccacgcagcgtgtcggagtcgtcggcttggctcccggtggcccccctgccggagggcggctgccgcgccgtgtgcacgggaggaccacccacgatgccgcgcgctgctagggcggcgttcgtgttctggggtggccctgcttttgcaccgggatggcgccctcgcgcagaggccggtgccccactcgtctgggaggatttgagtggggatctgccggggggctggtggcccccgccatcagcgccgaggcggaggcggcttgagaagtccccgtcgccgacgggatcaccgccaccatccgcgccccgcgcctccggctcttcgtacttgtcctcgcccctcgagcgtgggcgtgggcgtgggcaagattgcagcagcgcccaccctgaggcctgcactgctgcggctcggccatccggagcgggagtcgtcgtcgtcgtagtcagagcgggcggcggcgagccgctcccgggttgcccgtcagcggggctgacgccggagtcgatcagccgaggcctcgggtcgggttggcgcccttggaagatggttggccgaggccccaggggtaaccggctgagccgcctgctcgggccggattcccggagaagtccccggaccgcgtcaccgtccgaggctgggtcggatctcgctgaaggcgtcgtcgatgccgagggtgctgtagcccccttccagcgtgaagatccgagcctgcaggatcagattatcttgtag

SEQ ID NO: 29646 - DNA, 603 bp, Zea mays
  Peptide Sequence Number=SeqID_73021
atggccgggcgagggggtgactcctccgaggtcgaggttgagtctgagccctggggtcgggcgaggcggagaccgtcttccgaggtcgaggctaagtccgagccctggggtcgggcgaggcggagaccgtctttcgaggtcgaggctgagtccgagccctggggtcgggcgaggcggagaccgtcttctgaggtcgaggcgggggccgagccctggggtcgggcgaggcggagcttcctatggtgcctgaggctggactcggctgttgtcagcctcaccctggcgggaacgcgcgtcaggataaggtgtcaggcgatccttgcattgaatgctcctgcgatacggtcggttggcgaggcgatctggccaaggttgcttctgcgcgaagcctgcccgagctgggcctcgggcgagtcgaaggtgcgcccgttgcttgaggaggccctcgggcgaggcgtgaatccacctgggtctactgttcctgtccgatgctgggctcgggcgaggcgagatcgtgcccctggagtggacggagctttgacctgtattgcgcccatcaggcctttgcagcttgtgctgatggtggttaccagccgagtttag

SEQ ID NO: 29647 - DNA, 66 bp, Zea mays
  Peptide Sequence Number=SeqID_73022
atggcggagctcgcctttggcctgctcgccttcagcctctgcgcagcatctataagcacgacgtaa

SEQ ID NO: 29648 - DNA, 575 bp, Zea mays
  Peptide Sequence Number=SeqID_73023
ggactgggtcgggcgaggcgaagtcgttcggcagaggccagggcggagtccgacccctggggtcgggcgaggcggagttcgtcgtcttccggggccgagcccgagtccgagccctggggtcgggcggagcggagttcgccgtcttccgggtcttagcccgagtccgagccctggggtcgggcggagcggagttcgccgtcttccgggtctcagcccgagtccgagccctggggtcgggcggagcggagttcgccgtcttccgggtcttagcccgagtccgagccccggggtcaggcggagcggagttcgccgtcttccaggtcttagcccgagtccgagccctggggtcggtcggatcgttgttccctatggcgcccctggcgaggcctgactgcctgtcagactcactctgtcgagtggcactgcagtcggagtggcgcaggcggcgctgtccttccgtcagaccgaaggtgaccaggcacggcctcctcctccttggacagtgcctgcaacaacttctcgacgtcctcataaatgccgaagatgcccttctccaccagatcttgttattttaa

SEQ ID NO: 29649 - DNA, 582 bp, Zea mays
  Peptide Sequence Number=SeqID_73024
atggcggcgaagggcaagagaggcgtcatcaacctgcagggcccgaggccgccgccgctgacgatcctgccttcggacaccacgtcgtcgtcgtcgtcttccccgcagcatcgacggccggccaagagaccccgccgcgtcgtcaacgtcagcggcagcggcagcggcagcgacgacaacgtcagggcaccgccggcgttggccgcgacgccggggccactgatcctgtacgagcacacgcccaaggtcatccacgtacacgcggacgagttcaaggccctcgtgcagaggctgaccggccggcagctgaccccgccgggccgcggcggcggcggcggtcaggaggccgtgattcgcccgctgccgtcgcagcagacggctggcgacgaccccctggtgctcacgctcgggcacgggcagaagcatgccgcgctcccgccgccgctgccggttgttgaccatcacgcgccgcccgtgctgctgccttcgccaggcggtgctgttggtggtctcctcctctccccgggaagcttcctcttctcgcccaccaccatgcaggccatacaggagctcatcagctga

SEQ ID NO: 29650 - DNA, 570 bp, Zea mays
  Peptide Sequence Number=SeqID_73025
atggaggaagacaatgagttcggcgacctctacacggacatcctcatccccactcataccccccaatccacctccacgctatccaaccctgttctagtcgaaaccctacaccgcccgcctccacaccctaatcctacccctgtggcggcggcagcagaggaggtcgacgatgactggctcctaggagggagcgaatccatgcctagggtcgacccgaccggcgattggaccgacgaggacgacgatggaggggagcccgcacctcccgcaaagcggtccatctctgcggatgatatcaatccgctcatgggggtggtgggtgggattccgggccggatgggctctcgtcatcatcggcagatgtttcagaacaagaactcacttatagaggtaactgaaaagacagcagataatcctcgtcaaccgccacttaccgacctccgtcaacctcgcctcctcgtagacgtcctccaccttgcctccctctgcaccctctacctcgacttctggcgctttccagacaccgtcgcgctctcacggggctgcgccgccatgttcctctgcctctag

SEQ ID NO: 29651 - DNA, 243 bp, Zea mays
  Peptide Sequence Number=SeqID_73026
atggacagtgcaaacaggattaatgagaggtgcttggaactgcagaagaacaagaagagtaccaaaactaagcttgaggatgataaacgaaaggtgcacccagcaaagcgctcttgtggttgcccgacaattctatcaaggtggagagtggtggttctatatgcctctatctacaaggatgtccctatattggttaacctttctgatcggtttcatttggataaaggcattggagagtgctaa

SEQ ID NO: 29652 - DNA, 192 bp, Zea mays
  Peptide Sequence Number=SeqID_73027
atggcggcgcagccccgtgagagcgcgacggtgtctggaaagcgccagaagtcgagagtgtttgtgcagagacacaatttttttgggtttcagatggtcgacatagtggacatactatacatgttatgtctgcagttgagactgaatcccctaacggtgataatggagacgttactggagaaagagagttag

SEQ ID NO: 29653 - DNA, 723 bp, Zea mays
  Peptide Sequence Number=SeqID_73028
atggcctcgccgtcggcgttggggagggacaaggcatctctgccgcttgatctgagcggacggtggagattagaagtggtgtaccctttcgccgcgattcgatctgaagagcacgtgactgaggatcctggtgagcagcaggttgaagtagctgagcaggagctcattgaaggcaagttgttgcggaaacaaaaacagaaggcaagcgcaaatggcagggtaaagaaccactgctggcccctcttccggggcaagcgacacctctggcaggcgaagcgggcgccgtttcacctccgtcatgatgaccgcgtcaaaaaagggatcgggaaaggggatattccggaaaaggatccttctcagcaaaggaaacgggccccgagccctcctactgatcaggggggttcgaaggctggcccctcagaagggttcgacagccaccccagagcacgcagagtcagggatgaccctgggtacgtccgttacatggccgaggctcgggctatgctcccgaggaaaacagcactgttcgccccactccggctactgtgccaaccatcaggcctcggcctcaggggaaattctccgcctcacccgacctcggtctcgggaggagtcacatccgcgcccgacctcagcctcggcctcgggaagagtcgccgcctcgctcgacctcggcctcggaccgactacgctacaggagatacatcattaccctaccgctag

SEQ ID NO: 29654 - DNA, 564 bp, Zea mays
  Peptide Sequence Number=SeqID_73029
atgatgcaccagcaacacaacaccaccatatcgccgccgtcgtgggcggcggcggcggcggcggcggcgagaggcaagagaggcgtcgtcagcttgcaggggccgaggccgctgccgctgatcctgcctccgggcaccaccaccaccacgtcgtcgtcgtcgtcttcaacgccccggccggccaagagaccccgccgcgtcgtcaacagcggcggcggcgacgtcagcagggcaccgcagcagtcgtcggccgcggcgccggggcccgtgatcctgtacgagcacacgcccaaggtcatccacgcgcgcgccgacgagttcaaggccctcgtgcagagcctgaccggccgcggcggcggtcaggaggccgtgcctcggccgccagcgtcgtcgcagcagacggctgctggtgacctcctggtgctcacgctcgggcaccaccagcatgttccgccgccgccgccgctgccttcgccaggcggtgctgctggtttccttctctcccccggcagcttcctcttctcgcccgccaccatgcaggccatacaggagctcatcagctga

SEQ ID NO: 29655 - DNA, 315 bp, Zea mays
  Peptide Sequence Number=SeqID_73030
atgacgatgacgacgacgacaatttggtggtggacgtggacctggtggtgttgtgttgttgcatcattgacagatgatgagaggttttctcgcgagcttcggaatgccgaatgggtcggggtgctggatgagctagagctggagctggagcctggaaggcgtttgagtcgacatgttgtatatatagtcgtgttctcatggatggatggaggccagcgccggcggccggcaagaaaactccaagaaatgaatgaaggggccgggaaggtgctctcgcgctccagaaagaagaaaaagataacagccgctagctag

SEQ ID NO: 29656 - DNA, 1713 bp, Zea mays
  Peptide Sequence Number=SeqID_73031
atggggagtctttcgctggatttttctgtcggccttcattttgaagattggatttttcgcaagtttaattgtccgattaaccctctcccgggcaaatttgatcgccatgcgttcctccttgtcgtttccttcggcagatgttcctcgcggttgtgtgaagaatcggtgggtcttctgcttcaatccttcattggcggttctgcgaagcttttcaggcccctccagctattagaccgggttttccgtttttcgctttcttgcaaggaattgggcttcacagtttataggcgccattcatttagttgttcttccttcaaagcttatctccatctttggaattctggcgctcccaactggatcaaagaatggcagctcttttcggaggaagaatcaaactcttggactatggtttcccgtggccgctctgcgaaagcctcctatgctgatattgctcgttcatccgttctgtctggcgtgatgttggttcccctgggtggacagatttataaaagggattttcataccttccccagtaagtttgagggcgtcatttgggaattcccccgcagctgtggttcagtagctgaaggttttcatggggtttcttggactgttcagtgtgacatagtgcagcagttcatgcttggtaacatgcctgaggatgaagaacctgtgcctccgtatcctcataatgggcatcaacttccggtggaattttttggattggggcaacctgtgcccaatttccaatttgacctcgacatccccccaatggtccaacaagatcaaccgcctgcacctgttcctttagtcaacaatgaagaggaacaattcagttaccaattctccggtcttgaggacttaccttcagatgaatctatgggtcttttcaacgatatcgttatcccgcaagctgtcaacttccctcaggaggatgtccaagatcaagaagttgttgtgcttgctcttccagccctccccccagcggacccatttttggagggaaataacgatcagaacgatcagggcgcgcaaaatttgaatctgaatgctgatgataacatcattgtgggcttcatgactcatctgaatcagccctctcaggaccctacctacaaagatttcttggccaaaaagcacttctcctcctgggctaagctttgccccacccccagcgcagacctcatctccgttccaaaattatgggcagctttctttatgggcctggttatgaggctggattcttttgagtgggccagaaagtttctgctgttagaggctctttctgctttcatggagcccaacatggaaactgtaccatttaagataccccccaaatgcttgctccctcccagccaggattcgcttgtggaggctcaatctcctgtgacttctgtagccgtgaacaggaagaaacgtgcagcattggtcaacactgaagtgagaagaagtgctaggctcagagaaaaagccaaaggctttaagccttgttttggcagaaaaaataattgctcgtgctgtgctgggtctccttcaccaccatcgctttcacacaggactatcaaggaattgggcgttgactcttgcaaggtggacccccaaaaactaagtcttaactccttaagcaactccaggtcctccagtgttgccattcagaggccgcgttcctcgtcctgctccataaatgagccgagttctccgggtgcagattaa

SEQ ID NO: 29657 - DNA, 432 bp, Zea mays
  Peptide Sequence Number=SeqID_73032
atgggcaagaacaacaagcgcaagcgcgagccgactcctccatcggaggatttcggtgactcggaatactcggaggaggagttctcctccgagtccgaggggtctccggctcccgtctctcccccggcgtcgtccgatgactcggacgactcccaggggatagccgcggaggtctggacgtacatccaggccgtcgagcgctccgggctcgagggctcggatgagtcggagtactcctcggatgaggaggactcggacggcggcgacgaggatgaggacgacgacgacgacgacgacgacgacgacggcgacggtgacggcagcggcagtggcaggggcggcggcgacggcagcaggggcggcaccaagggcgacagcagcaaaggcagcaccaagggcgacggcggcggtaggggcagggccagtggctga

SEQ ID NO: 29658 - DNA, 120 bp, Zea mays
  Peptide Sequence Number=SeqID_73033
atggcgcccaagagaaaaactgcgaactcgtctgctgcagtgatccccgcaatcgaccccaacagccagttacccttcgcagagtacatggtcgccccggctgttttgaaatacagctag

SEQ ID NO: 29659 - DNA, 159 bp, Zea mays
  Peptide Sequence Number=SeqID_73034
atggcgagagtagcgtgtaccctccgtggcaagaggctggacagtggtgtatctgtgctctcggtgaagaagcagcaaacttttgttgcttctgttccaaggtgttgtctaaagaagaaaatcaagactgaagctgcgggaggaagtgtcctccgttaa

SEQ ID NO: 29660 - DNA, 402 bp, Zea mays
  Peptide Sequence Number=SeqID_73035
atggtgctgccacagccaatacttcacaccattgccgggccgcttcgctccgtgctcgtactccaccgcctacgtcaagcctcggtggtcgatccgggaggaagcacagcgcacatgtatgctctctacggcctcgtctgggaggaatcgagctccgacccacctagattcctcgccggtgtgggagcttcaccgcatcgccgccgtgtgccgtgggcagcctccctggcatcgttcctgcacccggtatgctctcccaccttgtatgcgttagatcaagaacgcgtaggtctctctggtttcgggtgtagggcgtcggcgtgccgggatggtgttcaccggcgggagctccgccgtgtagacctgtgcgtcgccatgactgggtgcgggtctgcgggataa

SEQ ID NO: 29661 - DNA, 285 bp, Zea mays
  Peptide Sequence Number=SeqID_73036
atgggcacaggaagcttcttcaacctccacaacgttcagcccccagcaaaaaccaagcagcgggcaggaccccggcttcgcttcgcgaagcccaggagggagagggttcgccgaaggcggagcgcgcgtggcttgaaggagagatggccgagcaccatggaggagctcgccgctggtagaggaagccatgtgtcgggagagcgatgcacggtgtcgagaatggagtttggccgacgtctagttcatgggggtgtcggccatgggaaggagcagagggaggcgtag

SEQ ID NO: 29662 - DNA, 132 bp, Zea mays
  Peptide Sequence Number=SeqID_73037
cggggagggattcttgtaaacggaatccccatcagagggaggcattcgagccctcgggacccgttcgccaggggaaccgggttccggcagatcacccgccagtactttttgggcgtgcctctggccccctag

SEQ ID NO: 29663 - DNA, 1161 bp, Zea mays
  Peptide Sequence Number=SeqID_73038
atgacagcagctcctgatctctccctccacatcagccctccgtcgccaccggagccgaggctgctgctggggttggaactcgacgacgacacggcggcggaggcggcggccgcgacgaagaaggcggacgacgcggcggcgatgcgggagtacaacaacctccaggtgcagcggcgccagctgcaccagccaagccagacggcgggccacgggttcaagaggggcacgtcgggcagcgccgccgccggcgccggcgggaggagaagttccagggcgccgcggatgcggtggaccaccgcgctgcacgcgcacttcgtgcacgccgtcgagctccttggcggccacgagagagcaacaccaaagtcggtgctggagctgatgaacgtgaaggatcttacactggcacatcagatgtacagaacagtgaagcagcagggcgcagacagaccatgtgtagcaggccatgggcatgccagagacatggtcgtccttctcacaaccggtgtcggtgaaggggatgctggctttgttgacgacgtttccaacagcaacagcaacagcaacaactcagtcgtcgtcaacaacaccgtccctgctgccttcaacaacaaccatactgatagcaggacgccacagtctccaggcggacgggagcagcagcagcaaccggcgccggcggtggatcgtcgtcgagacgacgccgccgccgccgcagccgcttgtgcttgggtcgtcggacggcaggtccagcatcagcggagctgcagcgaaggagtgaccaagctgcagggactcaaggtaggagatgagcgcgtcgaccgtcatcacggggacgacgccatcgcggcccatcgtctcgtggaggacgaggctcgcgacgaccacgcaggaagcggcggcggcttccaacaacggcggccgtcgccgaacaacacgagcggcacggtctccagctcggagtggctcaatcagcagcactgtagcggcgtgatgagcgtcagggtgcttggactgccgcctgcgacgccaccgagcctggagatgagcctgggccgccagggctggcagatggatcagcagtgcggcggcgagttcgagttcgacttcgagccctccccgccgtcggcggccaaagagctaactctgctcaggtgcttgtga

SEQ ID NO: 29664 - DNA, 2736 bp, Zea mays
  Peptide Sequence Number=SeqID_73039
atgactgctgccagttttgctctagttgaaaggcctgaaagctttatgagtaccgtagttgctccatctgtgtcaggacttcctaactgtatttctggccctggtgggattgatagttctggattgcaaaatggctattcaaaggaccattttccaggacaaatgtttcaacaatacagagaatatgagaaagagttagatggtgcatggagccaccccacagagaagccagttcactcaaataggacaactcagagcgatgaaatatatctcaaaggagaatgcggacctgatacactcacagaaatgaaggaaaactatgggcgcatctcagactctagagatccttgtgaccctgagagagaaattgttgagagatctgaacagacatcaaatatcacagtatcaaaggcaacttcaccaatttcagatgaatcttctggcaggcgtccagcaaaacgcctgaaggctgatgctccccgtcttgtcaatgtcaatcaagtagagagtccacaggagcaaaaacctgttgtgaatgagaatcatgtatctggtggtgaaacagtacaatcggaaatcacagaattacctgcaaaaccaccttgcagttcattgggagacattaatgctgagagcaataatatgcttgaacagggtagtgaagatgtacccaacatggatattgttaaggaagaggaattgtcccgtgcaaaaggtgacattgagatgaaagatgctaagactgttgcattggatcatacaccaaaaggggtcaatttaagttcaagacgaaagagaggggcttctatactttatggattaactgctgaggagcttagagatcacatgagtagtctaataaaccggcatacttgtcagagcaaggtgacatctcaagaattcccatcaattgatggattgcctgatcagaacacatgcagtttgtgtgggatggagaagcttctttttgaacctcctccacgattttgtgcgctctgtttcaaaataataaattctgcagggtgctattatgttgaagttgaaaatggaactgagaaatcttctatatgtagcaaatgccaccatcttagcagtttaagagctaaatatcagaagaaatttaattatgcagaaacagatgctgaggctgaatggtgggtccagtgcgacaagtgcaaagcttggcaacatgaaatctgtgctctttttaacagaaagtgtgaaggggcaaaggctgagtatacttgtgcaaaatgttttttgaaggaaaaggatagtggagatattcaggcactggagtcatccactgttcttggggcacaggagttacaaagaaccaagctaagtgatcatattgagcaaagactttcagagaggcttgagcaggacaggcaacagagggcgagcgcctctggaaaagttgctgaagaggtaccaggtgtgaaagggcttacagttagagtagtttcttcagccgaaagattactgcaagtccaaccacgttttcgtggtttttttaaacaaggaaagtatcctggggaatttccatacaaatcgaaggccattctcttgtttcaaaagatcgaaggtgtggatgtttgcctctttgccatgtatgtacaagagtatggctcagattgcccaccaccaaatcaaagacatgtttatcttgcatatattgattctgtcaaatacttccggcctgaaatcaaatctgcaactggagaagctctccgcacctttgtgtatcatgaaattttgattggttatctggactactgcaagaaacgagggtttgtaagctgttcaatatgggcttgcccatctacgaagcgagatgattatgttttatattgccatccaacagtacaaaagatgcccaagtctgacaagcttcgaagctggtaccagaacctgatcaagaaggccattaaggagggtgttgttgtggagcgtaatacactctctgacttcttccttcagcctacaaatgagtgcaaggccaatatttcggcagcatgcttgccatattgtgagaacgatttctggcctggagaagcagagaggctgcttgagaagaaagatgataatgcttcacagaaggaagagacacaggtaggaaggctcttgcgtgttgccaaacgcgacgacagaaaaggaaaccttgatgatattttgcttgtgcataagttttgcaagcactgccaccatcctatcctatctggcaaaagttgggtttgcactagctgtaaaaatttccatctatgtgacaagtgtcatgcagaggagcagaatacagcacagaaggacaggcatccggccaccacaaaacagaagcatgcattcgaaagaatggaggtacaacctcttccagagactgatgatggagatccgacaatggaaagcttgcatattcatgaattaaggcagattgacactagagaaacttcacagaagcacactctacaggactacattgatggccttgtgcatgcatcgaggtgctatgatccacgtaactgcacccatccactctgtttaaccctgaagaaactgttcgcccatggtgcacgatgccatgtccgtgcctgcaatagcggcggttgcaaaaagtgtctctttatgtggaaactcctgttccgccactcaaaagattgcaacgacggagactgcgcggttcctagatgcagggatgtaaaggcattcatagctgaaaagatgaagcttaaaatctag

SEQ ID NO: 29665 - DNA, 738 bp, Zea mays
  Peptide Sequence Number=SeqID_73040
atgcataaggggagcgcgaagacatggttgtatttcaagggggtcaccctccttttaaaggcaactctccccacttgtgtcctcagccatcgcgggctaagtcttctcctacacgctccaaggtcctccccctacgacacgggggttgggtcccacgcgtcatgcaagatggccagggacagaagaagccaaaccgccgcgcgcgcggtatgcgcaactgcccagcggttacgagcaatcctccactttcgcccagaccagcgggtgaaagggcggaccgccatgcaggcgacatgcaaccgcaccgaaggggcgcaccctttcgacttcgacgtgtccagcatggaggcccaggcccacacgtcatgcaaccggcgcgccggtcgctacgtgcaagaaaccacaccgccactcgcgccactaccgcgcctcctcgactgcggaaccaggatcgggaaaggggataccccgaaagggatccttctccacgaaggaaacgggccccgagcccccctactgatcagaggttcgaaggctggcccctcggaggagttcaacagccgcctcagagcgctcgggctccgcgcccactactggtcagaggttcgaaggccggcccctcggaagggttcaagggccgcctcaggccactcgggctccgcgcccactactgatcaggggttcgaaggctggccctcgaagggttcacagccgcctcagatgcagagcgagggatga

SEQ ID NO: 29666 - DNA, 426 bp, Zea mays
  Peptide Sequence Number=SeqID_73041
atgggcaagaacaacaagtgcaagcgtgagccgactcctccatctgaggacttcggtgattcggagtactcagaggaggagttctcctctgagtccgaggggtccccggctcccattcctctgcgtgagtcgtctgatgattcagacgactcccaggggcttgcggcagaggtctggacttacatccgggccgttgagcgctccgggctcgagggctcggatgagtcggagggcggcagcagcgggagcaaggatggcgacggcggcagcagcaggggcggcggcggcggcggcggcagcagcagcaaggacagcaacaagggccagtggctaaatgccactgagtcaactgtcgagcgacttgagggcgacgtcagcgttttagaggtaacgccgagcgacttgaagacgacgtcagcattttag

SEQ ID NO: 29667 - DNA, 1656 bp, Zea mays
  Peptide Sequence Number=SeqID_73042
atggagaagacgacggtcgtgctgtacccgggcgcgggcgtcggccatctcgcgccgatgctcgagctagccaaggcgttgctccgccacgcaggtgaccaggtggacgtcgccatcgtggtcgtcgagccgcccgtctacgcggacggcttcgccgccacggtcgcgcgcgccaaggcctccaacgcctccgtcgcctgccacgtgctacccccgccggcctccgacggcggcgccgagcctgacgaccccctgacccgactgctccgcttcctccgcgccacgaacgcgccgctccgggacttcctccgcgcgctgtcggcgtcgcgccgcgtccaggcgatcgtcctcgacatgttctgcgccggcgcgctcgacgtcgcggcggacctcggcctgcccgcctacttccacttcgcctcgggcgccgccggcctcgcctacttcctcggcctgcccgccatgcgggccagcgtgggcacgagcttcgccgagctcggcgggtcgaccgtcctgtcgttcccgggcgtccctccgctcacggtcgcggacctgccacagggggtgctcaacgacagcgaggcgtgccgggtcatcatgggcgcggctgcccggatgcccgacgcccgcgggatcctcatcaactcgttcgagtcgctggagccgcgcgcgatgcgggcgctaagggatgggctgtgtgtgccgggccgcgccacgccgccggtctactgcgtcgggccgatggtctcgcccggcggcgacggtgccggccacgagtgcctccgctggctggacgcgcagccggaccgcagcgtcgtgttcctctgcttcgggagtttgggcacgttccccaagaggcagctggaggagatcgccgtgggtctggagaggtccgggcagaggttcctctgggtggtgcggagccctcccggcgggccaccagccgacgacgtgcgcgcgctgctcccggcagggttcgcggagcgcaccgagggcagggggctcgtagtcgcgtcgtgggcgccgcaggtggacgtgctgcgtcacagggcggccggcgcgttcgtgacgcactgcgggtggaactccacgctagagggcgtcgtggcgggactgccgctgctgtgctggccgctgtacgcggagcagaggatgaacaaggtgcggatcgtggaggagatgaagctcggggtggaggtgaggagggacggcgagggcctggtgacggctcaagaggtcgaggcgaaggtgaggtgggtgatgcaggactccgacggcgcgcgggagctcaaggaacgcgcggaggcggcgagggcgagagcggccgaggcgctggcggaagggggtccgtcgcgtgcagctttcctcgagttcgtcctagacctgttggcttccgaaggcatggcgaccacgcctacccctcgctcgtcaactcctacatcagcattcagaaggccgaaggctgcgccagcaggccccaccggtcgggccacggacgtcgtccgcgtgaaggcccaaacacccccttcgctccggcaagccgaggtgaagaccatcaacgacttcaaggaccgggtgaccgaggccgcgaagaccacaaggctttgtctccctcaatgcgagaaggggctgtgtgcaatccggcccatgtcatag

SEQ ID NO: 29668 - DNA, 270 bp, Zea mays
  Peptide Sequence Number=SeqID_73043
atgcaagccaaagtgcgacagatgatattagatgaggaacaaaagactcaggagctagaacaagaaatcacacttatacaaggcgaaggcccttacaacctgcagcgcgcccccctcgcggcccccggtggccttccagcaaaacatacaaggcggagacccattccacctgcagcgcggccccatcatcccccagctgccgctttccagggaatcaactacctcgacgagcgaagtctgctggctctgcagctccaagcgtcaccctag

SEQ ID NO: 29669 - DNA, 399 bp, Zea mays
  Peptide Sequence Number=SeqID_73044
atggcgtggcgtggccccgcctcccgggccgtccttgccgccgtccgccgcccagccgcagcgcccgcggccgcacgcctccacgccccgcgacctttcgcggccccgcgccgccgcgtcccgtccgccttcgccacctcctcgctcccgtccgcgcggcctctggcggcgatgatggggtccccggtgacggtggccgcggtgatggcgcgtctcacggcgcaccccggtgccagcgcgcgggcgtgctgcgagctctcccaggaaccagacgagctaacatctttccggaaagaaaccggtggtgctggtgcgcagctagcagtagcagttgaatcatcgccctcgtcgcccgtttttgtgactatggttgtacgtctcctaaatgctaggctgtga

SEQ ID NO: 29670 - DNA, 804 bp, Zea mays
  Peptide Sequence Number=SeqID_73045
atgggtcggcgcgagacggagcgcgaaggggggaagaagccggagggagacaggcgtaaaaggggaaacccgcggccttcgtgtttgtcccgcgcccaggtcgggcataaggagaggatccaggataatgatggcgcctcctgtgacgtggtcggtccgagccctgggttgggcgaggtggaggctcctccgaggtcgaggtcgagtctgtcttccgaggccgaggtcgagtccgagcccctgggtcgggcgaggcagagaccgtcggctgaggccagggctgagtccgagccctggggtcgggcgaggcggagttcgtcgtcttccggggccgaggccgagtccgagccctgggtcgagcgaggcggagttcgtcgtcttctggggccgagcccgagtccgagccctgggtcgggcgaggcggagttcgtcgtcttccggggccaagcccgagtccgagccctcgggcgaggcggtgttcgttgtcttccggggccgagcccgagtccgagccctgggtcgggcgaggcggagtttcctatggcgcccgaggccggacttggctgctgtcagccacactctgtcgagtggcacaacagtcggagtggcacaggcggcgctgacctcttgtcaggccggataaggtgtcaggccacctttgcattaaatgctcctgcgatacggtcggtcggcgtggcgacttggccaaggttgcttctcggtgaagactgggcctcgggcgagccgaagctttgtgctgatgggggttaccagctgagattaggagttttggggtacccctaa

SEQ ID NO: 29671 - DNA, 600 bp, Zea mays
  Peptide Sequence Number=SeqID_73046
atggcgatgattcagcttgattcttcatttgggggcggggtcgccatggtccaacccacttttttttgcctcctgctgtggtggtggcgaccggagcgaaggggtgacacgggggtctcagaggacccgtgggctaaattctgcaccggcggcgaaatcgcctctgctgtcgctacgacgggcatggccgcctcggtcgcacagcagctgaaatttgcagctgccttcgtggaacgtattgcttcgggggcgctggcctcggagtttgccaccgagaggcggcgacttgagggaaggattgagcgcctccggacgcaacatacggaggcggctgcccgcgcagaagctgactctgcacgtgttgaggctggtcttgccctcaggcgcgccgccgacaaggagtcagagctgaaaagcctgcatagctattccaagaagacggaggcctccaccctcgccggtgttgagcgggcgcacacgctgttcgtggatgcgtaccacgagctcgacgcaaagatcgctccttttgatagatctgggaggaggcacttcgaggtcttcgaccgggcgagtgaggacttcaaccatggaattttctag

SEQ ID NO: 29672 - DNA, 291 bp, Zea mays
  Peptide Sequence Number=SeqID_73047
atgggaatcagccacaatctccttaagcccgcagacaaccctctgtacgggttcggcagcaaaggcgcgttccctgttggcaagatagagctaccattgtcattcggcgcgacaccgagcgcgcgaagcccacagggcatgatcacagtctacagagaccagcagacagcacgatacattgaaagagacttcgttccagggcagcgcaatgttcactacctaacaacagagtgcgaaggcagcgatagtcagcgttcagcgaaaggcaaaaaggtcaacgcccagctgtag

SEQ ID NO: 29673 - DNA, 825 bp, Zea mays
  Peptide Sequence Number=SeqID_73048
atgctcctgggcgggctcaggggcgagaagccggtcacgctcatcggcacgctcaaatcggcggtgctcgacaagcggcgccgtcgagcaggcccgctcaaaggtggagggcaggaatcaggacctaggcggctgataccatgtcatggcggttcacgtgctgctgagtatttgaaggagcatttgtttgagaacctcatgaaacatccagagttcatgacaaacacaaaattagcaataaatgaaacatataggaagaccgattcagagttcttggatgctgaaaggaattctcatagagatgatgggtcaacagcatcaacagcagtgctagttggtgaccatctttacgtggcaaatgttggagactcaagggctgttatatcaaaggctggcaaagctattgcgctctctgaagatcacaagccgaacagaagtgatgagaggaaacgaatcgagagtgctggtggaatagttatgtgggctggaacttggagggtaggtggtgtacttgcaatgtctcgggcatttggcaaccgtctcttaaaacaatttgttattgcagaccctgagattcaggaacaagaaataaatgatgagttggagtttctaattatagctagtgatgggctgtgggatgtggttccgaatgaggacgctgtttcacttgtgaagatggaggaggatcctgaggcagcagcccggaagctgacagagactgcgttctcccgtgggagcggcgataacatcacctgcatcgttgtgaagttcgagcatgacaagcctggtggcggcggctactcgcctccaggcgacaagagttga

SEQ ID NO: 29674 - DNA, 213 bp, Zea mays
  Peptide Sequence Number=SeqID_73049
atggcgcggctcctccatgcggaccgacttgacggccacgaacagcgcagcgacggctcctccatgatctcgccctcgcccgccgcgaacagcgacagtgacgacgcgaccgacttgacggccacgagctcgccctcgccggccgcgaacagggacagagttacgggccgggtctgggccagcccggcccgatacaagcccgccgtgttttag

SEQ ID NO: 29675 - DNA, 510 bp, Zea mays
  Peptide Sequence Number=SeqID_73050
atgccgggcgtgttgggagtcggagaagtgcgcccacttggtgcggttgcatgccgcctgcatggctgccccgccctttcgcccgctggtctgggcaaaagtggagagtcgcttgtaaccgctgggcggctcttcaaggatgttcatcatcctcgctggggtggaggccaggctgagccggagctctacctcccgcgcgggttcgtgggtcggcctctcctgcggcgttcgagggagagggcgctcactggccctgcgggtgagtcggacttcgacaacgcggggctggtcgacggcgggcgtcgtcagcctcagcgcgtcgggctcgtcggcttggctcccggtgccccctcctgccggaaggcggctgccgcgccgtgtgcacgggaggaccgcccaagatgtcgcacgctgctagggcggcgttcgtgctctggggcggtcctgcctttgcaccggtacggcgcctccgcgcggaggtcggtgccccactcgtccgggaggatctga

SEQ ID NO: 29676 - DNA, 1008 bp, Zea mays
  Peptide Sequence Number=SeqID_73051
atggcgctccctgttgacgtggcgggcccgcgcctgaggccgggcgacgtgggggctcctccgaagctggggtcgaatctgtctttcgttgccgaggccgagtctgagcccctgggtcgggcgaggcggaagtcgttcggcagaggccagggcggagtccgagccctggggtcgggcgaggcggagttcgtcgtcctccggggccgagcccgagtccgagccctagggtcgggcggagcggagttcgccgtcttccgggtcttagcccgagtccgagccctggggtcgggcggagcggagttcgccgtcttccgggtcttagcccgagtccgagccctggggtcgggcggagcggagtttgccgtcttccggggccgagcccgtgccctagggtcgggcggagcggagttcgccgtcttccgggtcttagcccgagtccgagccctggggtcgggcggagcggagtttgccgtcttccgggtcttagcccgagtccgagccctggggtcgggcggagcggagttcgccgtcttctgggtcttagcccgagtccgagccctggggtcgggcggagcggagttcgccgtcttccgggtcttagcccgagtccgagccctggggtcgggcggagcggagttcgccgtcttccgggtcttagcccgagtccgagccctggggtcgggcggagtggagttcgccgtcttctgggtcttagcccgagtccgagccctggggtcgggcggagcggagttccctatggcgcccctggcgaggcctgactgcctgtcagactcactctgtcgagtggcactgcagtcggagtggcgcaggcggcgctgtccttctgtcagaccgctttatgctgatgggggttaccagctgagaattaggcgtcttgaggatgggaagttccctactggaaggaaaatcacagtcaccggagttcgtatgactggaatatgggtctggctggtcttaggtggactggacagcatgatggatgagtag

SEQ ID NO: 29677 - DNA, 576 bp, Zea mays
  Peptide Sequence Number=SeqID_73052
atggatcgcctgacccatcgtgatgtcgctcacagttgtcattttcatgacgctctcgacaccttgctgcatcgggccttcaaccgacacacttggtccatcgagtaccgttgtgtggtctaccagcatcgtcgcaggttatactcggaccagtgggaggctacttgcttggtgcgtcgtctggacgatgatctctggggtgtagcggccttctcagagcattattctatctctgagagggacactgtcgaggtagtcatgcaagatgctgcacgacgtgtgctttcgcagtactattcgttgttcaacgaggtagctaacggcctcgacctgaagtactaccctcaccggaggctgaacaacatggttaacgtgatcgccgtgctcaacaccgagctggaccacacccttgacaagttgggcaaggctcgaccggagattgcagaactgcgtgctgagcgcgcggcatgccaccatcaggagggtggttcccccgctcctgtcgggattcagcacccctaccgcttgtcgccacgtggtcgttatgcttatggcacccctgactgtaggacctag

SEQ ID NO: 29678 - DNA, 678 bp, Zea mays
  Peptide Sequence Number=SeqID_73053
atgaggtggttagggttgcatcggaagcgcagcggcgtggatggaaaggagaggattggggttggaggactggagatgggtaaagagagcccgagggcctgcggctggcaagccgacgtcgcacgcgaaggagatcacctgtcgagggcaacaccttcaaccgacgatgacgctgcagcagcccctgtccctgtagattgctcaccaaagctaaagatggttcctcatgctaagctaaaggtcggggccccggaagtgctccttgcgctggagtacctgcacgtgattagggtggtctacagagacttgaagacagagaacgtcctcgtgagagaggatggccacatcatgtctccgactttgatctttcaggtaggctacgcggtcttgtcgatgctgatgagatcttccatgagctccgaccccaagtacctgcgcccagcccgcctgcatccaacccacatgcttcatgcccaagctcttcggccaaaggagcccaaagagcagcagcaccgacaagaaacccaagggcggcgagcccaggcagcggcctcgtgtccgacctcgatctcacggcgtaggctgggtgccgaactcgacgagatcccggcaataggcctctggcatctgcctaaggactccagccctactactccaggatgccatacaatttcttag

SEQ ID NO: 29679 - DNA, 375 bp, Zea mays
  Peptide Sequence Number=SeqID_73054
atgattacactgacaggtttcatgtttctactgacatcagcattccttggctttactttcgatgccgtggatggaaaacaagcaaggcgtaccaactcatcaagtcctctaggcgagctttttgaccacgaatgtgatgtgcttgcgtgtgctgtaagaccacctgtcaatattttttatttcaagtgcaatgattttcaagtcgttgggtttacaacatccctccctactgccattgaggttgaagggacaacaaggatggtggaagagcaaacggctatgcagatcttgttggtctataggcaaatgaggttaatatcttccagaaaggcgacacttggtaccctggttgaaccacttagattaacgagataa

SEQ ID NO: 29680 - DNA, 2271 bp, Zea mays
  Peptide Sequence Number=SeqID_73055
atggagcaagatcagagcgtggttgtcggcagcgcggactctggtgctgcggcttttggttttgcgactggcaacccccctagcttggctgtgaccggcggaagcgccgtggcccccgacggtggagctcaggcagctgatgcctctgcgtaccaggccgagcacacggcgttgaatgggactgtcggcgatatgggtaattacccatctacaggagctgcagagaacggcgaagccgtccccaacgagacgggcgagccggttcctgagctatcgtacgaagaagccgtgctttcagcagaagaggctaggttatggagtgttgttaccgcgaattccttagattttaatgcctggaccgcacttattgaggaaacagagaaaaatgctgagataatgtttgcttgtaattataagctatttgtcaatctgcaattgtttgcccatggctttgatttggggcatattgtaatgaacaatattttgaagatacggaaagtgtatgattcgtttcttgcggaattccctctttgctttgggtattggaagaaatatgctgaccatgaagcgagacttgatggtgtgagtaaagttatagaggtgtatgaacgagcagttctcgcagttacttattcagtggacatttggtataactattgtcagtttgcaatttcaacatatgatgattcagatatcatacgaagactgtttgaacgtggcttggcatatgttggaacagattatcattccaatattttgtgggatgagtatattaagtatgaagagtcactggaggcttggagtcatctagctgatatatatacaagagtattggagcatcccatccagcagcttgatcggtattttaattgcctcaaggaattggcttcgaagcacagtttatcagaaatacttactgcagaagaagcctcgttgtatgttgtcacatctgagaccactgctcaagcgcctgatggtgaggcacatcctgatgatgttgataagcttggtcaaccagaaatttcgtcttcaacagacgcagaaagccttgcaaagtatgtctccatgagggaagagatgtacaggaaggctaaagagtatgaatctaagatcattggttttgagctagctattagaaggccatattttcatgtcaagcctcttgacaatccagagcttgaaaattggcataactaccttgactacatcgagaaggaagaagacattaataaggttataaaattttattcagaattctggatccgctatgtgcaatgtatggaggataaaaggagtctagacctagcaaacaatgccctggctcgtgctactcatgtgtttgtcaagaagcagccggagatccatctgtttagtgcgcgctttaaggagcttaatggcgatatttttggagcacgtgcagaatatcagcatctgtattcagatttatgccctggctttctagaggccattgtgaagcattctaatatggaacaccgactgggagataaagaattgtcctgttcagtttatgaaaaggtcatcgctgctgagaagggaaaggaacagagccagctcttaccaacattgcttattcagtactcccgtttcttatttttggccatcagagacttggagaaggcaagggagatattaactgtgctgcatgagcagttaaatttaacaaaaccagtgcttgaggctgtcatccatctagagtcgatttttccatgcgaaaagcgtattgaatttttagactcacttgtggagaagtttgttacacctgaatcatctcagggagagttggcaagtctagttgacaaagaagaaatatcttccatatttttagagtttttggatctctttggtgatgcaaagtcaatcaggaaggcttcaactcggcatacaactcttttttcatgtaagagaagcattctgccatcaaagaaacggaaggctgatgatgctgttgtgtcagacagggacaagtttgctaaaactgggtctgttcagtcagccacaggaactgatccaaatgcttccaatcctcctgtttggcctgcgacttctgaaacatctggacatcaatggggagcttcttatgctcagcaggctgcatatcctgcatatggaacttatgactacagccatcaaatgccacagcctgctcctcaaacagctgcctatggcgcttatcctccaacatactctgttcagcacaactccaattgttcaggtgacagaaaacgagattccactcagttgactgtgtga

SEQ ID NO: 29681 - DNA, 840 bp, Zea mays
  Peptide Sequence Number=SeqID_73056
atgagcaagaacacaagagacacaagatttatcccgaggttcggtcacaccaccaaggtgccctacttcctcgttgaggcgcccacaaagagccgggtctttttcaaccctaatcctccctttgccgaccacaaaggtcaagcccacacactaatctttgctcaaatgagcagccctgggttgggcgaggtggaggctcctccgaggtcgaggtcgagtctgtcttccaaggccgaggtcgagtccgagcccctgggtcgggcgaggcggagaccgtcggctgaggccagggctgagtctgagccctggggtcgggcgaagcggggttcgtcgtcttccggggctgagcccgagtccgagccctggggtcgggcgaagcggagttcgtcgtcttccggggctgagcccgagtccgagccctggggtcgggtgatgcggagttcgtcgtcttccggggctgagcccgagtccgagccctggggtcgggcgaagcggagttcgtcgtcttccggggctgagcccgagtccgagccctggggtcgggcgaagcggagttcgtcgtcttccggggctgagcccgagtccgagccctggggtcgggcgaagcggagttcatcgtctttcggggctgagcccgagtctgagccctggggtcgggcgaagcggagtttcctatggcgcctgaggccggacttggctgctgtcagcctcactctgtcgagtggcacagcagtcggagcggcgcaggcggcgctgtcctcttgtcaggccggtcagtggagcggcgaagtgactacggtcacttcggctctgtcgactgaagggcgcgcgtcaggataa

SEQ ID NO: 29682 - DNA, 378 bp, Zea mays
  Peptide Sequence Number=SeqID_73057
atgaacaagacaccggcactcaaggtgtcattacaaacagaattccggttccacctctgtaggtacgaacaaccccacacgattggggggcctgcggagcaacagaaggccgacgggtggctcgccgccgcccgctccaacaacgacgacgacgacttctgctccaaggggccgaacagcagcagcgatgacctcagggcggatgctgctgccatagggccctcgtccacttcctcactcgagaggcaaggacgagcagaaggccgtagagttggaggtaccaacttccacgaagttgcgttcctccaacgacaaggcggaaggattgcgagtgttccccatccaggggctcggaaggtggaaagacgcgatgcataa

SEQ ID NO: 29683 - DNA, 468 bp, Zea mays
  Peptide Sequence Number=SeqID_73058
atgcggtcgctttgcttcatcagcgcgcctgccctcacactcgtgtcatcaaaaggacaaggggtcgcatgtgcaattacgattctgatgctgtcgcatgtttcgattgggaaggagagcctcaaggtgagggatcacatctactcctggaaggcggcgtgggtctacgcgcatcacgcatggttgatttgtttctcttcgtccagttcttggaaaaggctactcgcattgattcagcagtgggaagtgtcctgggatgacaccttagatccagcagtttcttacaaaattggtcaggttgtggatgctaaagttattcatctggactataataatagccgcatatttttgtcacttaaagatgtaaaagtgatggtggagacaacacttggcaaagaagagttgaaagaggcagttttgatgtgcactagcactaatagggcaaggtttcacaagctgagggaatga

SEQ ID NO: 29684 - DNA, 213 bp, Zea mays
  Peptide Sequence Number=SeqID_73059
atggagtcgccgaccaacagtgagtctctccgtgatgcccagatgaggttgacgtcgaggttccaccttaccacccaagaaagagaatacaagcgtgacgcaaaagtggatgccaagtcagcgtggacagtacggggatactgttcacctatttataggcacgggtcgcagcccatgcaaaattacattaatgccctttacatttatcaataa

SEQ ID NO: 29685 - DNA, 243 bp, Zea mays
  Peptide Sequence Number=SeqID_73060
atggaggttgcagatggcgtgaagactgccgactggcgtggaggtcatggtttgttggcggaggcagttcgttgtgagagccaatcggcgcgaacgcgagaagcgggagcctggctggggcatgtcgtgcagagggtgcgggaggcgacacgggtgttggcgagcgtgtgcgggcctaggggtggagtcatggtctgcttgtgtacggtagaggctatcgagctaccgggtgtactgaactga

SEQ ID NO: 29686 - DNA, 147 bp, Zea mays
  Peptide Sequence Number=SeqID_73061
atgccattcgtaaatgcactggttgcactgtacctttaccctttcttgaacactgtctacaaaacaagagagtatgagttcttgaggcttaccagcctgggtgtgatcggtgctcttgtgaaggttcctgatactgtgtatttgtaa

SEQ ID NO: 29687 - DNA, 666 bp, Zea mays
  Peptide Sequence Number=SeqID_73062
atgtcaaatgatccaaaatttcttgttgacaacattgtgtccaatacctatatactatgctttttgaatttggaaacatttttacccatacttttctactgcagggaacctcttgttacaaatatcatgtggagaaacttgtttgttcaggccctttaccaagtagcaattcttctgattttcgattttgatggagtaaggattctgcgtctgcagaatgaaagccgatctgatgctgagaagatcttcaatgagttcaatgcacgaaaacccgaggaaaagaatgtcttcaaaggggtcacgaagaatcacctgttcatgggaataatcggtataacgacagtatttcagatactgataattcagttcctggggaagttcttcaaaatagtgaggcttggttggagactatggttggtttcagttgctatcggccttgacgaggtcctttataccatcgtccctgctagcgagacaggaggtcccagtggagcggctaaagccgagggtcgaggcacaggagagagggaactaggctctcaagtaaaagtacccgatcggactaaacccgcaagagaaggtgaagctggagaaggagcacatgtggctgttcatggacgacagcatcaaggacctcgccaaaaggggttgaagctggaggagtag

SEQ ID NO: 29688 - DNA, 240 bp, Zea mays
  Peptide Sequence Number=SeqID_73063
atggcgaacctcacaagccaatgtgacgttcgccgttcccgaacgggtgacgcatacggttcgctacggcgtggaagtagggagacagggaggctcaccgcggggaacgagggcggcgtggatggacggcgggcgcgcgcgatggagcttggtgatcgtcgcgatggcggcgtggacggacagcgggcgcgcgcgacggagctcggtgatcgtgcgacggagctcgccgagcttgcgtga

SEQ ID NO: 29689 - DNA, 1494 bp, Zea mays
  Peptide Sequence Number=SeqID_73064
atggcgaagcatgggcggttgatgggggtcacgggggtggggcgaattttgtttgcgggggcctatggcggccagtccgcggcatggtggcgggtgcccgcggcggtgatgccgccggcccctcacagggaggttcgggacccgtcgggggccctgtctgtactcacggaggtcctggaccctgcccggaggttcgggccgtgtatccaggggtctggcactttcccgtgggggtccgggcccactgttgacaccatggagtatattgtctttcctggccacgtggtggccctggagccgtccacatggtggggtcatgtgttgttcgccacgcgactaaagatagtcgcatggacaccgaaccttcatactgtagtaacggccccccgtgtcagagactgggctgttggtttcggtggaggtgaagaggcgcactaccgcagacggtggcgtgctcctcacgtggcggttcgccttctccgcacacggaggccgacgcccaaggagtatgactcgtgggcccgggcccccatgtcagaggctgggtcgttgctttcggcggagatgaagaggcgcattaccgcatgcggtggcgtgttcctcacgcggcggttcgccttctctgcacacagaggccgacacccaaggagtatgactcgtgggcccgggccccgtgctagaggttgggccgctgtttttggcggagatgaagaggcgcattacctcaggcggtggcgtgctcctcatgcggcggttcgccttctccgcacacggaggccgacgcccaaggagtatgactcgtgggcccgggcccccatgccagaggttgggccgctgctttcggcggagatgaagacgcgcattaccacaggcagtggtgtactcctcacgcagcggttcgccttctccgcacatggaggccgacgcccaaggaccgtcatggccttactagaccctcccgagcgcctccagcccgaggtggcactcaacttggtgcgcaacccgctcgaatggggtgtgccggcgttcgccggaaggatctgtgccggcgcctttcctcacggtgatctcaccgccggagagttcgtgctcttcgtctccaacctccctagcgggctggcgctgctgatttcgtctttcttcgtgctgctgctagaggagcttggtctccaacctcagcacttcacgccctgcttcatccttcaggcagccatcatcgcctacctctgcaaggtgtccatgggggcgacgcttcttcccgcttcttcctccagcattcggaggaaaggattgccgcctccaacggtgaccgctggcccgactattgaagacgccacccaggaggtcgtacaagatgtcgcggagatggcggccgcgcgcttccagcgcgaccctactgatgccgagctcgacgtgtcgaggctggataccagcatacctaaaagagttggcaacagcccccaggaggcagcctcgactgggacctggacctaa

SEQ ID NO: 29690 - DNA, 381 bp, Zea mays
  Peptide Sequence Number=SeqID_73065
atggcactcgaccccataggccggggctacccaaatgggtggctcaggtgtcgctactcagggcagcagcaaggaaaagaagaaaaagaacccgagggtggcctcaggcgaggcgtaactgcatctcccgtccgagtgggatgcacgaaggttcttcgaaggctaagcactacaaagttatggccccttggaaaaggctctttatgcaaggcccccaacacatggatctttgagacctgggatcacctgaaagataacatccttcctgaagatcatgtatccgctgagcacatagtgtcattgtctaagcgatacaccgtggtagagggggacttctaccgctgtggcgccaatgtcattttcatgcggtgcattacctag

SEQ ID NO: 29691 - DNA, 138 bp, Zea mays
  Peptide Sequence Number=SeqID_73066
atgagcgtcgtcggtgtgatggcggcgagcagcggcgaacagtggcacagagagcttggtgcggctgggctgggcacgacgagagcaggggagggcttcgcgcggccgaggacggtggagctcaggattttcatttaa

SEQ ID NO: 29692 - DNA, 441 bp, Zea mays
  Peptide Sequence Number=SeqID_73067
atggcagctgcggcgccggccgcgggcaagggaaaacgaaagcgccacctctccgaggacgacgtctgcctcctccaaaggtacaatccggggacgatcctgacggcgctgcaggaggtggcgcagcatgcggagggccggatcatcgactggagggcggtggtggcgaagtcggccacggggatcacctccgcccgcgagtaccagatgctctggcgctacttagcatatcaccacgacctaaacgagagcatcgaagccggtgacctgcctctgggcgatgacagtgacctggaattggagcttgaacccaatcccagcgagaccaaggaagctttatctgaggcctctgcattggccaaggtatcacttcatgtctggaaaccatactgtaggatggtcattccgattttagaacgtatgataccaaatcctgtttag

SEQ ID NO: 29693 - DNA, 480 bp, Zea mays
  Peptide Sequence Number=SeqID_73068
atgggcaagaacaacaagcgcaagcgtgagccaactcctccatcggaggagtttggtgactcggagtactcagaggaggagttctcctctgagtccgaggggtctccggctcccatccccctgcgcgagtcgtctgacgactcagacgactcccaagggcttgcggcggaggtctggacgtacatccgggccgtcgagcgctccgggctcgagggctcggatgagtcggagtactcctcggatgaggactcgaacggcggcggcgaggacgaggacgacaacgacgatgacgacgacgaggacggcggtgagggtgacggtgacggcagcggcaggggcggcggcgacggcagcaaggacgacgacggcagcgggggggcagcaaccggggtggcagcagcaggggcagcaccaggggtggcagcggcggcagcagcaacagggccagtggctagatgccactggtcttttagatattag

SEQ ID NO: 29694 - DNA, 657 bp, Zea mays
  Peptide Sequence Number=SeqID_73069
atgacggacatgtggttacctgcgaaaggcaactggctgttggggtcaattggaggaatcaccacagcagacgagctcgagaacaccggtgcaccacctcatcactcggccatcatcctcaaagtggctcgcgcggcctgctatcactcggcattgcctccaagacgccgatttcgtgttcagtcgctcggcattacctctaaaatgccgacgtcaccctcctatcactcggcattgcctccaagacgccgatttcgtgttcagtcgctcggcattacctctaaaatgccgacgtcaccctcctatcactcggcattgcctccaagacgccgatttcgtgttcagtcgctcggcattacctctaaaatgccgacgtcgccctcctatcactcggcattgcctccaagacgccgatttcgtgctcagtcgctcggcattacctctaaaatgccgacgtcgccctcctatcactcgacattgcctccaagacaccgatttcgtgttcagtcgctcggcattacctctaaaatgccgacgtcgccctccagtcagtcggcgctgcctccaaaacgccgatttcgtgttcagttgctcggcgttgcctctaaaacgccgatgtcgccctccagtcgttcggcgttgcctctaaaaagctga

SEQ ID NO: 29695 - DNA, 1023 bp, Zea mays
  Peptide Sequence Number=SeqID_73070
atgggggatgcccgcagtacttccgccttgtcgttgggggaacgcaactccgtgggagttggtacctttcagccatcgttcggcttcaaggattttcatcagtcagccccggctgcatcccctcgccggtggtcacccgagacggtgaccaccagctcctgggtggggagaagcaagtcgggctgcgatcttggtcccaccctcagcttcaaggatgttcatcatcctcgctggggtggaggccggactgagccggagctctacctcccgcgcggtttcgtgggtcagcctctccttcatcgttcgagggagagggcgctcactggccctgcgagaggggcggacttcgacaacgcggggctggccgactgcgggcgtcgtccgcctcggcgcgttggactcgtcggcttggctcccggtgccccctcctgccgcgaaggtggttgtcgcgtcgtgcgcacgggaggaccgcccaagatgtcgcgcgctgccagggcggcgttcgtgttctggggcggtcctgcctttgcaccggctcccccccgtcgagtggggttgttcgtacctgttggttgtctgaaccgcttcaccaagcgtgagttgccccgtgtaaaggtgacgagtgagccgaggccaggggtagcggtgttagcacgaacagaggcagagttggctcgaaaagaagacctggtcggccggagcctggccgggtcgtccgttagcgggaccgacgccggagttgatcttccgaggcctcgggccgggctgatgtcttcgggggacagctggccgaggcctcggggtgaccagccgagtcgcctgctcgggccggattctcggagaagaccctggcggcgatggcccggacgtggtgatgacatcgtccttcagagtggagatcctcggaccgcgtcgccgtccgaggccaggtcggacctcgccgaaggtgtagttgacgccgagggtgctgctgctcccttcaaccgtcaagatccgagcctgcgggatcggatcatcttgtag

SEQ ID NO: 29696 - DNA, 210 bp, Zea mays
  Peptide Sequence Number=SeqID_73071
atggccctgtgtcaggcaggccacgccggacaccgcgcgccacgcgggggcgctacggccgcgccagccgagctccaggccgcgggccgcgagcacggggaggagggacgggcgagccgggggtcgccgcgggcaggcgcaggcgagcgccctagccgcgagtcgaggggaaggagggccacgctggggcggggcacggccgcgcgctaa

SEQ ID NO: 29697 - DNA, 615 bp, Zea mays
  Peptide Sequence Number=SeqID_73072
atgggggatatccgccgtctttccgcctcgtcattggaggaacgcaactccgtgggagttggtacctttcagccatcgttcggcttcaaggattttcatcagccagcccggttgtaccccccccccccccgccggcggtcacccaagacggtgaccaccagcccctgggtggggagaagcaagccgggctgcgatcttggtcccaccctcagcttcaaggatgttcatcatcctcgcaggggtggaggccaggctgagccggagctctacctcccgcgcgggttcgtgggtcaccctctcctgcggcgttcgagggagagggcgctcgccggccctgcgggcgggtcggacttcgacaacgcggggccggtcgacggcaggcgtcgtctgccccagcgcgtcgggctcgtcggcttggcccccagtgccccctcctgccggaaggcggctgccgcaccgtgtgcatgggaggaccgcccaagatgtcacgcgctgctagggcggcgttcgtgttctggggcggtcctgcctttgcaccggtacggtgcctcctgtagggaggtcggtgccctgctcgtccggggggatccgagtggggatctgccggcgggctga

SEQ ID NO: 29698 - DNA, 624 bp, Zea mays
  Peptide Sequence Number=SeqID_73073
atggccggatcgagtagccccggccggggccctctacctctcaggcccacaccacccctttcgtctacagcgttgggaattgagaaaacggaccctaggattgagctgacgcggtttgacagcggcgcggctcccggcgtcacggccccagacggccagacctggcctgcggcccacatactggtgatcagcgacgagcggcaaccagaggagcgcgagacgccaatacctgcgcatggagcggcggatgggcaagttcttgcgcagcagacaactgatcaagccaaggacggaggcaagaagagcttcgaggtaccaagtgcacgagagaaggtcaaggaggctgaggaacccaaagccaagggtgaagaagaaggcttgcaaagtcaaggccaaggcagctcagtctggcacaccggactgtccggtggtgcaccggacagtgtccggtgcgccaggctgaactctggcgaactggccgctctcgggaattcaccggcggcgtacggctataattcaccggactgtccggtgtgcaccggactgtccggtgagccaacggtcggccgggccaacggtcggccacgcgatctgcgcgggacacgtggccgaaccaacggctag

SEQ ID NO: 29699 - DNA, 750 bp, Zea mays
  Peptide Sequence Number=SeqID_73074
atgtggccgtcctgggtcaagacgcgcagctctgacgactccgccgtcggcgccgccgcctccacctccaccgccgtcggcgcgtgccctcgcctctccatccccaacccgtgtctcaaggacctccggtccctgctttcgccggactcctccgcctccccggcgccgcgcgtcttccaccgcctccgcgtcgccgcctcggcgctccgggtcctccgcgcgatccagcatcccgcgtcccagtcccccgccggcggcaaggagccagcaccgggcgcctgcggcggcgggcgggtggtgctgtacttcacctccctccgcgtggtccgcggcacctacgaggactgccgcgcggtgcgcgccattctgcgcgggctccgcgccgccgtcgacgagcgcgacctggccatggacccgggctacctgccggagctggcctcgctcctgccccacgcgccgcgcggccgcgtggcgctgccccaggtcttcgtgggcggccgccacgtcggcggcgccgaggaggtgcggcgcctccacgaggccggcgagctccggcgcatcgtcgcccccgcgtcgtccggcggcagctgcgcccgctgcggcgcccagcgctacgtgctctgcgccgcctgccacggcagccacaagcggtacagcctcaagggcggcggcgggttccggtcctgcgccgagtgcaacgagaacgggctcgtccgctgtcccgcctgctgcgtcgtccccgcctcctga

SEQ ID NO: 29700 - DNA, 366 bp, Zea mays
  Peptide Sequence Number=SeqID_73075
atggactcgcccaagggcaacccccaggcgggagacgtagtcacgactcgtccgtggccatcctcaggtgggacatatagtcacaacttgcctgaggccatccgcggggcgggacatgcagtaatgactcacccgaggccatccgcgagtgggatatacagtcacgactggcccaaggctaacctccggcaagacagtcatatctgtccgcgctgctctgtcgtcccgatttccggcgccttctcaggtcaggtcctcctgccggtgcaaagaagatatcgatggaagggagatgaaacctctacatcttcttgcgtctctactgctgacgggagggaagggagcggatctggtgatccgtggtaa

SEQ ID NO: 29701 - DNA, 420 bp, Zea mays
  Peptide Sequence Number=SeqID_73076
atgggcaagaacaacaagcgcaagcgtgaaccgactcctccatcggaggagtttggtgactcggaatactcggaggaggagttctcctccgagcccgaggggtctccggctcccgtctctcccccggcgtcgtctgatgactcggacgactcccaggggatagccgcggaggtctggacatacatccgagccgtcgagcgcgccgggctcgaaggctcggatgagtcggagtgctcctcggatgaggaggactcggacggcggcgacgagggtgaagacgacgacgacgacgacgacgacgacggcggcgacgacagtggcaggggcggcggcgacggcggcagggacagcaccaagggcgacagcagcaggggcagcaccatgggcggcggcggcggcaggggcagggccagtggctag

SEQ ID NO: 29702 - DNA, 609 bp, Zea mays
  Peptide Sequence Number=SeqID_73077
atgccgacgccgaccttcaatcactcggcgctgcctctaaaacgccgaccacgtgctcaatcgctcggcattacttctaaaatgccgacgccgaccttcaatcactcggcgctgcctctaaaacgccgaccacgtgctcaatcgctcggcattacttctaaaatgccaacgccgaccttcaatcactcggcgctgcctctaaaacgccgaccacgtgctcaatcgctcggcattacttctaaaatgccgacgccgaccttcaattactcggcgctgcctctaaaacgccgaccacgtgctcaatcgctcggcattacttctaaaatgccgacgccgaccttcaatcactcggtgttgcctctaaaacgccaaccacgtgctcaatcgcttggcattacttccaaaatgccgacgccgaccttctatcattcggcattgcctctaaaacgttggtcttatgttcgattgctcagtgttgcttctaaaacgctgatgtcaatcttcacatcgctcggcgttgttactactatatcaaaagaatcagttcaacattcagcaaaaacaatgacaagtcatcaaaaagaggagataaacgatagacttcattaa

SEQ ID NO: 29703 - DNA, 156 bp, Zea mays
  Peptide Sequence Number=SeqID_73078
atgttggacgaagccgcgggatgggacgacttcgtcatgggccttcgtccagcgacgcgtggggacgaaggcgaggctggtgaaggcatcgagcgaaagggtgggcgtcttcgccttcgccccaacatttgccctccgagggaccagttcgactaa

SEQ ID NO: 29704 - DNA, 222 bp, Zea mays
  Peptide Sequence Number=SeqID_73079
atgccccgtgcccccgtggccctgcgtccgtgccccggcagcccctgcgcgtgccccgataacgaacagttggtggagtccgaaggagttgcaggtggtgatgaggatgatggttatgattatgcttatggtactggttgtccgcgttgcaaccactgctcaggtgaagatgaagtcgtggaggaggacttccaggagtttcaagagtacgatgagttctag

SEQ ID NO: 29705 - DNA, 930 bp, Zea mays
  Peptide Sequence Number=SeqID_73080
atgacgaaggtgatgcttgccgaaggtgttcaagactcagaaaatggaagtgagttcaccggagaaacattgttaaatcatgtttttgaggaccttcggaagccgaaggcccccatcaattctaattcctcatttatttatggtctacttgctggtcataatagttctgttctcactcttatgcttacggactcctccttctcacttcagcaggagatagagtctgtgaggagctgctcccctgtgctcccgctggaggcgccccctgcaccaccactgagcgccccagccgctggaggagacccagacgacggaggcggcgacagcagcttgagccacatcaccaacctttcagctgaccaggagccggaaggatgggttgctcgacccatcactcgcgacgctactcgcggtcgcggggtttacccggaccgcttggaggcgacctgcttggtgcaccgtctggagaacagtctccagggtgtggaggtctgctcagagcactattccatctctgagcgggactcagctgaggcggccatgcaagatgtcgcacgacgtgcgctttcacactactgctcagtgctcggtggggtagctgatggtctcaacctgaagtattacccccgtcgtccatctggcagcacaagaggcatgattgtctcacctgttggtgaggacaatcctaggttgagcagcacagacaacctagccgtcgtgctaaacacggagctggaccatgcattagacgagctgagtagggctcgtgctgagattgcccagctgtgggctgagcgtgcggagcatcgtcacctagaggatggctccctcgctcccgtcgggactcagcacccgtaccgctcacctcggcgtggacaccatgcttatggcgaccccgactgcaggaccaagataaatttagaaccatag

SEQ ID NO: 29706 - DNA, 924 bp, Zea mays
  Peptide Sequence Number=SeqID_73081
atggagagtcatgatctccgggcagaaagggaatcacgacttgtgggtggcaacgagaatgatggtttggcattgactatggtaatgatggctcatcttagacacactgcacggaagtccatcatccccttcttgccctcttgtctcgctgagcgtccgcttcgccgtcaagtgactggtcagtctagccacttggagaggctgcaccaccgcctgcgtgaggagcaggagcgtcgacgacaggagcaggagcagcagggctcttctttctcgctccagcaggagatagagtctgtgaggagctgctcccctatgctcccgttggaggcgccccctgcacaaccactgagcaccccagccgctggagtagctgcgggaggagacccagacgatggaggtggcgacagtaggtcgagccacgacaccgacctttccgccgaccaggagccagaaaggatgggttgctcgtcccatcacttcgcgacgctgctcgcgggtgtcactttcacgatgcgctcgacaccctgctacatcgggcacttgaccaaccacagtcatggggtctacccggaccgctgggaggcgacctgcttggtgcaccgtccggagaatagtctccggggtgtggagatctgctcagagcactattccatctctgagcgggactcagccgaggcagccatgcaagatgccacacagcgtgcgctttcgcactactgctcagttctcggcggggtagccgatggtcttaacctgaagtactacccccgtcgtccatctggcagcacaggaggcgtgattgtctcacctgttggtgaggacaattctaggttgagcagcacagtcaacctagccgtcgtgctaaacacagagctggaccatgcattagacgagctgagtagggctcgtgctgagatcgcctag

SEQ ID NO: 29707 - DNA, 261 bp, Zea mays
  Peptide Sequence Number=SeqID_73082
atggagacggcgaccaaagtgatggcttcaggcctccttttgctgctcctcgtcaacgtcggctttgccgtacctgtccatggttcggaggacgacgacgactgttgggtagaagaccgcgtggactacgtcgtctgcgtgaggacgggccggtgccggagcatctgccgcgagcacagctacgtggacgggcgctgccagtgggggttccccaacctgctgccctactgcgagtgtctgcgctccaactgcacttcttag

SEQ ID NO: 29708 - DNA, 441 bp, Zea mays
  Peptide Sequence Number=SeqID_73083
atgggtaagaacaacaagcgcaagcgtgagccaactcctccatcggaggattttggtgactcggagtactcagaggaggagttctcctctaagtctgaggggtctccggctcccatccccctgcgtgagtcgtctgacgactcagacgactcccaagggctcgcggcggaggtctggacgtacatccgggccgtcgagcgctccgggctcgagggctcggatgagtcggagtactcctcggatgaggaggactcgtccgaggaggacggtggcggcgacgacgaggacgacgacgacgacgacgaaggcggtggcggcggtgatggtgacgacagcggcaggggcggcaacagcggcagcaaggacgacgacggcggcgacagcaggggcggcagcgacggtggcggcagcagcaggggcagcaacagggccagtggctag

SEQ ID NO: 29709 - DNA, 732 bp, Zea mays
  Peptide Sequence Number=SeqID_73084
atgaacgaaaatggaaacttgcaggatagaattgggattcagatgggtcaagttaagatggtagaaatcaaggaggccgcggaaaaagggagaaatgggaagaccgaggccgcggagaaggaaaggagcgtaaatcacggactcatgggtatcctcagtcggcacagtaaccccatggcaaatccgccaagaacagagttccctcgggggaagaaccccgatggacacaaggtggagaagttcgggctcggagatgacagacatgtggttacctgcgaaaggcaactggctgttggggtcgattggaggaatcacgcggcagacgaactcgaggctttcctcttgggcgccatctcgattctaccagcgagcagagtgggaggcgaattgcagagaggattcggaagcgaggaagcaagaactagggcacggaaagcagagacggctaaaagcgcagcacttatgggatattcccgagctagatatcgtttcaaaaagcgcccagtcagcacctggcgtcgcttggcagttacctctaaaactccgacatcgtctacaagttactcggcagctatctccaaaaacgtcgaaacgatgctagagttatttacttactattccaaggaaatcaacttcacgaaaaaaggtgggaagaggaatgactcaagaactctgagttatgaataccaacgagcaaccatcacagagaagccaacatcatttcttcattaa

SEQ ID NO: 29710 - DNA, 2203 bp, Zea mays
  Peptide Sequence Number=SeqID_73085
atgggcgggcaagagcgcgcgctcggatctcgaaagttgaagggagcagcagcaccctcggcgtcgactacaccttcggcgaggcggctcggctggtcaccccgaggcctcggccagctgtcccccaaagacatcagcccggcccgaggcctcggcagatcaactccggcgtcggtcccgctaacggacgacccggccaggctccggccgaccaagtcttcttttcgagccaactctgcctctgtccgtgctgacaccgctaccccgggcttcggctcatcgaagagcggccgaggggttcctttaactaagcaagagaagcctcaaacagcaaggccgaccgagccgagggatttcctacgcccccgggatacggatacctcactcgtcacctttgcacggggcgactcacgcttggtgaagcgcaatgataacgacccccgctccgggtggccgaactgcagcagcgatggcctcagggtggacgctgctgcaaccttgccctcgcctacgccgacgctcgaggggcgaggacaagggccgtcagccctccggcagatccccactcagatcctcccggacgagtggggcaccgacccccgcgtggaggcaccgtaccggtgcaaaggcaggaccgccccagaacacgaacgccgccctggcagcgcgcgacatctagggcggtcctcccgtgcgcacggcgcgacaaccgccttcgcggcaggagggggcaccgggagccaagccggcgagcccaacgcgttgaggctgacgacgcccaccgtcgaccagccccgtgttgtcgaagtccgcccctctcgcagggccagtgagcgccctctccttcgaacgctgaaggggaggctgacgcacgaaaccgcgcgggaggtagagctccggctcagcccagcctccaccccagcgaggatgatgaacatccttgaagctgagggtgggaccaagatcgcagcctggcttgcttctccccacccaggggatggtggtcaccgtctcgggagaccaccgccgtcgtgggctgagtcttctccaacacgctccaaggtcctccccctacggcgcgggggctgggtcccacacgtcatgcaagctggcccagggcagaagaagctagaccgccgcgcgcggtgcatgcaaccgcccagcggttacgagcattcctccgctttcgcccagaccggcgggcgaaagggcgggcagccatgcaggcagcatgcaaccgcgccgagtgggcgcgcccctctgacttccaacgcatccagcatgggggcccacgcccacgcgtcatgcaaccggcgcgccggatgctacgtgcaagcaactgcaccgccactcgcaccactgccacgcctcctcgactgcggaaccagtaccgcgactcgaggcgacccagcgcacgacccagcagcgccagcctggcgcgacggtcaatacggccaaaaatgggccggcagtaatggcggtggcaggcgggcaagagcagcggtcatgtcgtcagccaagcttacgtcccatccgggagcaggaccaggaaagggggataccccgaaaaggatccttcttcgtgaaggaaacaggctccgagccaccctactgatcagaggtttgaaggctggcccctcggaggggttcaacagccgcctcagagcgcgtgggctccacacccactactggctggccctcgaagggttcacagccgcctcagacatagagcgagggatgaccctgggggaccgggtccgacagatcactcacaggtacttttgggcgcgcctctgggcctctagccgacccctaacaaatgggggcacgggcgtccactcggattacccgccagcagctcactggagacaccatgttcggcgcccaccgagggcaacatggcgctttcccccctcctccttgcggaaaggcgacgcaggggcatatgtaaaaaagtcgagtctgtccctgatcgtcctctcgccctgtgcagaggctcggggctgctctcgcaaacccggctccggccaaaccgttgacagcgtcaacataccagcccgagaacttggaacccgaccgtgcacccgggctacggccagctcgcatgagggaacgaccagaccagccgaagcattgcgcgaggcattaagacctcgggggagtcaaaccactcctccgaggcctcgggggctacacccggcgg

SEQ ID NO: 29711 - DNA, 387 bp, Zea mays
  Peptide Sequence Number=SeqID_73086
atggtgacctccggcttgatggtgggggaaagcgagccgggctgcggcctctgcccctccctcagcctcaaggattttcatcaccagggctggggaggggagtgcgccgagttgagcagcatccgccctgaggtcagtgctgccgctgttcgacccccggagcagaagtcgtcgtcgtcgccgctgctggggcaggtgacggcgcgccattcgtcggccttccgttgctccacaggccttcccccctcggagtggggttgttcgtacctggttggccggagcctagccgtgtcgtccgtcagcggagccgacgccaaagtcgatcagccgaggcctcgggtcgggctggcgcccttggaggccggttggccgaggccccaggggtaa

SEQ ID NO: 29712 - DNA, 981 bp, Zea mays
  Peptide Sequence Number=SeqID_73087
atgacgccgccgccgccggatcagcagcagctccagcagatgatctcgttcggaagcagccagcagccgcgccaagagttcgtggcggcggcggcggcgactcctctgttcccgccgcagctcgtggcgccggaggtgcagcagcaaatgctgctgcgctactggagcgaggcgctgaacctgagcccccgcgggttccgcggcggggccgtgccactgccgccggcgcggctgtaccagcagctgctgctgcgcgcgtcgtcggggccgcccaagctctaccgcggcgtgcggcagcgccactgggggaagtgggtggcggagatccgcctcccgcggaaccgcacgcgcctgtggctcggcaccttcgacacggccgaggacgcggccatggcgtacgaccgcgaggcattcaagctccgcggcgacaacgccaggctcaacttccccgacctgttcctcggcaagggccgcgtcggcgggagcggacgcaccagcgcggcggcctcgtgctcctcgtctgctccgccgacgccggacgacagccacatgaagcaagctgctcagcagcagcagcgtgtgcgtgacggtgagcagccgtgcagcggcgaagcgaagcctctgctcccggaaacggaaacagagcgggcagacaactcggaacccaaaccgaatcctgagctccagtcggccgatcaccaaggcgacggcaccacggccatgtttcagccttcgggcggcgtgtggggtccggccgacgaggcgtggttcagcgcctggggccctggcagctccgtgtgggactacgacatggacaacgcccacggcctcttcctccagtctcgcttcgccagtgaggcgaccagcatggactacgtgcccagcacgccggaagtcccggcagtagggaccgccgtggcctccctttctcctcctcctcctcctccccgcagtccaacctacatgaaggagaaggactga

SEQ ID NO: 29713 - DNA, 390 bp, Zea mays
  Peptide Sequence Number=SeqID_73088
atgggcttcactccgataccagctgtgacggaacctcccaagtcattaggcccacctacagttgtccttgtccaacggacctcagacaaccctgttggtgcacctgatcacttgacaagctcggtatctgaatcccttaccttcccaagagcgttttacccatcacgcagacattacaaatcatcggagatgcggaagtgcggaagcatttacaataacttacttttattgaaaaagattcaaaggaaggtaatcaaattcaaggaaggaaatgcaggaattgttttagcactcaactcctatcacctaatgcatcaagcaagtgagaaagatttaaaaaggaacaaggaggtggcaaatgcaccggggcttgccttgttttactggtga

SEQ ID NO: 29714 - DNA, 154 bp, Zea mays
  Peptide Sequence Number=SeqID_73089
atgggcgggggcctcctggcagcagcatccgccctgaggtcatcgctaccgctgttcggccccccggagcagaagtcgtcgtcgtcgccgctgccggagcgggcgacggcgcgcctgtcggcgtttcaagacaggggggtccctaagccgacga

SEQ ID NO: 29715 - DNA, 1641 bp, Zea mays
  Peptide Sequence Number=SeqID_73090
atgaaaatccttgaagccgaacgatggctgaaaggtaccaactcccacagagttgcgttccccccaacgacaaggcggaaagattgcgggtatcccccatccgggggcttggaaggtggaaaggcacgatgcataagggagcgcgaagacatggtcgcctttcaagggggtcaccctccttttaaaggcgactctccctacttgcgtccccaaccgtcgggggctgagtcttctccgacacgctccaaggtcctccccctacggcgcgggggctgggtcccacacgtcatgcaagccggcctagagcagaagaagccaaaccgccgcgcgcggtgcgtgcaaccgcccagcggatcacaagcggctctccacttttgcccagaccagcgggcgaaagggcgggcagccctacaggcggcctgcaaccgcgccaagtgggcgcacttctccgacttccagcacgcccagcatggaggcccaggcccacgcgtcatgcaaccggcgcgccggatgcttcatgcaagcaactgcaccgccacttacgccactaccgcgcctcctcgactgcggaaccgataccgtgactcgaggcgacccagcgcacgacccagcagcgccagcctggcgcgacggtcaatgcggccaaaaatgggccggcggagaagcgagcgacgctacgccttcgccataatgaccgcgtcaaaaaagggaccaggaaagggggataccctgaaaaggatccttccccgtgaaggaaccaggctccgagcctccctactgatcagaggttcgaaggctggcccctcggaagggttcaacagccgcctcagagcacgtgggctccaaacccactactggtcagaggttcgaaggccggcccctcggaagggttcaacgaccgcctcaggctactcgggctccgcgcccactactgatcagggcgggaacgattttgtaacggaatcccatcagagggaggcatcgagccctcggaccccgtcgacaggggaccgggtccggcagatcacccgcagctcatcggagacaccatgttcggcgcccaccgaggacaacatggcgctttcccccctcctccttgcggaaaggcgacgcaggggcaggctcgggggctgctctcgcaaacccggctccggccaaaccgttgacagcgtcaacataccagcccgagaacttgggacccgaccgtacacccgggctatggccagctcgcatgagggaacgaccagaccagccaaagcattacgcgaggcattaagacctcggaggagtcaaaccactcctccgaggcctcgggggctacacccggcgggtgcgctcgcgcgcacccaccagaacaaaacacaaccgagaaaggctggtccccttgcaaaaaagtgcgacgaaagcctccaagcgagtgctaacactcccttcgaggctcgggggctactgtcggggaccataattaggggtaccctcaaggctcctaattctcagctgagtgatgctgataggcagtcaggcccggccgcaggcgccataggaagctccgctccgcccgacccagggctcggactcgggctaagccccggaagacggcgaactccactccgcccgacccagggctcggactcgggctaa

SEQ ID NO: 29716 - DNA, 327 bp, Zea mays
  Peptide Sequence Number=SeqID_73091
atggcttgccggagagctcggcccaagcgtgcaggcgggcgaccgaagtccggcgagggtgatctcgggcttctggtgaagttctatcgggtccgagggcatggaaagcttcacaggccactggcggacctaaccgaagcgctggcgcgacttgggggtgactggagtgggctggccacagcggctgaagctctgaaagcttggcgggcggtggtgcggcgtgatcggggcgatttccggacgtgttcaagggaatttggcataactttgatatttggatctcctggttttgagtttcgaaaaacagagaacgtagttgatctttga

SEQ ID NO: 29717 - DNA, 708 bp, Zea mays
  Peptide Sequence Number=SeqID_73092
atggaggccaacgaggacgtcgacatcgagggaggagaggagcctgccactagtgtggacactgctggctcagggagaccaccttcccccgagtcgagtgttgcctccgtcagccaccacctcagcattatggtggtggagaccatcagcgtcaccccgcggcagctacctactaggagttcctcagtactcagcctccattgttcacaagggcagatgacccacttgatgcagatgtgtggttgcgagtggtggaatccaaattcccgctactccatggagcttgttctgaggtcactaaagtcaggttcgccacccagcagcttcgcggacccgcaagggcttggtgggaccattttcttgccatgcagccagaggatcgagaggtggaatggagggagttcaaggcagctttcaggggacaccacataccagccaggattatggactgaaagctcaacgagtttctggcactcactcagggcaacaggacaatgttgcagtatgcccaggctttttaatgacttgtgccagtatgctggatatcacgcggatacggatgagaagaagagagacaggttcatgagggggctcagcactaagctctgtgaccgtctcaacaccgtcagggccaacagttacaatgagttggtcacatggctatctcccaggaggactgcattacagctcgacaggcagaaaagatga

SEQ ID NO: 29718 - DNA, 255 bp, Zea mays
  Peptide Sequence Number=SeqID_73093
atggtgggtacaagtgcggtcactgcacgacggccagtcggggtcagtgaggcattgtacgccaaggcgctagtgcttttggcaaccaaaccccacagccaaacagctgcatgtctagaggtagaggagtatagactcctcacaccgggttctctggaggatatggttgctggagtgacttggccgtccaccttgccaccgggttggactgtcgagtgggaccctgcctcggctgaggaggagcatgaggagtga

SEQ ID NO: 29719 - DNA, 669 bp, Zea mays
  Peptide Sequence Number=SeqID_73094
atgaagcaaaccatcggcaacaagggcctccagatcgtccgccgtgatggtggagaaaggccacgggtcacgcggcgaaacaacggtcacccggtcggccaccaccaagcagaagaggtggcggcgaagcggacaagggaccgggaaaggggatacttcaaagggatccttctccgcgaaggaagcgggccccgagccctcctactgatcagaggttcgaaggctggcccctcggaagggttcgatagccgcctcagagcactcgggctccgcgccctcctactgatcagaggttcgaaggccggcccctcggaagggttcgacagccgcctcagaccactcgggctccgcgcccactactggtcagaggttcgaaggctggaaccttggaggggttcgacagccgcctcagaccactcgggctccgcgcccactactgatcaggggttcgtaggctggcccccgaagggttcgacagccgcctcagagcacgcagagcgagggatgactctgggctcgggggctgctctcgcaaacccggctccggccaaaccgttgacagcgtcaacataccagcccgagaacttggaacctgactatgcacccgggctacggccagttcgcatgagggaacaaccagaccggacaaagcatcacgaaaggcattaa

SEQ ID NO: 29720 - DNA, 276 bp, Zea mays
  Peptide Sequence Number=SeqID_73095
atgtattaccctgactgcctgcagaagtctgaacggagggagaagcaacctggggcgcagttttatagccccaaaggctcagcggccgatccggagatcgggcaggatctcaacaacccgcgcgctacttccgcggagaagaaaggaatgacagggggtctcgcggtcagcgtcacagtttcgtttcctggacgcgggtacgacgcgatagagggtaattccaacgaacgggccccacatggaagtgtcccaacagaaaaagcgaagggagagtag

SEQ ID NO: 29721 - DNA, 396 bp, Zea mays
  Peptide Sequence Number=SeqID_73096
atgcagtacaatggatcaagcagtctcattagctgcgagaagcagatgattcgaatcgagtttttttatccttgcaagatcagggctcaccgccttggtgtacaatgcctcactgaccccgactgccgtcgtgtagtgaccgcacttgtacccaccataaccggaatgggagaccacgtctcaggtcgcgtgaggggcaaagtctgcgggcaggttcactcaggtactaggcttaccgatttaccatatttctcggttatgcataaaccggggcttgccttccaaagcagtggcaggcaggtcctctggtgcaggctctggtgctggatctggggctacctcctgagcagctccttgctccggcacgaggacatactctccgtcagcaaggattaa

SEQ ID NO: 29722 - DNA, 2124 bp, Zea mays
  Peptide Sequence Number=SeqID_73097
atgaacaaaacatcggcattcaagatgccatcacaaacggaactccggtctcgtccccatgggtatggacaacctccacgccggggaagcccgtggagcgacaagctctgggtgaatcaccagcaaaccaacagttcgccttccccggcatggctggaggacgtctccgcctcagggctggagggcgattgccaccaccagaagctggaagaggaggtggtccgccggcccgcgcaggaggtagagccccggctcgcctcgctccccgcctcagcgaggatggcgaacaccctcaacactgagggcgggatcggggtcacagcccgaccggctccgagcaggagaagccaaaccgccgtgcgtgatgcgcgcaaccgcccagcggttacaagtgatcctccacctttgcccagaccaacgggcgaaagaggcgggcagccatgcaggcggcatgcaaccgcgccgactggacgcacttctccgactcccgacacgccagcatggaggcccaggcccacgcgtcgcgcaaccggcacgccagatgctgcatgcaagcaactgcctcacctgcgccaccaccgcgcctcctcgattgcggaaccaacaccgcgactcgaggcgacccagcgcgcgacccagcggcgccagcctgacgtggcggccaatgcggccaaaggagggccggcagtaatgacggtggcaggcgcacgggagcagcggtcacgtcgtcagccaagctcacgtcccatccgggggcagcgagagagccccctctcacggcgtgaagacaacgcgcctgtgatccgttcctcgaacggcccgcgcacgcgcaacggcagccccgccagctactcgccccatcgcattaactccgcggcgggacaggcggtgcttctggcaggaaaagcgggcgacgcttcgccttcgccgaaacaaccgcgccaaaaaagggaccaggaaagggggataccccgaaagggatccttccccgtgaaggaaccaggctccgagcctccttactggctggcccccgaagggttcacagtcgccccagacgccgagccagggatgaccagggacccggctccggccaaatcgttgacagcgtcaacataccagcccgagaacttgggccccgaccgtgcacccgggctacggccagttcgcatgagggaaacaaccagacttgctaaagcgttacgcaaggcattaagacctcgaaggagtgaaaccactcctccgaggcctcgggggctacacccggcgggtgcgctcgcgcgcacccaccggaacagaacgcaaccgagaaaggctggtccccttgcaaaaaagtgcgacaaaagcctccaagcgagtgctaacactcccttcgaggctcgggggctactgtcggggaccataattaggggtaccctcaagacgcctaattctcagctggtaacccccatcagcataaagctgcagaggcctgatggggctcggactcgggctaaggccccggaagacgacgaactccgctccgcccgacccagggctcggactcgggctaaggccctggaagacgacgaactccgctccgcccgacccagggctcggactcgggctaaggccccggaagacgacgaaccccgctccgcccgacccagggctaaggccccggaagacgacgaactccgctccgcccgacccagggctcggactcgggctaaggccccggaagacgacgaactccgcttcgcccgacccaggggctcggactcggcctcggccatggaagacagactcgaccccggcttcggaggagcctccacgtcgcccaacctagggcacaggccagccacgtcgacaggaagcgccatcatcaccctaccccgagccgactcgggccgcagaaaacaagaccgggcgacgtcagcaaggacacaaccgttccaacagctgtccctccgccaggctccgttgctcctccgacagccacgacatcacgccagcagggtgccaagatctctccggctgccacattggcatggccttcttagagaaggttggccgcgcggggacgaggacggggacaggcgctctcttggggccgctcgcttccctcacccgcgtggacgcttgtaa

SEQ ID NO: 29723 - DNA, 207 bp, Zea mays
  Peptide Sequence Number=SeqID_73098
atggcgtccctctcctccagccgctcccatggatggcgcccaagcccttcttccacctctggccggatctctgcccagcgccattcctttctctccatggccggcgcacaggaagccagtagccatggacgcccaggccccgacgccctgcctggcgcaggcgagcttctctcgcccctgctctcccctggccggatcggcccctag

SEQ ID NO: 29724 - DNA, 1380 bp, Zea mays
  Peptide Sequence Number=SeqID_73099
atggggagcacccgcgttgcctttgtcttgctattgttggaggagcgcgacctcgtgggggttggcgcccttcgaccatcgctcggcttcaaggattttcatcatgcagctcggctgcattccctcaccaatgcttcaaggatcttcatcatccttgctgtggcggagggcgggctgagccggggcctgcccccgcgtgggccggcgacccgcttcttcctccggcatccgggggagagggcgctcactggccttgcggagggggaaaacttcgacaacgcgggaccggtcggccgcaagcgtcgtcagctccagcgtgcctggctcgctggctcagctggctttgtcgcggcctcctgccgctgcctcctgccgctcgatccgggcgtggccgtctatccactgcatgggcaactgttgcgtcgccggtgccggtccgtccgcgaggacttgagtggggatctgccaatgcaggctagggcggccgtcgtgtgttggcgtagcgcctgcgcgcaggtggccgctgtcgtcggtgctgaggtggtggtcgccagaggaggtttctctgccgacgagaccgtcggcgccacctgcggtcggacctccggctctttggctttgatggcttgtcctcgcccctcgagtggggacgcgggcgagggccttcttacagcagcgtttaccctgaggtcatcgctgctgctgtttagccgcccgaggcggaggtcgttgtcgctgctgaaccttcggccgctctacgatgagctggagccggaggcaatggtgtcggcgtggatagaggcggagtcggctcgagaagaggcttcgtcggcccaggagcaggtggcttcccgggctgaggaggtgcagcagcggcggctgaggcttggccaggtcatccgcgagcgggaccaaccctggagtcacgctgtcgaggccgtgagccgggctgaggtcctcgggggacagctggctgaggctatggagcggccagccgaggtgtccgctcggggcgggaccctggcggagaccctggctgcaatggcccaagcacggtgctggcgtcctccttcgaggtggagatccttccgcccgtatcgccgttcgaggccgagccagattccgccgaaggtggaaatgacgccgagggtgctgctgctccctctgtcgatgtctgaacctgcaggaacagtttgtctgtacaaaatcacttatccgagcgagagttacttttcgcggaaggtgatgagtgaggatcccgctatcggagcactcgaaaagcgcgaaagacgttctggcaaaagacttttcccgaggaaaattttgacgcagagggggttccccccttctagcccccgagggagggtcgggctttgctga

SEQ ID NO: 29725 - DNA, 984 bp, Zea mays
  Peptide Sequence Number=SeqID_73100
atgggggcgcaccccttcggctttgtcgcatccagcatggaggcccaggcccacacatcatggaccgggaaaggggatattttggaagggatccttctctgcaaaggaagcgggccccgagccctcctactgatcaggggttcgaaggctggcccctcggaagggttcaacagccgcccagagcactcgggcttcaagctcattactgatcagaggttcgaaggctggcccctcggaagggttcgacagccaccccagagcactcgggctccgctcccactactgatcaggggttcgaaggctggcccctcggaagggttcgacagccgccccagagcatgcagagcgagggatgactctaggtacgtccgttacatggccgaggctcgggctacgctcccgaggagcgattttgtaacagaatctcatcagagggaggcatcgagccctcggaccctatcgaacgggtccgggtccggcaaatcacctgcagaggctgatgggcgcgattcaggtcaaggcttcgtctactcaagggacgcgatctcgcctcgcccgagcccagcctcgggcgggaacagtagtcctagacgaattcacgcctcgcccgagggcctcctcaagcaacgggaaaacagcgtcactcgccccgctcggactgctgtgccacacaccagggtgaggttgacaacagccaagttcagccctctagcgcaacaggaaactccgcctcgcccgaccttaggcctcggcctcggaaggtggtctccgcctcgcccgaccccagggctcggcctcaacctcggcctcggaaggtggtatccgcctcacccgaccccagggcttggcctcaacctcaacctcggaggaatcgcgtcctcgcccgaccccggcctcggcctcaggagaagtctccgcctcacccgaccttgggctcggaccgaccgcgccacggggatacatcattaccctaccccaagctag

SEQ ID NO: 29726 - DNA, 471 bp, Zea mays
  Peptide Sequence Number=SeqID_73101
atgacgacggtggttctcagccccctacggaagcaaggatacgtcagcaagctcccagcagcaccgacagctgtgcttctacagggctcaggcgctcctccgacggccacgttaccgcgtacacagggctctagcacctctccgacagccacgttggcatgtacacagggctcagacacctctctgccggacacgctagcgcatagctacacccccattgtacacctggaccccctccttgcatctataaaaggaagctgctggtgcgatgacatgaccatgagtagcgaggtgacgacgtcacacgagagggatgccgaggcaaactccgacgagtggtggcgtctgcggagctcccacgacgtcgtgctggcgagcttcggagggggtctgaaggcgacgtcggcgatggcatggcggctgttagaagcaaggcctgacatactagaacgttggtggcgagaggcttaa

SEQ ID NO: 29727 - DNA, 348 bp, Zea mays
  Peptide Sequence Number=SeqID_73102
atggtgtctccggtgagctgcaagcgggtaatccgagtggacgtccgtgccctgttcgttgggggtcggctaggggcccagaggcacgcccaaaagtacctgcggcaactggcgcgccggttgcttgacgcgtgggcctgggcttccaagctggcgtgtcagaagtcggagaagcgcgtccacctggcgtggttgcgtgccgcctgcatggctgcctgccccttccgcccgttggtctgggcaaaagggagggccttggagcgtgttggagaagacttagcccgcggcgtctgggggcgcacgttctcgaggaaaaaattcgacgcagagggggtctcccccttttag

SEQ ID NO: 29728 - DNA, 477 bp, Zea mays
  Peptide Sequence Number=SeqID_73103
atggcgtcagagcgattacaatccaacatgaatagtacgggggtgtttttgcttagaggaccttcggcggagaagaaggcccctaacagtaatctaaataatttagagaagaaactttcttttgctgctgatttgctatggttatctaaacatacatatcatgttattggaagatacaattggaaaggagaatatatggtttgtgttaaagctaaccatatcatgtctagttccacttgtccttctttgtatgttttacaacaacatgatcaacttcaagaaggcgagcaagcttggacgacatcaagcactacatcaacaccttttgcaggcaccaacgactttgagtcgaggatgactcaaaacaaagaaggggagaatgatgagtacatggacgtcttctatatggtcaatgcccaatcaatcatagagtcccaagctcaacgggagttcaaatccagtttattcgcgaattag

SEQ ID NO: 29729 - DNA, 1107 bp, Zea mays
  Peptide Sequence Number=SeqID_73104
atggactacaccgttgtctcaggaaacgacgctcgtcttcgtctcagatgcgaggtcgacgcccgacgtgtccctcgttggggcgccggtgccgtcgactcgctcgacagccgacgaggtgccgcctcctgcttggccatgcctgccccgtctcctccgtcggcggggaaggtgatgggacagacctggatgtcgctcttccgccgcgtggggaagatgtcatcgattccgccgccggtgggcgggctgacggccgccattgtcgttgtcgcacggcggaggaaggagtatcatgtcgtagctgccgtcgtgggacatgaactcaagactcccgaaacggagcatcgtcccgggttgaagaggttgctggagactacccatctggagcttgacgggaagctgttcgtcaacacgcagcaggcccctacctggcgcgccaactgtcggcgtttcgaccccggggggtccctggaccgacgagtaaattgtcgccgcgtgtcccagcccagatgggtcggcgcgagacggagcacgaaggggggaaaacagcaaaaggggaacccgcggcctccgtgttgtcctgcgcccagcccgaggtcgggcgaggcagtgactcctccgaggtcgaggttgagtccgagccctggggtcgggcgaggcggagaccgtcgtccgaggtcgaggctgagtccaagccctgggggtcgggcgaggcggagtccgtcttccgaggtcgaggctgagtccgagccctggggtcgggcgaggcagagtccatcttccaaggtcaaggctgagttcgagccctggggtcgggcgtggcggagtccgtcttccaaggtcaaggctgagtccgagccctggggtcgggcaaggcggagtccgtcgtccggtgtcgaggttgagcccgagccctggggtcgggcgaggcggagcttcctatggtgcccgaggctggacttagctgttgtcagcctcactctgtcgagtcgcacagcaggtggagcagcacaggcgacactattttcttgtcaggtcggtcagtggagcggcgaagtgactgcggtcactttggctctgtcgactgaggagcgtgcatcaggataa

SEQ ID NO: 29730 - DNA, 447 bp, Zea mays
  Peptide Sequence Number=SeqID_73105
atggagcagcgtcccgggctgaagaggttgctgaagactacccatctggaactcaacgggaagttgttcgtcaacacacagcaggcccctacctggcgcgccaactgtcgacatttcgaccccggggggtccctggaccgacgacctaagctagcttggggtagggtaatgatgtatccccgtggcgcggtcggtccgagcccaaggtcgagcgaggcggagacttctcctgaggccgaggccggggtcgggcgaggacgtgattcctccgaggtcgaggtagaggccgagccctggggtcgggcgaggcggagaccaccttccgaggccgaggttgaggccgagccctggggtcggacgaggcggagaccaccttccgaggccgaggttgaggccgagccctggtgtcgggcgaggcagagaccaccttccgaggccgaggcctaa

SEQ ID NO: 29731 - DNA, 261 bp, Zea mays
  Peptide Sequence Number=SeqID_73106
atggcgtctttgccgagtgtcccgtgtgacactcgacaaagaatcaatctttgccgagtgccacctgggacactcggcaaagaacccgccagggagggtccccatgtcaggttctttgccgagtgctatgtacggcactcggcaaagtgtgcctctttgccgagtgtcagagacattacactcggcaaagaacctataccagtgcccaggtcttggttctttgccgagtactatggccctgacactcgacaaaaaatttag

SEQ ID NO: 29732 - DNA, 171 bp, Zea mays
  Peptide Sequence Number=SeqID_73107
atggcgaagccgactacacctcaagttcctctaattaatcagctaagggcgtctcataccaccctcatggtgtggattatagagagggtggtcgatggcaaaggtgtaggtcatgcgagttcatgccaatggactgggagctatgaaggatgggcattgggtcttgactaa

SEQ ID NO: 29733 - DNA, 969 bp, Zea mays
  Peptide Sequence Number=SeqID_73108
atgtcaaggggtacaagaaggaacatcattcgaagccatgaggagtatttgtcagaggagcttgttgtgcaaagtagtaatcacaaaacatatgccccttatcacgttgatccaagttctgaagaagaccaattagatatggaaaataatgatgagattattgccccagcttctgattttgatcctacctctactgggcacccttgtgatatagatggtgatgctgagcctaatatcgaaggtcattttgatcccaattttaaattaaattcttatcaaactgtgggaggttcaggtgatcctttgtccgcagcaacaaatgctcacaatgcttcgaaacgaaaacgagtatatgtcgaaccacaaagtcaagagtatgagatgcatgatcgtgacacacttagttacacaatgggggagcaaactgatgatgatgggttccaagatctgcaatcaagctacaaacggaactatgccgcagagaagatgaatgcagcaaggatcagagaagggaatttattaagggctgacagagttgctactgcacataaggccaaaccaagagagttccaaatagaaaatagagttgacaacaagcgtgccaatgcatcaaagggtatgaacaaggatgcaacatctaaatgctcacaacaaataaactatcagaaagttggaggccttgagctaggcaaagaattttatatgctgtgtgttggtcttacctctgtgcctgatgagccactaatacgaccatatgacaacttccaagttatcggagacgtaggcaaaaatcctatagcatggccttcaagttgtgtatgttctttcactctacttaacaagttgcaaagagtgtcagccaatcatattgatttagccaggttggaacccatagaatgcaaggtctactggaatggtgctttcactggtcatttgaattggttcaagagaagagtcgattgcaactag

SEQ ID NO: 29734 - DNA, 153 bp, Zea mays
  Peptide Sequence Number=SeqID_73109
atggcgtcatgctcacctagcaacagtaggacggacaggatgagggaggcctcaaatccaagcacttcgggcgcaagaacgtcgaaccagacagttaggagagtggagagcaacgatgagcggcagtttgaggtcttccgggggcgaaaatga

SEQ ID NO: 29735 - DNA, 213 bp, Zea mays
  Peptide Sequence Number=SeqID_73110
atggaggtcaatggggtcattgcagtcgttggtgtgtgggggaagctttggaagcaagactgcactgttcgcaaagtggagtttgaatatgggtatagagatgtagtgaacggaacggagcgtgactgtgagagcgggattggaacggagcggctccgtcccattgattttttggagcggaatggttccggatctgaggagaatattccctaa

SEQ ID NO: 29736 - DNA, 507 bp, Zea mays
  Peptide Sequence Number=SeqID_73111
atggagcgcctaccgccgccggcaggatcgcgccacggtcaccaccgctacacgcggatgccgcggcaggcggacctcgagggcgaagcggcgcctgctgaccaggagcgggaacccgagcggcggccggaggtcctggcggcctcagcgtcggcatcgctccgagtgcccgacgccgcgcgggtgttcgacgagctgcccagggcgtccatcgtagccgtatcgcgccccgacgccggggacatcacgcccatgctgctctcctataccatcgaggttcattacaagcagaacagcaagtcccgtggctatgtaggaaggagaggtgcgtattattgtattaagaaggaaaaagggataagaacccttaacgaagccagacactcacaccacttcgattacaaagaaacacgtgcgctctttacaagaaaagtcgaccacaacctaaacttaactcttactgcgcatgagggcaaggagacaattaacgccttgtgctccagctag

SEQ ID NO: 29737 - DNA, 586 bp, Zea mays
  Peptide Sequence Number=SeqID_73112
cgagaaattaagtgagccgagcagctccctcacgaggccacgaacccgaagcaccactttccagcccccgtcccccacccagagcccaccggcggcgatccccgccgcggaactccgcccccttcccgtgggcagccccctccccaaccctctcccagccgaattgggcctacccttagaatcgccagcccccgcccgtgctaaacccaccctcccttggaccgagaaccaggccaccggcggcaagccgccgtcaagctcaccggcgaccggcccttctccctcgctcggccggttcgccacaccgtctggccgagacgccgttcccccccgctctcgctggcaagtgggcccacagcaacgccgtcaccctcgtggccgcgccgtctccccctcgctcatgggccgccgctgggctatggaagactctctggccattaggacatcctactgctcagaggtggaagggttcccgcatctcttcaacaagaatacccccacctggaggaaaagacttcaggccctatcaggaggagatcctattgagaatgatcctgtcggcgtttcgagacaggggggtccctaa

SEQ ID NO: 29738 - DNA, 448 bp, Zea mays
  Peptide Sequence Number=SeqID_73113
aaaggtttcttctggtggccggacaataaagctacgcgcaacaagctcttctagggttaaggactgggttactgcaataaatgctgctcgacaacctccagaaggctggtgctatcctcatcgttttggctcatttgcaccaccgaggggtttgttggaagatgggagtatggtacaatggtttgtagatgggcaagctgcattcaaagctattgcatcctccattgaggaagccaaatcggagatatttattactggctggtggctctgcccagagttgtatcttcgacgcccattccaacatcatggatcatctagacttgatgctctactggaagcaagagctaagcagggtgtacaggatttcaccacctgcatgtccctatccttccttgctttttatctgccacggatgatgatacatctgaggtttgaaacgatagaatag

SEQ ID NO: 29739 - DNA, 187 bp, Zea mays
  Peptide Sequence Number=SeqID_73114
atggaggaagtgaaagggaaatgtgcctttgggccatttctaagtattttggtgattaagtgccaacacaagtgcttaaatgtgaatctatgcccatggattgacaagttgcaaatcacaagtaaagccaacaggctgtttcggtctggggcaccggactgtccggtggtgcaccggacagtgtccg

SEQ ID NO: 29740 - DNA, 319 bp, Zea mays
  Peptide Sequence Number=SeqID_73115
caaggaccacggcccgcagccggtggacgacgacgtggcgtcggcgctgcccgtgtacgtgtactccagcagcgccggcggcgaaggcgggaaggccccggagtgcgcggtgtgcatcctggagctccgcgacggcgactcggcgcgcctcctcccgcgctgcgggcaccggttccacgccgactgcgtgggcgcgtggctgcggctccacgccacgtgcccgctttgccgcgccagcgtcgtggcgcccagagcggtggcggccgccgacgggtctagtagggacgccaaggacgacggcgcggattgtctcgtctga

SEQ ID NO: 29741 - DNA, 1167 bp, Zea mays
  Peptide Sequence Number=SeqID_73116
atggagccaccggcctctgctgctttgcccaaggaagagaggaaggggtttaattccttagtgattcttattgcctgggagctctggaaacataggaatgccttcgtttttaagggttttggtcgtgaatgggcctggtactgtatttacattctcttgtacaaggaagttgctcttgctttgaaaattaacagcttatacagtaaacagaggctacttaacattcatgaaaatgttaaagttctgcgttaccctgatcacttctcaagtggtgtatacttgtggtcacaccatgagaagattgtgattgttgataatcaagtatgttatattggaggtcttgatctgtgctttggtcgctacgatagtcctgagcacaaagtcgctgattctcctccagagatgtggccaggaaaggactactacaatcccagggaatctgaacccaattcctgggaggacaccatgaaagatgagctggaccgtgataaatatccccgcatgccttggcatgatgttcagtgtgctctctatggcccaccttgccgtgatgtagcgaggcattttgttcagcgctggaattatgcaaaggttgcttatatccttgtgaggaacaaagctctaaatgagcaagcaattcccttactgatgcctcattaccacatggtaattccacactacaagggtagaagcaaagaaacaaatgatgaggctgagggtaaacaatacaatgataaggatgttgatattggaaagccagtcttgacatcacgcacatcatgtcaggatgttccattgctcttacctcaagagcttgaacctcgtgaattatccagttcagatttaagggtgaatgatttagatattaaccattcagatcgtttaaacaagaagaactttaatcagcctttgctcaaccgaaaggcaaaactggattcttctcatcaggatttacctatgagaagttttgtagacaatctcagttcccttgagccatcatctgttagacgttttgattcgtcaaaagatgatagggatcacattgacaaaaatggtgggaaatgcaggagcgagcaactagtgctcattactgatatgacagtgtcagttaacatgtccgtgtcagtcagtacatgtactctgcaatacattctaagtaagtattaa

SEQ ID NO: 29742 - DNA, 444 bp, Zea mays
  Peptide Sequence Number=SeqID_73117
atgggcaagaacaacaagcgcaagcgtgaaccgactcctccatcagaggagtttggtgactcggaatactcggaggaggagttctcctccgagcccgaggggtctccggctcccgtctctcccccggcgtcgtctgatgactcggacgactcccaggggatagccgcggaggtctggacatacatccgagccgtcgagcgcgccgggctcgaaggcttggatgagtcggagtactcctcggatgaggaggactcggacggcggcgacgagggtgaagacgacgacgacgacgacgacgacgacggcagcgacgacagtggcaggggcggcggcgacgacagtggcaggggcggcggcgacggcggcagggacaacaccaagggcgacagcagcaggggcagcaccaagggcggcggcggcggcaggggcagggccagtggctag

SEQ ID NO: 29743 - DNA, 609 bp, Zea mays
  Peptide Sequence Number=SeqID_73118
atgccgacgccgaccttcaatcactcggcgctgcctctaaaacgccgaccacgtgctcaatcgctcggcattacttctaaaatgccgacgccgaccttcaatcactcggcgctgcctctaaaacgccgaccacgtgctcaatcgctcggcattacttctaaaatgccgacgccgaccttcaatcactcggcgctgcctctaaaacgccgaccacgtgctcaatcgctcggcattacttctaaaatgccgacgccgaccttcaattactcggcgctgcctctaaaacgccgaccacgtgctcaatcgctcggcattacttctaaaatgccgacgccgaccttcaatcactcggtgttgcctctaaaacgccaaccacgtgctcaatcgcttggcattacttccaaaatgccgacgccgaccttctatcattcggcattgcctctaaaacgctggtcttatgttcgattgctcagtgttacttctaaaacgctgatgtcaatcttcacatcgctcggcgttgttactactatatcaaaagaatcagttcaacattcagcaaaagcaatgacaagtcatcaaaaagaggggataaacgatagacttcattaa

SEQ ID NO: 29744 - DNA, 732 bp, Zea mays
  Peptide Sequence Number=SeqID_73119
atgaatgctgtggtaactttacacctacccgtctgtttatatagtgctgcagcatttgagaacaagtccccaacagctgtggctgatgcccatgcggtcgaaggcatggaggaaaatgatgtcccagcctaccacgctgcagttgattaccatggcgtccatgtggggtgcgctgcgcaggtcgacatctttggcgttgaaggtcagcggcacgtgggaccacttcgtttgcacgactgggccggtgacgacgacgtggttgtcgcttcggtagtggtccctcttctgtcgcttcgtgtcgaagtcgacgctggaccccccagtgatcatgtgaatgactccgcgatacggctgatcagcgaagtcttcttgctttggtgcttgagggtgatttgggtggtggatgtttggctgatgcgggtgcagaggcaggagcggaggttgtacgatttgtacctcctggtggtgttggtatgcgtggttaggtggatgctgagcggggccgtggttgtatggttgtgggaggtggtgttgatatgtgtgcgtgacaactcttgggttgtcggttggttacgcccgagacatcctgtccctggtggccttcgtttccgagcagtccctcgttgggtgcgtgcagtcttcgccgtgaaacaggcagtaaaatctgcacggctgctgtgcccatcctcgaccccgaccacgcatgccattgccacggccctggggggataa

SEQ ID NO: 29745 - DNA, 741 bp, Zea mays
  Peptide Sequence Number=SeqID_73120
atggagtttgctcagaggtcactaaggtcaggttcgccacccagcagcttcgcggacccgcaaggacttggtgggaccattttcttgctatgcagccagatgaccgagaggacagtgttgcagtatgctcaggcctttaatgacctgtgccagtatgctgggtatcatgcagacacggacgagaagaagagggacaggttcaggagggggctcagcactaagctccgtgaccgtctcaacaccgtcagggccaacagctataatgagttagtcaacatggctatttctcaggaggactgtatcaccgctcgtcaggcagagaagaagtggaagacccctgtggcaggacccttagctcagccacaacgtttcaggattgtgtctgacactcagaacagggggcctcagcagcagcaagggcgatgggcaaatgacaacaggtgtttcacatgcggcaacaccagacattatgccaagaattgccccaggaaccagcaggggcagaatgttaatcagaaccaaggcaagaggcagaagttgcaagtgaggcaaggcaggctgaacttcaccaccatggctgatattccagagggagcacccgtcatgactggggatatctgtcccccacaagcccccgatctttgggttgatttagagaggtcgacattttggattgcaagactctggaattcattgggtgcaccggaggtgcacccaatgggtgtagcccccgacctttga

SEQ ID NO: 29746 - DNA, 516 bp, Zea mays
  Peptide Sequence Number=SeqID_73121
atggaggctgagaggacggatctccggcgccagctggcggaggagaggagggaggcgaacaaggccatcgctgatgcgcacgctgcacaggccgaagccaaggtggcacgggtggagggcagtctcgcccgccaacgcgccgaggagctggaggcgaggttcaacgccctgcgcagccgcgtggacaaggtcgagtcctcgatgcgcgcggaggttgagcggacgcacgcgcaattcgtggacgcgtaccacgagctgggggcatggactgctgacttcgaagtgcctggccaagaagcgggccttcgcttccttgaatggttgcaggaggagctgctggtgctcccgaccattgtgacaggtttcatgtccttcgcctccctcgtcacctgcgagggggccatgaatgccttgtcacgcgaggggtgcatgcattacaaggtcttcgaccaggcagacaacaattttgaacgtgaaatcttcaaggtcgaagacctcggcgggggcactgtttga

SEQ ID NO: 29747 - DNA, 453 bp, Zea mays
  Peptide Sequence Number=SeqID_73122
atggctcgcgacttgaagcaaggcagtggcgagtgcgaaggcttacgcccctggcgggagcaagccaccccgggcgggctcgggaaaggacgaaggccgctttcgccgacgcgacgtattaccgacttcggcacggacaacagtgttgatgattatcttgtcggtgaggggcaactggctgttgtcctgcctccggtggtgaccacttcgccaacggtggtggtgggggcgaagggtgccgcgcgggacccgtgggccactttctgcacgagccgcgagatttcgtcggccgctgccgctaaggacgtggcgggctccatgtctcagcgactgagggaggcgtcgcagcagctgtcacagcagctgaagcaagcggctgacttcaccgacctcatcgcgtcgggtgccttgactacggacgttgctgccgaggtcgagcgtctccgggcatag

SEQ ID NO: 29748 - DNA, 405 bp, Zea mays
  Peptide Sequence Number=SeqID_73123
atggaggatacgagtctgcaggttgggccaaagcttgattggcgattggcgcgccgcttccgtgcgtttgctgaccagttacgctttcacattctctcccaactgctgcgccctttcgccttcgagctctccgcgcccctttgcatccacgctcttctgctttccgccgctgtagtcgccatggcctcgctagtccatcccaagcgtttccagtccgagggggcactcaacctggtgcgcaacctgctcggatggagcgcgtcggtgttcgccggaaggatccgcgccggcgccactcccctcgacgatctcgccgtcggggagttcgtgctcttcgtctcctacctctcctgcgggttggcgctgccgatcttgcccttcttcttgctgctgttggaggactag

SEQ ID NO: 29749 - DNA, 291 bp, Zea mays
  Peptide Sequence Number=SeqID_73124
atgcaggggcactccgtccccacacacatcaaccgtccccatcgattccctggcaacagatcagggttcaccgccttggcgtacaatgccccactgaccccgactggccgtcgtgcagtgaccgcacttgtacccaccataaccggaatgggagacctcgtctcaggtcgcgtgaggggatatgtctgcgggcaggttcactcaggatttaataatattatgctaaagagaactgagttaagaagtaacttagggtttcttagtcatgcggggcttctagtgggtttctag

SEQ ID NO: 29750 - DNA, 174 bp, Zea mays
  Peptide Sequence Number=SeqID_73125
atggagaaccacccgggaaaacagtgctaccacaaggatgcttcaaccatcctctttggaaagccttacacttcacatgagctctcacctttggtggaaaacttggatgccattgaatgtggggtggttggggtatttgaaagggaattaggcttacacctatttcctaaatga

SEQ ID NO: 29751 - DNA, 732 bp, Zea mays
  Peptide Sequence Number=SeqID_73126
atgactggtggcggcccggccgcggcgtcgcaggcgtacggcgaggcatggtactgggacgagcgctaccgcaaggaggccgggcccttcgactggtaccagaagtacccggccctggcgccgctgctccgcctctacctcgcgccgcaccaacgcctcctcctcgttggctgcggcaactccgtctttggtgagaacatgattgacgatggttatcaagatgttgtcaacattgatatatcttctgtgtatatcccacataatctgataccgtgtatttcccttgattggcaagacatgaagatggatgtaaagaacatgtcagattttgagtctggttcttttgatgctgttattgacaaaggaacactggattctcttatgtgtggtcaaaattcccaagagaatgcaacgaaaatgctagaggaggtcaacagaatcctcaaggaaaatggtgtctacatgctgatcacttatggggatccaagttaccgcttgcgtctcttgaaggacatggaaaaatggacagtaaagctccatgtcatagaaagatgggagaaaagttcgaatcagaacaaatgggaactgacaaagccattgcctctagaggaccatagcacatcactagctgcacttcttggccccaaacctgatgtccactacatctatgtctgtgtaaagggcaacggtggcgcaagtgtggattctaaagctggagaagctgccaattga

SEQ ID NO: 29752 - DNA, 1206 bp, Zea mays
  Peptide Sequence Number=SeqID_73127
atgacggagtcagagggcgaggcggaggcggcgcgcgcggccgtgctgacgccgccgctgtcgctgggggccggcgggctcgcgggggagctccgcccggccaacctcggccagcgggtgctcagcctgttccgcaacgtccgcccgggctccgacctctcccacttccagctgccggcgacgttcaacctgcccaagtcgcagctgcagctgtacggcgaggccgtgtactgcggcggcgaggacatgctggcgcggtgcgcgcgcggcgccgacagcctgcagcgcatgtgcgccgtggtggcgtggagcatctccaccacgcggccccccatcttcggcttcgcgccctacaacccggtgctcggggagacgcaccacgtctccacgtccgccggcctcaacgtgctcctggagcaggtctcgcaccggccgcccgtgacggcgctgcacgcgacgcacgcgcgtggggaggtggagctggtgtggtgccagagccccgcgccgcggttccacggcgccagcgtggaggccgcggtgcggggcgcgcgggagctgcggctgccgcgccacgccgagacgtacgccgtcgggtgcccgggcctcgtgatccgcctgctgccgtcgccgggctgcgagtgggccggcgacgtccgcgtctcctgcgccgagtccgggctcgaggccacgctcagctaccgccgcagccgccgctccttcctcggcctcggcggcggcgacgcgcgctgcgtcaggggcagggtcttccgctccgccgcgcccgacgacacgctgtgcgaggtggacgggttctgggaccgccaggtctcgctcagggacgtcgccaccggcgaggtctccgtgctctacgacgcacggcaaaccatcgctgacctggccacgcccgtcgtgcaagacagaaaggtaggagacgacaggacaccaggcgtgtccgcctcggagtccgccgtggtctgggccgaggtcagcgccgcgatcctgaacaaggactgggaggcggccaggcaggcgaagcggcgggtggaggagacggcgaggcggctcgccaaggagaggaacgagcggggggaggtgtggactcccagccacttctcgctgtggcagaacaagcacggcgactgggagtgctggccgctggaggactccgtgccgccggctcctattgtcgtcccctctcctttgtga

SEQ ID NO: 29753 - DNA, 813 bp, Zea mays
  Peptide Sequence Number=SeqID_73128
atgacggtggcagacgcgcgggagcagcgggcacgtcgacggccaagctcacgtcccatccgggggcagcgagagagctccctctcacggtgtgaagacaacgcgcccgtgatccgttcctcgaacggctcgcacacgcgcaacggctgccccgccaaccactcgccccgttgcattaactccgcggctggacaggtggcgtttctggcagcagcaacgggcgacgcttcgccctcgtcgaaacaaccgcaccaaaaaaggctggcccccgaagggttcaacagccgcctcagatcgcgtgggccctacacccactactggctggcccccgaagggttcacagtcgcctcagacgccgagcgagggatgaccaggggggaccgggtccggcagatcacccgcaggtacttttgggcgtgcctctgggcccctagtcgacccctaacgaacggggcacggacgtccactcggattacccgcttgcagctcaccggagacaccatgttcggtgcccatcgaggaggctcgggggctgctctcgcaaacccggctccggccgaaccgttgacagcgtcaacataccagcccgagaacttgggcctcgaccggatcagtccatacgagcgactcgatcacgcctcgcccaagcctagcctcgggcaagggcagccgaccccgaagggggctcggactcgggctaagccccggaagacggcgaactccgcttcgcccgacccaaggctcggactcgggctaagccccggaagacggcgaactccgctccgcccgaccaagggctcggactcgggctaa

SEQ ID NO: 29754 - DNA, 543 bp, Zea mays
  Peptide Sequence Number=SeqID_73129
atgggggaacccgccgtctttttgcctcatcgttggaggaacgcaactccgtgggagttggtacctttcagccatcgttcggcttcaaggattttcatcatgcagcccggccgcacccctccaccggcggtcacccaagatggtgacctccagcttgatggtgggggaaagcgagccgggctgcggcctctgcccctccctcagcctcaaggattttcatcaccagggctggggaggggagtgtgccgagttgaggtcggcccccgcgtgggcggcggcccgctccttcactcagtgatcgaagggaggagcgattgtcgtccatggcgctggcatctgcagcgtgcctggctttcggacgtgagtggcttcggggccgctcgcggcgccggcgtctgccacggcagccggaagaggttcttccgccggcgtgatagccaaggctggccacggaccgacctccaactctacggccttctgcccgtccttgcctcacgagttttggcatgggcgggggcctcctggcagcagcatccgccctga

SEQ ID NO: 29755 - DNA, 192 bp, Zea mays
  Peptide Sequence Number=SeqID_73130
atggccacctcgcgaaccactcgacccatcgcattaactccgcggcgggacagtcgacgcctctggcaggggaagcgagcgacgcttcgccttcgccataaggaccgcatcaaaaaagggaccgagaaagggggataccccgaaaaaggatccttctccgtgaaggaaacatgccccgagcctccctactga

SEQ ID NO: 29756 - DNA, 546 bp, Zea mays
  Peptide Sequence Number=SeqID_73131
atgggcgagggcctcatggcagcagcatccgccctgaggtcatcgcttctgctgttcggcccctcggagcagaagtcgttgtcgttgccgctgctggagcgggcgacggcgagccgttcgtcggtcttctgttgctccgcaggccccccaatcgagtccctcggctcggtcggccttgctgtccgaggcttctcttgcttagttaaaggaacccctcggccgcccttcgatgagccgaagccaggggtagcggtgtcagcatggacagaggcagagttggttcgaaaagaagacttggtcggccagagcctggccgggtcgtccactggcgggaccgtcgccggaattgagttgccgaggcctcgggccgggctgatgtcttcgggggacgactggccgaggcctcggggtgaccggccgagccggattcctggagaagaccttggcagtgatggcccgggtgtggtgacgttgtcgtccttcagagtggagattctccgactgcgtcgctgtccgaggctaggtcagacctcgccgaaggtgtag

SEQ ID NO: 29757 - DNA, 204 bp, Zea mays
  Peptide Sequence Number=SeqID_73132
atgggtaccgtcgaacttaaggttaagaacgtgggtaccgtcgaacttaacattaagaacctctggcgtcaaaatgtctcaatcaaggtatcagcagttcccattgtggctaattatgccaaactttgcctcgcggtgctcgatctggcagcaaactgggctactgtcctccacatcttggtctgcctaccaaccttcctgtag

SEQ ID NO: 29758 - DNA, 1029 bp, Zea mays
  Peptide Sequence Number=SeqID_73133
atgagggtgaaatgggatgcccttagccaattaattagaggaactagaggtgtagttgctttgtcgtcgtgccgtcaaaggggtccaggcacagtgcttgctctgccgaggctgagtgccgagatggctcgtcttagacacactgcacgtaaagtcggtgatttcctttcctgccgtctcgacttgcggagcgtcctttgcgccgcaccgtgtccggaggtggagtccgtgaggcgccgttcctctgttccccagctggaggcgccccctgcaccaccgcgggacgccccggctgctagaggaggtcctggaggagaccccgacgacgacgactcagaccacagcacggagtcctctgagccgcaggaggcggagggatgggtcgcccgacccgtcacccgtgatgccggtcgtggttgtcacttccacgacgcactcgacaccttgttgcaccaggctttcgactggcacacctggtcgatcgagtatcgttgtgtagtctaccagcacagtcgcgggaggtacccggaccgctgggaggctacctgcctagttcgccgtccggaggatgacctccggggtgcagaggccgtttcggagcattactccatctccgagagggacactgcagaggtggctatgcaggatgcagcatggcgtgcagtctcccagtattgttctttgttcggtggggtggccgacggtcttaaccttaggtactacccccaccgtccgactggtaacacagagagtgtggttgtctcacctgttggtgaggataaccctaggttgagcagcacagtcaacctagtcgcagtgcttaacaccgagctggatcactctctggacgagctgagcagggctcgaacggagattgcggagctgcgcgctgagctggcagagcgccgtcaccaggagggtggttcccccgctcccgttgggactcagcacccataccgctcgccgccacgtggtcaccacacttatggttcccctgcctgtaagaccaggatagatctggatccttag

SEQ ID NO: 29759 - DNA, 330 bp, Zea mays
  Peptide Sequence Number=SeqID_73134
atggtgtcaacaagctcctgtaaaaatttcagattttttgaacaaccgagcgaaaagttatgcccggtttatggaagattattgaaagaaggtgcgaggctcaaaagggtgctggagaaaaaaacactcgataaactcaccgatcaacctggaaatctgataccacttgatagagctagagtgcccgatctttcagtgagtggagataattccgatttggtggaagtagaccctcacgatccgactacgacgagcgatcccgaagcgccaatgcaatcgctgaaccaacttccaatggttaccgaccttgctgatgcgagatcggcctga

SEQ ID NO: 29760 - DNA, 477 bp, Zea mays
  Peptide Sequence Number=SeqID_73135
atggggaagaaggggagccggctgggtggaaaacgagtagggcgctgcagggagggcccggctgctcctcatccaagcaaggcgagcaacagcaggggcgccatgggaggggaggagccgagctccctgctgcagccgcttgccagggggaggaagaagggcgccgctggcctctgcgagaaattctgggcgccatggaggaacgcaggcagggcgttggggcctgggcgtccatggctgctggcttcctgtgcgccggccatggagagaaagaagtggcgctgggcagagatccggccagaggtggaagaagggcttgggcgccatccaggggagcggctggaggagagggacgccatggctgcaagccttgctccctgcttgctgcttgctgccgtgggagccagggaggaagaaggcagggaggatgcgtgcgttggctggaagaaggagagggagaaatgttgtggcggctag

SEQ ID NO: 29761 - DNA, 684 bp, Zea mays
  Peptide Sequence Number=SeqID_73136
atggcatctgaggcaaagagacatttgggaaaatatgacatgccaacacataccatcacgttacattaccaaaatgtaattatacagactcacgcgtacaacatgacttcatctatggatgtcttggacatcttgatatggctcgtcttagatgcactgcatcaccgtcgtgggttatacccggaccagtgggaggctacttgcttggtgcaccgcctggatgatgatctccggggtgcaaaggccttctcagagcactattatattactgagagggatactgccgaggcagccatgcaagatgcagcacgatgggcactttctcagtattgctcgttgttcagcttggtagctgatggtcttgacctgaagtactaccctcgccgttcgaccgacagtgctggaggtgtgattgtctcgcctattgtcgaaggcaaccctaggctgaacagcatggtcaacctacccgccatgctcaacatagagctggaccacgcccttgacgagttgggcaaggctcgggcggaggttgcggaattgcgtgctgagtgcgcagcacgccaatatttggatggtggttctcccacccttgtcgggattcagcacccttaccgttcaccgccccgtggtcgcttcgactatggtaccccacactacaggatccagatagatttggatccatag

SEQ ID NO: 29762 - DNA, 444 bp, Zea mays
  Peptide Sequence Number=SeqID_73137
atggcggccaggtggggcggctctagggaatccacggcaaggcagggatggccgaacttgagaaggacagggagccatatgggagagggagcgtatgtgcaggaagcgaacaaggagcccaggccatggggcgagctcacctgctcgagcttggacccagagaaatgtcctacgcgctatggagccaggggaggggtcgctgtgcagaggaggccagctgaagcagaggcggcactggggaagaaggggaggacaccatggctgctggccgatctccctgctcgccaccatggggaagaagggctccctgccctggcgtgcgtgacggagcctggcagttggaaaaaaatggcagaggaggaagaaggttgtggcggctgggaaaaattgaggggtgggagtgaaaaattgccaagtgcaaggggagagggctcctatttatag

SEQ ID NO: 29763 - DNA, 207 bp, Zea mays
  Peptide Sequence Number=SeqID_73138
atgttcccaagcagctaccgcacccacctgcatcccaaatcccccactagcgagctcgaatttctggttttccccaaatccctctccgccgtcaagaactacaccctaccgtggctagccttccacaggtctgctcatgtcctctttgttcctgttctagcttctctgtacgccggtgatgctcgacaacccacacaattgcgctag

SEQ ID NO: 29764 - DNA, 351 bp, Zea mays
  Peptide Sequence Number=SeqID_73139
atggccggagagccccaaatcccgacatcgtgcccagagctacgtgtgacccggaaatcgtcgctgtatagagtaggggctcaccttgataggaacaagcccgacgtcgatgtcgcagaggttgcagtccccgttggcgcgcggcttcgcaccgaggcggcccgccaggaactcggcaagcaccaccggcgagagaggtgggcacgcggaacaccgccaccgtgtgcagcttcgacagccgtaaaccccgcaccaggcaatggaaaccagacgacgcacgacggctacagacccgagggtgctcactggacggagaggggattcctacactggcagcgcgccgcgacctag

SEQ ID NO: 29765 - DNA, 300 bp, Zea mays
  Peptide Sequence Number=SeqID_73140
atgtcgggtgtgagcaaaatattattaagattcaatgggctgggaagaaccgagtcgccttctgaggtgactggtagagtggacccattgccaacaatgatagatgaagggcaggctgaatttgggggtcgaaagagagatgttactagtgtcaagtgtcgtatgattggacgcgccagagtcgaccaccgagtcggtcatagctggcgaatgaagggcgaccgtgcggaacgagtttgccagcgactgctggtcccaagtacctatccaaggtgtccagggagccagcgcaggagatga

SEQ ID NO: 29766 - DNA, 426 bp, Zea mays
  Peptide Sequence Number=SeqID_73141
atgaagctgtggaaggagacttccaggagttccaagactacgacgagttctaggtgtgggttagcggcaacccccagtcggctgcctgtgaaggccgcggttatctacgtttctttttcgcactttgatttgttctttagctacccccagaacacgcacaaatacgtgctgtcctctgtgattcagaactccacctcgagtgatattaagattgctcgcatctttttcttgttcgttcttcgattgcgcacaggaaacgatcttcgtgatcaggccgatctcgcatcagcaagtacaaggggtcaagcagtctcattagctgcgagaagcagacgattcgaatcgagttttatccttgcaagggtagagcttaatcttgttactgaagattcttatggtacacttagcaacttagggtcaagttga

SEQ ID NO: 29767 - DNA, 132 bp, Zea mays
  Peptide Sequence Number=SeqID_73142
atgttgatggtatttgctcaaaagtttgcagatgaagatatgatggtgaacttgatggatgctagtttagtgatacccccggtcatcttcctgtggaaggatgtccatgtttcgttgtactttgatgaataa

SEQ ID NO: 29768 - DNA, 483 bp, Zea mays
  Peptide Sequence Number=SeqID_73143
atggacccactggtcagcccttctcgtcgtggtattcaacaagatggcgccgacacccggaccccacttgacagcctcaagccactcgcttcactcaccacgctcactttcacgcggggcccgcaaaacgctgtcgcgcgccgcgtgagaaaattcgggccgccgtcgtcgaccggtcgattcctcggtgatttggccgaggtttggggtgcgggagcttcacctggtcaggtgggtcatggctggaacttcgccttggcggatcgcgcgacggacgacttggaattgctcgtcggcgctgctcggaataccgtgggccacacgtcctcgtcgctggggccctctgcaccgaccgcttgcgctaggattgagctcggctccggtgatgctccgccgcggccaggtgggcggcgccgccagaaccgcccgtggatggccgagctgggttggagcgttggattggcgatcttctgtcaggattag

SEQ ID NO: 29769 - DNA, 408 bp, Zea mays
  Peptide Sequence Number=SeqID_73144
atgggcaagagtaagaaaggtagaggttcttctcctcgctctggtgacaagcgcaaacgtgagccgactcctccttcggaggacttcgacgactcagagtactcggaggaggagttctcctccgagtccgagggatctccggctcccgtctctcccccggcgtcgtctgatgattcagacgactcccaggggattgtcgcggaggtctggacctacatccgggccgtcgagcgctccgggctcgagggctcggatgagtcggagtacacctcggactcgtccgaggagggcagcggcagcgatggcggtgatgacgacgacgacagaggcgatggtggtggcggcggcgacagcggcaggggcggtgacggcggtggcagcaagggcagcaacaaggccagtggctag

SEQ ID NO: 29770 - DNA, 291 bp, Zea mays
  Peptide Sequence Number=SeqID_73145
atggcaggagatcgacgggcagccaatgctggtgaactgatctgcgctggccgcaaagcatgggggtacgacggccagctactggagttatccccaggcgaagatcttttgccccgaagtgctatccggtcactagtgagcgcgaatcgtaatggcggcgacgatcatggcacggattcatcggcggcgaggaggggtgaacctaggatcatgttcaggaagatgaccgggggtatcactagactagcatccatggagttcagcatcatatcttcatctgcaagcttctga

SEQ ID NO: 29771 - DNA, 345 bp, Zea mays
  Peptide Sequence Number=SeqID_73146
atgtcgaaggtgacctgctcacttcgtgcattgggtgctacaccgaatgacaggggtagctctatcttgccgacgggaaaggtcccagcctgctacgctgcagttgattaccatggcatcgacgtgaggggcgctgcgcagatcaacgtccctggcatcgaaggcagtagaatctgtgcggctactgcgtccatccccggcctctccctctggtgccattaccacggccttgggcgggatattcctgacagcgagtggtttctccggctgggtgctgattggctatgttgtgcacctattgttgactacggttgtcccgctcggagtctggctgcgaaggcctag

SEQ ID NO: 29772 - DNA, 579 bp, Zea mays
  Peptide Sequence Number=SeqID_73147
atggagattgtgttaagggaggccgccattggtgactcgaatcctcagagagatctcgaccatgattgtgacctggggggagaacccacgaaccgacgggcgccttcacgaaggaatcgtggggcggaacatcgggccggcggggcgaatttcatgtcgacgtgcatcaccatcgttgtgccgccattactcgtcagtggagctcggctcttcaccatccaagatcgggtacttgagggcataaacgtctttgataagggatgggaggagagcaagttccaacatttggcgcccaccattcgtgctacgaaaaacaacccgcgatggccccctaagcaagctagttcgaaggcagccccatccgtcgacgaagcagcgaaggcaacgctgctggctgagaaaaaaggcaaggccctcgcggacaacaccccccaagaggccttcgaagatgaagttgtcagcaaaagacagtgccaagagcaccccacccccgaaggcaccctacgcacctgcactccggaggcgtaccgcaagtaccccctccaggcttcgctccaccagagggcgaagacacaatag

SEQ ID NO: 29773 - DNA, 1044 bp, Zea mays
  Peptide Sequence Number=SeqID_73148
atgcatttgcatgtgatgaaaggaagggtaaaaagaaggctcccactccaagttcctcaagtgaagaagaggaagaagaagaaagtgatgataatgaagataatcaaccatgcacatcatcctctgaggacgaagaaacaatctgacgcatcagaaagaaaaaagcaaagaaagagagggtgcttcgcatgcgtggagaagggccacttcagggacaattgtccaactatggccgaacccaaaaaggagaggagcaaaggcaaggcgctaacaagtgtcagaacttgggatgattcttcaagtgatgatgaacctccaaggacgcgcagccactggtcctcatcacgctcatcacggtcatcacacaaatgccttatggcaagaggtaacaaaagcattccatcctctagtgatgaaagtagtagtgatgatgaaggtgagggaaagccctccgtagatgagcttgcagaagctgttaaatttttccaggatgtttgcactaagcaaaaagctcaacttaaaactttgaaaaataagttgattagctcccaaaatgattataaaggtttgctagaaaaatttgaaacttttgcaaatttaaatagtgagctgtcaactaaaattgaactattagagtctagtgctccatccactgctaccgatgatggccttattaaaaagaatgaaaaacttaaggctaagttagctagctctcaagaagttattgaaaatttgctaggcaccccagaagtatctttgattgaaatacctgaaattattaagaaagatgcttctacttcttgttttgatttaattgatgattctaactcctgcaaccaagttcttgttgagaatattgttgtagaaacatgttcggatgaggttgcaaaggaaaatgagcaattaaggcaagaagtggctcgtcttggcaaggctttgtatgacaagaaaggcaaacccaaacaaatccgacctccacaggataacaccactacgggagtgaacaagcctatggagggagaaattgtgatttgtaggctatga

SEQ ID NO: 29774 - DNA, 390 bp, Zea mays
  Peptide Sequence Number=SeqID_73149
atggatacctggcgtggtggcgccatggccggagagccccaaatcccgacatcgtgcctagagctacgtgtgacccggaaatcgtcgcggtatagagtagaggctcaccttgataggaacgagcccgacatcgatgtcgcagaggttgcagttcctgttggcgcgcggcttcgcaccgaggcggcccgccaggaactcggcaagcaccagtgcgcgcatcaccatcggcgagagaggtgggcacatggaacaccgccaccgtgcgcagcttcgacagccgtaaaccctgcaccaggcaatggaaaccagatggcgcacgatggctacagacccgagggtgctcactggacggagaggggattcctacactggcagcgcgccgcgacctag

SEQ ID NO: 29775 - DNA, 387 bp, Zea mays
  Peptide Sequence Number=SeqID_73150
atggagtgcgggagtcttagaatttttagagtatgcttggtgtattcctccatgcgcctaggggacccttttatagccccaaggcagctaggagccgttgagagcaatccaggaaggcaattcttgccttctgtcgggtggcgcaccggacagtctggtgtgccaccggacaggcactgttcagtgtccggtgcagattgctttcctaaattggcgcagccgaccgttgaagatttggagccgttggcgcaccggacactgtccggtgcacaccagacagtccagtgcccccatcagaccgttggctcggccacacatcacgcgcggattgcgcggccgaccgttggctcaccggacagtccggtgcaccaccggacagtctggtga

SEQ ID NO: 29776 - DNA, 435 bp, Zea mays
  Peptide Sequence Number=SeqID_73151
atgggcaagaacaacaagcgcaagcgtgagccgactcctccatcggaggagtttggtgactcggaatactcagaggaggagttctcctctgagtccgaggggtctccggctcccatccccctgcatgagtcgtctgatgactcagacgactcccaggggcttgcggcggaggtctggacgtacatccgggccgtcgagcgctccgggctcgagggctcggatgagtcggagttctcctcggaggaggaggactcggacggcggcgagggcgaggaggacgacgacgacgatgatgacgacgacgacgacggtggcgacgacaatggcgacggcggtggcagcggcgggggcgacggcggcggcgacgggagcaagggcggcaccagaggcggcagcagcgtgggcagcaccgggggcggcggcggcagcggctag

SEQ ID NO: 29777 - DNA, 159 bp, Zea mays
  Peptide Sequence Number=SeqID_73152
atggcgcccaagaggaagactgtgaactcgtctgctgcggtgattcccgtcatcgaccccaacagtcagttgtccttcgcagaacattcagccgctgaaagacaggacctatccggcatatctgtatcgagggctggccgactcaacccgggttactaa

SEQ ID NO: 29778 - DNA, 285 bp, Zea mays
  Peptide Sequence Number=SeqID_73153
atggaggggcttgcggcggaggtctggacgtacatccgggccgtcgagcgctccgggctcgagggctcggatgagtcggagttctcctcggaggaggaggactcggacggcggcgagggcgaggaggacgacgacgacgatgatgacgacgacgacgacggtggcgacgacaatggcgacggcggtggcagcggcgggggcgacggcggcggcgacgggagcaagggcggcaccagaggcggcagcagcgtgggcagcaccgggggcggcggcggcagcggctag

SEQ ID NO: 29779 - DNA, 897 bp, Zea mays
  Peptide Sequence Number=SeqID_73154
atggcccgcgcccgcgcctataaaaccctcccagacttcgactgcactcttccgcgcaccctcaaacctcaccggagtctagctcgccactgtttgcccgtgcgcagcgtgtccgcggccgcccaatccctctgtcaccgtagaccggccaatagagccattcccaaccccgtccagccctcggagaagactgtgcacacctccgtgaagctccccgagcgaggaatcggagtttgcttcgccggagaggccagtccacgctcgccggtgctctcaaccccgccggagtacgtggaccgggtaatccactcaaccatccttcgattccttgtgcacatggtccctacgttaccccgtgaagctcaccgtgcccttggattgaaccagttcgccgtggtttggccggtacactcgccgccgacgagaacacccgcctgcgcgcgtggaccaggcaattccggccatccccgacttcaagccgtacctcgacgtgaccgccagagcctccccgagccaaccccacccttcgccggacctccctcgccgccggttatcctaaatgaaaacctaagcctaaaagactgtaaccttgctgacggagagtacatcctcgtgccggagcaaggagctgctcaggaggtagcccaggatccagcacccgagcctgcaccagaggacctgtctgccactgctttggaaggcaagccccggattgattgtgcacataggtgtaggaattgtctagaaccccaattgcttgattacaggaatcctattgagatgaataatagttctctggaggaaatggttgctggagtgacttggccgtccatcttgccaccgggttggactgtcgagtgggaccctgcctcggctgaggaggagcatgaggagtga

SEQ ID NO: 29780 - DNA, 1290 bp, Zea mays
  Peptide Sequence Number=SeqID_73155
atggaggccgagaagacggatctccggcgccagctcgcggaggagaggagggaggcgaacaaggccatcgctgatgcgcaggctgcacaggccgaagccaaagtggcgcggtcggagggcagtctcgtctgccaacgcgccgaggagctggaggcgaggttcaatgacctgtgcagccgcgtggacaaggccaagtcctcgacgcgcgtgaaggttgagcggacgcacgcgcaattcatggacgcgtaccgcgagctaggtgcgcggactactgactttgaagtgcccggccaagaagcgggccttcacttccttgaatggttgcaggaggagctgctggtgctcccgaccattatgacaggtttcatgtccttcgcctccctcgtcacctgtgagggggccatgaatgctttgtcacgcgaggggtgcaagcattgcgaggtctttgaccaagcggacgacaattttgaacgtgaaatcttcaaggtcgaagaccctgtggtgaagcagtcggtaggggaactctttgataggatgtggggtctgcacggtcgagaggcggtcagggagcggtccgaccgggcaatagagcagatggggcaaaccaaatccgtggaggaccttgttggtcgggacagcgccctggcccaaggccaggaaggtcgatccggtgcccgccttcggatgccggtgaaggcccctcggcgacccctgcgctcgctgcggcccggcgaagaccccacactggctcctgcgccgacgagcgaaggcgccctgaaggttcttgggtttgggcctgcgcacgcaaccgctactgacaatgctatttttgtggcggcttcgaccgtggctgctgatgacgatttgtttggctctgtgtctaagtgttttgagtctgatgattctgggagttcgattgtgtggacggaggagtcttcagatgaggacttggattattttgcggcattggacgtggctacggcggagacttcgccgcgtgtggtgggtgctgaggatcttccgggtgcgagtactgggtgtaggcggcgaagggcggtggcgaaacggagattgagtgaattgtcgcgaagtaacaagcgtcattgtggtgagatggagagtggtcgtcttcgcgtggacgggactggtaagcgggaattgttgtcctcgccggctggggctagtgtgggtgaaggggagctgcgaaatctttttgagggtgaggaattgaggataatgctgttcaactacagggagatgggtatcatcccgaaggttgagccaatgtaa

SEQ ID NO: 29781 - DNA, 480 bp, Zea mays
  Peptide Sequence Number=SeqID_73156
atgggggtttggccggaattgcgcggagcccacggcggcggatttgctgcgattctgctgggatctgaaggggacgctgaagctgacaaggtggggaagcagagaagaggtaggatagggaatggggatggatctgccgactggggcccacatggcagcgaccaggaagacgttctggtgcacacgggtgagagccaggaatggaagggaattgggccgcggcagagggaatcggcccagttggaggtacagatcccggccgaggctgcctcccgggagttgttgacaaccctttcaaataaactgggggcactagtggtctcgccagcggaggcaaccacctctgcagcgggcagcctcaccagcggcggcgaccacctcagcactgagtggccacctctgcaccggtggcttaccagcgacggcggccgtctcagtgcgcgcgaagaggtcctcgctctcgtcctcctacgggagtga

SEQ ID NO: 29782 - DNA, 240 bp, Zea mays
  Peptide Sequence Number=SeqID_73157
atgccccgatcagcggcaggaggcagcgtcggaggcggcaccaaagccatccaagccaaggagccagacatgtggcagctgacggcgcctgcagccggctggccccgcgtagccgaagtttgcctcctccgcaaggctggtgaacatccttctcctccaaatgctagtggaagaagcggaaaagtcacaccgccgctcacgccaataccgtgcctcctcggggccgtcgcagaagactga

SEQ ID NO: 29783 - DNA, 723 bp, Zea mays
  Peptide Sequence Number=SeqID_73158
atggcccgcgcccgcgcctataaaaccctcccagacttcgactgcactcttccgcgcaccctcaaacctcaccggagtctagctcgccaccgtttgcccgtgtgcagcgtgtccgcggccgcccaatccctctgtcaccgtagaccggccaatagagccattcccaaccccgtccagccctcggagaagactgtgcacacctccgtgaagctccccgagcgaggaatcggagtttgcttcgccggagaggccagtccacgctcgccggagctctcaaccccgccggagtacgtggaccgggtaatccactcaaccatccttcgattccttgtgcacacggtccctacgttaccccgtgaagctcaccgtgcccttggattgaaccagttcgccgtggtttggccgatacactcgccgccgatgagaacacccgcctgcgcgcgtggaccgggcgattccggccatccccgacgtcaagccgtacctcgacgtgaccgccagagcttccccgagccaaccccacccttcgccggacctccctcgccgccggttatcctaaatgaaaacctaagcctaaaagactgtaaccttgctgacggagagtacatcctcgtgccggagcaaggagctgctcaggaggtagcccaggatccagcacccgagcctgcaccagaggacctgtctgccactgctttggaaggcaagccccggttttatgcataa

SEQ ID NO: 29784 - DNA, 444 bp, Zea mays
  Peptide Sequence Number=SeqID_73159
atgagggagcaccggacccctgtacgcacaacccggacccccgattatggcccaggactcccggaggacgtgccgcctgtccaccctactgacaggcgatgtgccctctcagcatttaatgcgtcctgtccattccgctggcaggcgacgccagagccatcctggcacaagaagattgccccagtagcaaattttagtagctccaagtactacttccgcgatacttctgggcccacatgtcgaggcttagcactcttggcggtgttggaacttgctctcctgggcaagttgatccaacggggtagtgatagtaacaagatgaagggtggacctcgccagtcgttttgcttccgttggtgcagcgagatagacggaggctggagcgaagggtggcgtcttcgccttcgccccaacatttgccctccgagggaccagttcgactaa

SEQ ID NO: 29785 - DNA, 126 bp, Zea mays
  Peptide Sequence Number=SeqID_73160
atggatgttttgatgattaggaaccttggagagaaccagcaaggacttgagaaaggccaagggataagccttcgtggcgaggtccttcgtgagtcatgggtgataaccaacggagccgtggtgtag

SEQ ID NO: 29786 - DNA, 336 bp, Zea mays
  Peptide Sequence Number=SeqID_73161
atgacgaggagaggaaactgcagcttaatgaagtggaaaagaaggggaagagccacgagggaggggaagagtcactgcactggctacgccattgccgtcgctgcaaagaaagatgagtgtcgcggctcgctgctacgccgtgtggggtcaccgtcaccggcccggactgcgctgagcgctagatacaggcgcgctagcttggccatagcatcagccaccaatgtttgcaatgcatctaaggccttgtttgggagggctctggctcctctgaaaatagctctggctccggcttctctgaaagatgagctcctctgcaggagccgtgtctttttttaa

SEQ ID NO: 29787 - DNA, 465 bp, Zea mays
  Peptide Sequence Number=SeqID_73162
atgtggggtaccaaaaaccccgaaagaaaagaaagaaggagcaaaagagaaattttaaggaaagaaaccccaaaaacccccaagtttttcaagttcctttcaaaagattttttttcccaaagatttgaaaatgggaaaaggcaaaagaaggtgtggaagaaagaggggaggggttttttgggtttagaaaaggaagttcaaatcggggttcaatgctgggggggagagagacctggcaggcctgtctgccagtctgactggcagactgacacgcagactgaccgcagactggtcaaagttgaccaacaccggttgaaccgcccagggggggcggttgaaccgcccctgacagctcctggcgacctgtttgccagtctgactggcagactgcagatcagaggtcagaggggtcagagaccagctgaactgcccctcaggaccagttcaaccggtcttgaccagtga

SEQ ID NO: 29788 - DNA, 1554 bp, Zea mays
  Peptide Sequence Number=SeqID_73163
atggaggtccgtcgcagggttctgccgccgcacgggagcgccccacggcgccagcaggcgaccggcggcgaggggcagcgggtgcgtgtgcaggcgggggacgcgctaccgctgccaatctggcacacgaacctcatcttctcggcgctgttcgccgcgccgctggtgtacctgatgcggcggtggcgggagaagatccgcgcctccacgccgctccacgtggtctccctcaccgagatcttcgccatctgcggcctcgtggcatcgctcatctacctcctcagcttcttcgggatcgccttcatgcagtccatcgtctccaacagcgacgacgaggaggacttcatcatcgactcccgccatggacaggcgcgggcgccgccgccgcccgcaccggcggccccgtgtgcgctgctggggagcccccccgccgtgccggagaaaatgccggaggaggacgaggagatcgtggccgtcgtcgtggcagggaagatcccgtcctacgtgctggagactaggctgggagattgccgccgggccgccgggatcaggcgggaggtgctgcgcaagatcaccgggagggagatggacgggctcccactcgatgggttcgagtacgcgtccatcctcggcctgtgctgcgagctgccggtggggttcgtgcagcttcccgtgggcgtcgccggcccgctccttctcgatggccaccggctctacgtaccaatggccaccaccgagggctgcctcgtcgccagcaccaaccgtggatgcaaggccattgccgagtctggtggggcctccagcgtcgtgctcaaggacgggatgacgcgagcccgggccgtccggttcccatctgtacgccgcgtcgccgagctcaaggccttcttggaggacccagcgaactttgacaccctggctatggtgtttaacaggagtgctggtcggttcctgttggctataagatattcagatagttactcgcaatccaacctatttgggatgcagtactcgcgcaagcgctacttcgtgctcgaggacgccgcgcttcgctgcttcaagtctgcgccgtccaccaagggcgagtttgcgccgtcctccaagggcgagctgagctatgtttcttcaactaaccaaaatctaagttttggggttgatcttcaagaaataaggctgatgggtgtactgcagataattgcaatagcttatctgctgaccgtcctctgtttgatttggatcagaggagatgaagatgtagagtatggatacgatttgctcaagcgataccgctaccagctcaatgcagcatcgactcgccacaaaatgggccccttcctcctgatgcgccctcttggtgccaggccccttttgacccccatattacaacgtggtggacgaggaggacgagccggcggcggtggcggaagtcggtctcgggccgcgatggcgtcgagcgccggcggcgtgttgtcgtcgttggggaagaacgagtcctacctgtgtgctaacaaggtcgacctcgagagcctagacatccaactggacaacaggcgctga

SEQ ID NO: 29789 - DNA, 789 bp, Zea mays
  Peptide Sequence Number=SeqID_73164
atgccaaccgtccccatcgattccccgttcgcgtccaggcctcaccgccttggcatacaatgctccactgaccccggctgccgccgtgcagtgaccgcacttgcgggggagctcgtcggcgacgaggagtcaggcctatccagggcacaattgaccaatcaaacgggtcagagagcttcaccagggatcaaggaaggtgtgtgcgcgaggaattatagaatggctcaccggagtgcccagtctacgcgcgcaggcgggtggccaaagtccggtgaggtcgatcttcgccttctggtgaagttctgccaggtccgagggcttggaaagcttcacgggccaatggcggagctaaccaaagcgctggcgcgacttgggggtgactggagtgggctggccacggtggccaaagctctggcggcaatggcgggcggaaaggagctcgccggagctaaggaggggcgtctggccggcgatgacgactcccagggactcgccgcagaggtgtggacttacatccgggccgtcgagcgcgccgggctcgagggctcggatgagtcgaagtactcctcgaacgaggagaactcctcggactcgtccgaggagggcggcgacgacgatggcggtgacggcgacgacgacggaggcgatggtgacggcggcggtgacggcggcaagggcggtgatggcggtggcaaaggtggcagcggcgacggcggcgatggcagcaagggcagcagcaggggcagcagcaagggcagcagcaagggcagcaataaggccagtggctag

SEQ ID NO: 29790 - DNA, 660 bp, Zea mays
  Peptide Sequence Number=SeqID_73165
atgacgtttcctgttgacgtggcggtctgtgctctaggcagggcgacgtgggcccgattccgagccctggggtcgggcggggcggagttcgccgtcttccgggtcttagcccgagtccgagccctggggtcgggcggagcggagttcgccgtcttccgggtcttagcccgagtccgagccctggggtcgggcggagcggagttcgccgtcttccgggtcttagcccgagtccgagccctggggtcgggcggagcggagttcgccgtcttccggcccgagtccgagccctggggtcgggcggagcggagttcgccgtctccgggtcaagcccgagtccgagccctggggtcgggcggagcggagttcgccgtcttccgggtcttagcccgagtccgagccctggggtcgggcggagcggagttcgccgtcttccgggtcttagcccgagtccgagccctggggtcgggcggagcggagttcaccgtcttccgggtcttagcccgagtccgagccctggggtcgggcggagcggagttcgccgtggcgcctttggcaaggcctagttgcctgtcagactcactctgtcgagtggcactgcagtcggagtggcgcaggcggcgctgtccttctgtcagactggccagtggagcggcggagtga

SEQ ID NO: 29791 - DNA, 204 bp, Zea mays
  Peptide Sequence Number=SeqID_73166
ggagggagcgctggcgagctagagtactgggcttcgagcgcaggagcagagagggaggcgctgagagggaggagatggaggagaggcagccatggtttggaagccaagggagcagggatgaccggtgaggggaaggcgcagccagccgcctgcgttggagagctcgcggccgacggcgaccagcagccagggccgacgaggtga

SEQ ID NO: 29792 - DNA, 261 bp, Zea mays
  Peptide Sequence Number=SeqID_73167
atggggaagcctggcccatcactcctcatgctcctcctctgccgagtgaccacacttgtacccaccataatcggaatgggagaccacgtctcaggtcacgtgaggggtaaagtctacgggcaggttcactcaggttggggcaggcagatcctcgatggcaggctctggtgctggctcctggactacctcctgagcaactccttgctccggaacgaggatgtattccccgtcagcgagattacagtctatcaaatgcaatga

SEQ ID NO: 29793 - DNA, 318 bp, Zea mays
  Peptide Sequence Number=SeqID_73168
atggtggtgaccccctgggtgaggtaccttagccaagaatacgtccccatgataacgtgggctgccaacaccactgctccccctcttgcccatatttcagtatatttaagtgttgaatacaattatacctctgccttggcaaaggttggttcccgaatgatgcgattgcaaatacagggatgcgtgaacagtaagggaatactgttcactatttataggcacgggacacagcctgtgaggaattacaattatgcccctcataagggattacaacagcgacctaagcatttatggactagagggtcattctacttttaa

SEQ ID NO: 29794 - DNA, 213 bp, Zea mays
  Peptide Sequence Number=SeqID_73169
atgggcaagagcaagaagggtggtagttcttcgcatcactctggcgacaaatggaagcgtgagccgactcctccctcggaggacttcggcgactcggagtactcggaggaggagttctcctccgagttcgagggctcatcggtccatgcctctcccccggcgtcgtttgatgactcagactgtggcagaaccacccgaattattccagcttaa

SEQ ID NO: 29795 - DNA, 465 bp, Zea mays
  Peptide Sequence Number=SeqID_73170
atgacgacggcggttctcagccccctacgaaagcagggaaatgtcagcaagatcccagcagcaccgacagctgtgcttctacagggctcaagcacttctccgacggccacgataccacattgtaatctcgccgacggagagtatgtgctcatccccgagcaaggaactgtccaagaggaggaccaggagcaagctcccgaggctgctatcgaggatctccccgcagccccagctattgaaggcaagccccgctatggtgggtacaagtgcggtcactgcacggcggcagccggggtcagtggagcattgtatgccaaggcggtgaggcctggacgcgaacggggaatcgatggggacggtatgattcaggatatggttgatagtgtgacttggcctaccaccctgccaccgggttggacggtcgagtgggatgttgctccggcaggagaggagcacgaggagtag

SEQ ID NO: 29796 - DNA, 610 bp, Zea mays
  Peptide Sequence Number=SeqID_73171
gcagatcctcgatggcaggctctggtgctggctcctggactacctcctaagcaactccttgctccggaacgaggatgcgggcgggctcgtcggcagtgagcgcttcggcctgctcacggcggcatcgtttaatccaagggcacagggagcttcacgtggtgttaaggatgctacccgtgcaaggaatcaaagaaagactcaccgtggagctcggtctacgcacacctgtggttgggtgaagtcaggcgacgtcgatccggtgtctccgacgaggtctcgggcggccgttggcacgccgtgcgcagagcgatcgtcggtgaacttgcgctccggcggggtggagagcgagcgggggtgtatggtcaaggcctcggtcggctttataggcgcgggcgtgggtgtgggcgcggggccgagcgccgaggcgtgctctggtgttgccaggggctacctagttcatgtgagttccaagggaagatatgctctagcttgggagatatgcgggcgccaagatgggtctgtcggcactgttcatcccgagacaaaacatgtgtcaactcatgtcaaatggtcttggcttcggttcaaacttttccagggtgttccttag

SEQ ID NO: 29797 - DNA, 309 bp, Zea mays
  Peptide Sequence Number=SeqID_73172
atgggttcgaaaaccctgagtacggagtgtactttcgtaagtcttacccgtctaaggaaaaagactctcaaggatatgctggcttttgggaatcaagacaagaatgggttcacgccaaccgagagcacatatacaccaccatccagcctcttgccacggagggtacacactactctcgccatctctccactcccattgcatggtggcctttctggtattggtctgaccgaggcaaagcttacccatgatgaggcatatggccagttaaaaggtcctcggtcagcaggcctacatcagcttggtccttaa

SEQ ID NO: 29798 - DNA, 327 bp, Zea mays
  Peptide Sequence Number=SeqID_73173
atgctggtagactacacaatggtactcaatggaccaagtgtgtcggttgaaggcccgatgcagcaagctcctccgagagctccgtgctgtggctcgaactgccaccgtcgttgtcgtctccgtctccatctccgtcagggtctcctccaacagccgggatgccctatggtgatgcagggggcatctctggctgaggtgcaggggaaggttgcctcccagactccacctcctactgaggcgagggggaagagtcctgctgctcctgatcctggcgtcagcgctcctgctcctcgtgcaagcgatgatgcggtctctccaggtggctag

SEQ ID NO: 29799 - DNA, 390 bp, Zea mays
  Peptide Sequence Number=SeqID_73174
atgcaagatgctacacggcgtgcgctttcgcagtactgctcgttgttcagcggggtagctgacagcctcgaactgaagtactacccttgcagttcgaccggtagtgctggaggtgtgattatctcgcccgtcagtgagggcaatcccaggctgaacagcatggtcaacctggtcgtcgtgcttaacactaaactggaccactcccttgacgagttgggcaaggctcgggcggagattgcggaactgcatgctgagcgcgcagcgcgccactatcaggatggtggttcccccgctcccatcgggattcagcacccttatcgctcaccgccccatggtctcttttcttatggcacccgtgactgtaggacccagatagatttggagtcatag

SEQ ID NO: 29800 - DNA, 384 bp, Zea mays
  Peptide Sequence Number=SeqID_73175
atggtaaagcggaattggcgcaaaagagggacaagaaaggtcacttacccaaagacgatgcttggggcagcttggcacgaagcgagggggctccagttggctcgacgtcgaagaattgtggcggcgacgagctccgacctgcgtaagggagaggttgagcgcggaccgggcagaggagttgaggaaaggggaaaccaccgtgagttcccagtgcgccaggctcaggcgaagctcaccgtggtcaaagcgctggcagaagtccagcggcgacgacagaacgacgaagcaacaacgggggggctgcggctgggtgagtgcgagggcagggagagcgcaaaggtgaggcaggggcgagatgagggagtgcgtggggtcttcacctag

SEQ ID NO: 29801 - DNA, 225 bp, Zea mays
  Peptide Sequence Number=SeqID_73176
atgaagtcggagtactcctcggatgaggaggactcggacggcggcgacgagggtgaagacgacgacgacgacgacgacgacgacggtggcgacggtgacggcagcggcaagggcggcggcgacggcagcaagggcagcaaccggggcggcagcagcaggggcagcaccaggggcggcagcaacagtggcggcagcggcggcggcagcaacagggccagtggctag

SEQ ID NO: 29802 - DNA, 132 bp, Zea mays
  Peptide Sequence Number=SeqID_73177
atgacgactgacaggccactggagctcctacacatggatctatttggcccgattccatacataagcatcggcgggagaaaaatcacatacccaagagactttaaaaggattcttgagacgggctcaaaatga

SEQ ID NO: 29803 - DNA, 387 bp, Zea mays
  Peptide Sequence Number=SeqID_73178
atggtgctgaacgaggcggcgagggatgcctggtcccaaccgccacccaatgggaaccaagtggccaaggcggggggtccctggaggcggggaggagaggcggagccgacgacggagagacggctacgtgggactaccgcctcgaccgatggggctaccatggggagggccaccgccccatggacgcccttgcgggaccaacgaccgctgtcgaagctgggagcctggcgaagacctccaggggcagtgggggcggcaggagggcgtgcagcccccctctccccggtcgtcgaagtgcgaatgggcatggctagggaaggacgcgttgtagagcatcgtggcggatgtgggggactcggcgtccatggtgagctcctcgagaagtag

SEQ ID NO: 29804 - DNA, 777 bp, Zea mays
  Peptide Sequence Number=SeqID_73179
atggctttagttgcagactgcagtgcttatgaattgcagatggaactcccagatgaaagagtacaagtagatgcactggagagacacttactagctggtttatcttcaaacgactatgatggaagttttgaggatgaggtcctctatgatgcatcatttgcagaaatggaagataattttgtcaagtatcaaattgctcagtggactttattatctctattactaatcgtagcttggggagtaggtgtgctcatgctactttacttacctattggggtatatgtatgtcgaagagactttcgctcgaggaagctgtacttgacaccgcatgctgttatttacaaggtaaacaagccttttgcttttccttgttttggagtttccaaaaaggagaaatattggatcctcccttcaatttccgatgttgttgttgagcaagattatctccaatccatttttggtgtatattcgatcaggattgagaatattagtgtcagaaagcctcctagttgtgatgtaaaaattactggggttgctcatccacatgatttcaggaaggccgttgtagtccatcttttgaacactaggaatcaaaaaacatcatcggatgaccaacagagcacaaatttgaattatgcagctagttcttcggaggcttctcttggagatttgatgctagagaagcttgatgaagttgaaatctctgtaaaggtagtgtcactgattgtgaaggataatataaaagcttcagaaggcataataacttcagattcataa

SEQ ID NO: 29805 - DNA, 807 bp, Zea mays
  Peptide Sequence Number=SeqID_73180
atgaatccggctacgaaatgggcgacgtgcagaaaagccaaactggctgctattgaagccgagtgggaaacgcaacctgcgcctgctgcctttactctgttcggcattcctgatcaggaagaggagacgaacaaatttgcgattcagatcccttacgcactgggcatcattgcaacgcgttccgtggataccccggttatcggcctgaaagagctgatggtgcagcatgaagaacgcattcgtaacgggatgaaggcgtactctctgctcgaacaactgcgttctggttctaccgaccaggcggttcgtgaccagttcaatagcatgaagaaagacctcggttacggtctgctgctgaaacgctatacgccaaacgtggctgatgcgactgaagcgcagattcaacaggcaaccaaagactccatcccgcgtgtagcgccgctgtactttgcgttccgtatcatggtggcgtgtggcttcctgcttctggcaatcatcgcgctctctttctggagtgtcatccgcaaccgcattggcgagaaaaaatggcttctgcgcgccgcgctgtacggtattccgctgccgtggattgctgtagaagctcactcggcgactttcatcgatcggattgcgattttggcggcggcttcggtctcaggatttccattgggcttgctgggagagaaccctaacaaggctagcccgcgcgccacccacacaggcaaaagaaaaatgagggaagtgaatgggcctgcgcagaggcatccatactgggccaaggcgcgaggcagggaagtggacagctga

SEQ ID NO: 29806 - DNA, 459 bp, Zea mays
  Peptide Sequence Number=SeqID_73181
atgggcaagaacaacaagcgcaagcgtgagccgactcctccatcggaggagtttggtgactcagaatactcggaggaggagttctcctccgagcccgaggggtctccggctcccgtctctcccccggcgtcgtccgatgactcggacgactcccaggggatagccgcggaggtctggacctatatccgggccgtcgagcgcgccgggctcgaaggctcggatgagtcggagtactcctcggatgaggaggactcggacggcggcgacgagggtgaagacgacgacgacgacgatgacgacgacgacgacggcgacggcagtggcagaggcggcggcgacggcagcagggacagcaccaagggcggcagcagcagggacagcaccaagggcagcagcaggggcagcaccaagggcggcggcaggggcagggcagtggctagacgccactggtcttcttag

SEQ ID NO: 29807 - DNA, 396 bp, Zea mays
  Peptide Sequence Number=SeqID_73182
atggttcgtcgccatggccctgacttcgactggcgacatgaaccggtggatccctcggtggtgtacgcaagtggtggtggaaaagcgcatggacgatacacactcttcgacagattcattgactcgtcgtcgttaatgcagcaacagggcatgacaacaaatattccaccgccaccacaatggagccagtttgcatccacaccagctctgccaccacagttcaacacccctccgacacataaacctgcacctggagatagggttacgcccgaagcgggtggtagtgggtctgatcccacagcagggactggatttgttaactccctcttcgcattccctcctcctagtggcgacagcggtcaaagctctaaccacccaagtggtggttatctctaa

SEQ ID NO: 29808 - DNA, 231 bp, Zea mays
  Peptide Sequence Number=SeqID_73183
atgccaaaccaagaaccattatttcatgtgaaccaaagtaagcatgagcaacaaattaacttaagtaataaaggattcaccaagtatatacttaaaagtatcatgatcaaaacaattgagtcttttaaaaagaattctgaaattcagaccttgagccaaagatcagggatgttcaccttgatccctagctcgaatcctaatggccccattgacaaaaatgtgcctaattaa

SEQ ID NO: 29809 - DNA, 405 bp, Zea mays
  Peptide Sequence Number=SeqID_73184
atgatcaagggtcttcggccaggacctacagcccaatacttcgctaggaaacctccccaaactctggagaagttacttcagaaatggatgagtgcatccgagctgacaatgacttccgacaaagaagggaggaaacttacagattttctgagatggttaggggcttcggagggagaatccaccctaggcatgtcagatcaatccatagctccagtcagaatgatgacaaaggaagccagcttcagaggtcacagcacacctcatagtcttcaggacagcagcaaagctccttcaagccgccagctccaaggggcagaggcgccaggggcttcggaggaagatatggggatcaacccaggaaaatttattgcttattctatggtgaagacaagggccacactataa

SEQ ID NO: 29810 - DNA, 603 bp, Zea mays
  Peptide Sequence Number=SeqID_73185
atggcggccagatggggagctcacggccatggggggaaatggagctgcgcagggactgctgctgggaggaagatgaacagggcactggaaaaaaaatctgggcgttgggagctgctgccgcgcgagagagtaggagcagggggcgccgtgccattgctggccaaggggaggaagggcgctgggagggagtgggcagagggaggcgccatggatggaggaagctggaaatcaaggcgccatgggctctgcacgtcctgcagcaagggcgtcggacagagagcaaggggcgccatgggaagttcgagtaggggaagagcaggcgctgtgcgaggtggagcagggcatctgaacgagcagccatggggcaccaaggaaggggagcgccagccatggaggtgctcggccagggagaagaaggggcgcgctggccatggagcagaggcgtcgctgggggaaaaacgtcggcctgctcaagccaaggcagaggcatggagcgcccaagaaaaattaggaaggagggagctcgtggggaggtaccctgctgcagccgtggagaggaagggagagctgctgttgccgtgggaggactcctgcgcgaggtag

SEQ ID NO: 29811 - DNA, 603 bp, Zea mays
  Peptide Sequence Number=SeqID_73186
atggcggccagatggggagctcacggccatggggggaaatggagctgcgcagggactgctgctgggaggaagatgaacagggcactggaaaaaaaatctgggcgttgggagctgctgccgcgcgagagagtaggagcagggggcgccgtgccattgctggccaaggggaggaagggcgctgggagggagtgggcagagggaggcgccatggatggaggaagctggaaatcagggcgccatgggctctgcacgtcctgcagcaagggcgtcggacagagagcagggggcgccatgggaagttcgagtaggggaagagcaggcgctgtgcgaggtggagcagggcatctgaacgagcagccatggggcaccaaggaaggggagcgccagccatggaggtggtcggccagggagaagaaggggcgcgctggccatggagcagaggcgtcgctgggggaaaaacgtcggcctgctcaagccaaggcagaggcatggagcgcccaagaaaaatcaggaaggagggagctcgtggggaggtaccctgctgcagccgtggagaggaagggagagctgctgttgccgtgggaggactcctgcgcgaggtag

SEQ ID NO: 29812 - DNA, 935 bp, Zea mays
  Peptide Sequence Number=SeqID_73187
atgaattcacccacccccgccagtggaggagactctcgtttcagttctgacttcctttctcgcgatggctttccttccatcttgtgggaagtgcttaactccgccggttaccctacgccccctttgtacatggtgcagttgtatgaggagcatcgggtacctcgttgtcgggtctggctgactttggaggctcatccccttcagccgggttggcgttctcttgattctaagacgattggactcaggacggacgacaccgttgaagcggcagccatgaagactctgacgactttctgtggctaccatcccttggagatggtgatgcaccccttgggactcttccctgctgagaagaaggatgatcccatgtggtgtaaccgcgtgagccatgtgaaggatgtgtgggcaatgtatcctgacttggttgggagggtcactgtccagtgcatgagtgcgctgtaccgccttcaggtccttcagagcgatgctatggcactccttgctaacaccgctcagactgccaagctcactctcgacagtcgggaagattttgtggtcgacctatccaccgagttggtggagaaggatctgcaggtagagaggctgagccagcgcatcaccaccttggagcagcaggtggagatccgagacaacactattgatgtcttggagaatcagcttcacgatgtgcagagggaactcgaggaagcgaatgaccacttggacatgcaccacctggagatggaggccaatgaagcaggaagcgagggagaagaggctatcgaggagctaggaccagcccctggtgccaatggtgccaatgatatcttgtcgttcgaactcgccagccccaccctcagcagcatggtggaggccagcatcagcgacccccagcaatggcaacttaccaggagttttgagcacgcagccaccct

SEQ ID NO: 29813 - DNA, 819 bp, Zea mays
  Peptide Sequence Number=SeqID_73188
atggctgtgatgggttcaacatcggaaaagatgtacctctgtcaggtgaggaagcagcaaatttttgttgcttttgttccaaggtggtgcctaatgaagaaaaccaggattgaaggctcgggaggaaatatgccgccgcgcacgaggaaaaccgcgcgcaagtccactggaccaattggcgtgcctcaccaccagccggcttcaaggcatgaggagagcagcagcggcagcaatgaccccattggagatctggaagcccaggtggagcagcttcgaacggagctacgccacagaaacagtgtgtgggtcgagggtggtcaacgtataaatgaattaagaactaacatccgacatctgcaagacgagcttgccgaacaagatttgacgctcgattgggctgtcaactcacgttccattgcttgggaccgagaagccaaagctcgagcccgtgtggaaaagcttagcacggccgttgacaacttgcaggtgtactgcaatacattgcatgaggaagttcatgaattgtattcgcgacgacaccccgacgtatctgccgaccctgtcggaatgggagctgggccttctggaacagcaggtgaagcacttggtggggaactggatcttttcaagccccctccttcaatgaacctggctgatgatgaaactcgtcccccattattcatcaaagccgaagatcctctcaaagctgacgaatgggtgcgggtcattgagcagaacctaccggacatcaagtcacatgggacggatttaaattggcgtttcatgagcactacattccagaaggagtgctccatatga

SEQ ID NO: 29814 - DNA, 801 bp, Zea mays
  Peptide Sequence Number=SeqID_73189
atgggttcgaaaaccctgagtacggagtgtactttcgcaagtcttacccgtcaaaataaaagactctcaaggatatgctggcttttgggaatcaaggttcacgccaaccgagagcacagatacaccaccgtctggcctcttgccatggaggaagaaaacctccacgtgttcgacgcgctctgcgcacgccagagcacgcccgcgcccgaccccgcgccgcgccgagctgcgccagtgtcccccgtgtgcgcctgcgcctataaagcccactcaggcgtcgaccatacccctccgcacgcgctcaacctcaccggagctcaaactcaccagcgtttgcccgtgcacggcgtgtccgcggccacccgaacccctgccaccatagaccggccaaccaagcccttctcaaaccccgtccgaccctcggagaggactgagcacacctcggtgaagctccccgagcgaggaatcgaagtctgcttcgccggagaggccagtccacggtcgccggactccctccgaccaccggcgaagcgtagaccggactgtaacctcgctgacggagagtacgtcctcgtgctggagcaaggagctgctcaggaggtagccccggatccagcaccagagcctgcaccagaggatctgcctaccacagccttggaaggcaagccccggaatcctgttgagatgaatactagttctctggaggacatggttgctggagtgacttggccgtccatcttgccaccgggttggactgtcgagtgggaccctacctcggctgaggaggagcatgaggagtga

SEQ ID NO: 29815 - DNA, 837 bp, Zea mays
  Peptide Sequence Number=SeqID_73190
atgacctctcacggatcctcggacgaagggaatgcacagtcccacacagacgggcttgcacgagagggtttcccccgtatcttgtgggaggtacttcaaagagctggttacacgacgcctccccagtacgcggtgcagctgttcgagaagcaccaagtgccccgctgtaggccaggctggcgttcgctggactctgagtcttttggatacaaggctgaggatactatcgaggcgattgctcttcacgggctgaccaccttctgtggtttccaccccttggagctgtccactcaccccattggtttgttccctgcggaaaaggaggaggacccaatgtggaaggatcgagtggagcatgccaaggatatatgggctatctacccaggtcagactgctcacttgacggtgcggtgcatgaatgccctgtatcgtctgcatgtgatgcgaggagaggcaatgtctcatctgatggcattgttggaggctaccaagatccccttggataacagagaggaacttgtggtagacttgtccactgagattttggaaaaagacttacaagtggaacaattgtcaaatgagatccaagagcttgaggagttagtgggaaccagggagaacaccatcgaggttctcgaggatcagctgatcaacacccagcagcagcttgcagaggctaaccagcacctggatatgcaccaccaggagatccaggacatggaggccaacgaggatgtcgacatcgagggaggagaggagcctgcctccagcttggacactgctggctcagggagaccacctacccccgagtcgagcgttgcctcgtttgctcactag

SEQ ID NO: 29816 - DNA, 1185 bp, Zea mays
  Peptide Sequence Number=SeqID_73191
atggcgtcccgggacgacgggtggggaggcggcgaagacggcagctcgctcttcgagggcatggtcctcttcgcgccagagcccaccgccgccgaggactcggtccctgcccctgcccctgcccccgcccccgccgaggactcggtccctgtccccgccgctgtccctgagctgccatccgccgcccgccacgacgccgacgcggcctcgtccgtgccaccaccgctggacgaggatctcttctccgatctcaccctcttcgccccgccgcaggagccgctctcgctggagcagacacccccgcccctgctcccgcaaggcgaggatcggagccacgcggcacttgcccccgcgccgctagcccctactccggggctctctcggcagccgtccacctcgtcgctgcgcaagaagaagagggccgtgcgcatcgggtacgcccgctcgccgcaacccgcgccgccttcccctcctgccacggttcccgcctccgcagctgctgctgcgatctccgctagtactatagccttcctggacgcttcgccgtatccggccgctactcgtaccctcgaccagctccctgatcggcaactcgatgtccatgtcaacggctacgaggcgcacgcggaggcggtggatgttgataccaattcaccgcatgtggtggaggcggtggatgtggataccaattcgccgcgtgtggaggaggaggaggcaaaggaggacgatgacgggaaagaggatgaagatgctggagtggcagccttgggggtcaaggagaggctaggtctcctcagatctcaaatctcgggcaagctcgactccatccagcagagggctgctgctgtggctgccaagaggaggcttctggctggccggcggaggaaggtggcggaggaggcgacctccgtggcatccaggcacaaggatttggagagggagctggaggtggcctgcgaggctgaggactttgagagggcagagagtatcagcgactccctcgctgccctcgagaaggagaaggatgggctgttgacggcgctgcgtgatgctgagcttgactacgattcagtggattcggagttgcaggaggtgcttgagtcccgtattgctgccgaggaggaagctgctatccttctggagcaatttgcaaagtttttaccttgtaatacaatcttggtgtaa

SEQ ID NO: 29817 - DNA, 1206 bp, Zea mays
  Peptide Sequence Number=SeqID_73192
atgaacaaaacaccggcattcatagtgccattacaaatggaactccggttccacctccgcaggtacgaacaaccccactcgatgtgggggcctgtggagcaacggaagattgaccaacggtgcgctgtcgcccgctccggcagcggcgacgacgacgacttctgctccggggggtcgaacagcggcagcgatgacctcagggtggatgccactgccaggaggcccccgcccgtgcccaaactcgtgaggcaaggatgggcagaaggtcgtagagttggaggtcggcccgtgggcggccctggctatctcgttggcggaagaacctcttccagctgccgtggcggaagccggcgccgagagcggctccgaagccactcgggtccgagagccaggcacgctgcagctgccggcgccacggacgacaaccgcccttccccccgatcactgagggaaggagcgggccaccgcccacgcaggggccgatcccaactcggcacactcccctcctcagccctgccgtcatgggctgagtcttctccaacacactccaaggtcctcccctacggcgcgggggctgggtcccacacgtcatgcaagccggctcagagcagaagaagccaaaccgccgcgcgcggtgcgtataaccgcccagcggttacaagcgactctccacttttgcccagaccaacgggcgaaaggggcgggcagccatgcaggcggcatgcaaccgcgccaagtgggcgcacttctccgactcccaacacgcccagcatggaggcccaggccacgagtcatgcaaccggcgcgccgaatgcttcgtgcatgcaacagcaccgccacttgcgccactaccgcgcctcctcgactgcggaaccaataccgcgactcgaggcgacccagcgcatgacccagcagcgccagcctggcgcggcggtcaatgcggccaaaaatgggccggcaataatggcggtggcaggcgggcaggagcagcggccacgtcatcagccaagctcacgtcccgtccgggggcagcgagagaaccctctctcacggcgtgaagacaacgcgcccgtgatccgttcctcgaacggctcgcacacgcgcaacgaccgccccgccaaccactcgccccgtcgcattaactccgcggcaggacaggcggcgcccctggcaggagaagcgggcgacgcttcgccttcgccataa

SEQ ID NO: 29818 - DNA, 2901 bp, Zea mays
  Peptide Sequence Number=SeqID_73193
atgcagagggaggtggggccgcaggtggcccctccgctcttccttcaccagatccagccgatgcctccccacgccgccgccgccgcgaagaagcgcggccacccgtggcccgcggccggcgccgcggaggccggcgctgggaactggaaccccaggctgtgggactgggacagccgcgcgctcaccgccaggccgtcctccgatgcgctccgcctcgccggtggccagccccagccggctgctgaggcgcagcgccagggggccggcgcgctgaacctccagctcggcctgcaggaggactccacgaccccgatggacgccagcccgacggctcccgcggcggcggcggcggcgtccccgccagcttcggctgcggcggggcaggagccggtcgttaggccgagcaagcgggtgcggtctggatcgccggggggcgctgggggagggccgggcggcggtgggactgccaacggaggcgcgagctacccgatgtgccaggtggatgactgtcgagcggatctgaccagcgccaaggattaccaccggaggcacaaggtctgcgagacccacagcaagaccaccaaggcggtcgtcggcaaccaggctcagcgcttctgccagcagtgtagctctaacgttggtaaagtgcctagcatccctcccataccagataaacagaatctggtggaaattataagcaaaataaattcattgaacaacgcaacctctccggcaaagtctccttcgccagaagtcgtcgttttgaatacttcacaagagcaacgagagcaaggacatgattctgtagacaagacgaccaacggaatcgacaagcaaactgtaccatcaaccatggatttgctaggagttttttcaactggcttcgcaacttcaacacctgtgacaaatacatctcagtcccaagggagcagcgacagcagtggtaataacaagagcaagagccattcaacggagccagcaactgttgtaaattcacacgatatatcaacccaagattttcctgctgctggtttcatgagaagcaacagcacacaagaaagccgacctcatatatacaagcagacagaacacgagacaagaccatacttgtcactacagctgtttggcagcagtgaggaggatattccacctaagatggactcattgaataagtacttatcttctgagagtagtaatcctctggatgagagatctccttcatcctctccgcccataactcgcaagtttttccccatacattcggttgatgaagaggttcgacaccctcatattacagattttggggaagatgctacaatgggtgaagttagcacaagtcaggcatggtgtgcaccaccacttgatctcttcaaggatttagagcgtcccctcgagaatggatctccaccaaatcctggttaccagtcctgctatgtttcaacatcttgttcagaccattcaccttcaacctcgaactccgatggacaggaccggactggtaggattatcttcaaactatttggcaaggaacctagtacaatacctgggaaccttcgtgacgatatagtaaattggctcaaacacagtcctactgaaatggagggttacatccgccccggttgccttgtactatccatgtacctatcaatgccggctattgcatgggatgagcttgaagaaaatctcctccagagagtcaactcattagttcaaagttctgatttggatttctggagaaaaggaaggtttttagttcgaaccggctccaagttggtatcttataaagcgggaatgacccgtttatcgaaatcgtggagaacatggaatactcctgaattgacctttgtgtcaccaattgctgttgttggtggacagaagatctccctcattcttaaaggccgcaatctatctattcctggcacacagatccattgtacaagtacaggaaagtacatatccaaagaagttctgtgctcagcatatccaggtaccatatatgatgattcaggtgtggagacttttgacttgccaggacaaccagattttattcttgggcgctgctttattgaggtggaaaacaggttcaggggtaacagcttccctgttattgttgcaagttcaagtgtttgccaggagttgagaagtctagaagtggagcttgaggattcacaggttcttgatgtttcttcggatggtcagattcatgactgtaggcagtcaaaaacgagggttcaagttctgcacttccttaatgaactcggctggctctttcagagggcttctgcctgtacattgtccaccagacctgatgtgtctgatttggatttgactcagttttcaatcacacggttcaaatatcttttactgttctctagcgagcgtgactggtgctctcttactaaaacacttctggatattcttgccaagagaagcttggtcagcgaggaattatcaaaggaaactatggagatgctggctgagattcaccttctgaacagagcagtaaaaagaaagagtaggagaatggtgcatttgcttgtacagtttgttgtactatgccttgataattccaaggtttaccccttcctcccaaactttcctggccctggtggtttaactccgttgcatcttgctgcatccattgagaatgcagaggatatagttgacgccttgacagatgatcctcaacagtcagctttagacgaagatggccaatctcctgaaacatatgccaagttgaggaatcataattcatataatgagcttgtagcacaaaagctggtggacatgaagaacagccaggctgaaattcatgttcgtttaagaactttgagcgcgttcggctgccctgcacggagcactgttgcagctgcaaatcactgttgcagctgcaatccctag

SEQ ID NO: 29819 - DNA, 951 bp, Zea mays
  Peptide Sequence Number=SeqID_73194
atggtgaaggacacgcggtactacgacgtgctgggcgtggacccgtccgccaccgagtccgagatcaagaaggcgtactacgtcaaggcgaggctggtccaccccgataagaacccgaatgatccgcaggccgcggagaagttccaggaactaggagaagcataccaagttctcagtgaccctacacagcgccaagcttatgactcacatgggaaagacggcatctcaactgagctttttgaggaatatattggtcaactggcaatggcatcaatggcttcacttgataattttggtgaagatgagcagattgatgcaagaaagctgcaagagagaatgcaggctgttcaaaaggatcgggaagaaaaacttgcagagacactgaaaaaccggctacacatctatgtgcaaggaaataaggcagaattcatccagcatgctgaagcagaggtgtccaaacttagaaatgcagtgttatcagtatgcactctttgtgcgtttcgggctattcttctcatctgttcatttccagcatatggagttgttatgttgaacactattggctatgtatattcaaggcaagctgcaaaagaacttgcaaagaaagtgatgtttttgggtgttccatttattgccgaatggtttagggacaaaggacattttatcaaatcccaagtaacagctgccacaggtgcaatagctcttatgcagttgcaagataacttgacgaagtatatgagtgctgagggccagtacacagaggaggaacttgaaatgtacatggaaaaccataagaaagtcatggttgattctctgtggaagcttaacgttgctgacatagaagccacattatcccatgtctgtcaaatggtacttcaagacagtagtgccagaaaggaggaattgcgcctccgtgctaaaggcttaaaaactttaggaagaattttccag

SEQ ID NO: 29820 - DNA, 291 bp, Zea mays
  Peptide Sequence Number=SeqID_73195
atggccgagagtggtttggccacggtggctgagggctcgggctgcttggcgagcggcgcagagctcgctggagctaagtgctggacttggggagtcagaaccttggaagggtactcttggtacgatagatctggctctatctccacttctggttctgctatgatctcggtcggcaatcgaacacatttcttcagttgggatacatggaatacattgtggatggcacacatttttggaggtagcttcaatttgtatgctgaaagggaaatagggtttaaccttttcctataa

SEQ ID NO: 29821 - DNA, 1440 bp, Zea mays
  Peptide Sequence Number=SeqID_73196
atgtcgatgcggcggctgaatgcgataccaaattgttatgaatcctgctgcgatgcgcaggatggggaggcgtacaccacgaaggatagtggtgaccattggaggctagaaattgaaggaagtggaaaagtatggaaaagagatcaaaaggtgcgacttagacatgttgacaccggaggttatctgcatagtcacaacaagaagtacaatcgccttggcggtgggcagcaagaggtctgcggtgtccgagagaagcgagctgagaacatttggttgacagcagagggtgtttatctcccagttaacgggagcaacaagtcggacgacttagagacgactggaaattctcagtcgactaatcgtcgacttggtctgcccctcctctgcacgtcacccagccgctttccagcccctcatctccacaccgctcctcctctggccgcctctagcccctcctatgcacgccgcctccaggcctctcctctacacgacgcccctcctttggccgccctccagccccacctctccacggcacccctcctctgcacaccctcacaacaaagctctggtgagtcctgccccccctctcctgccctcatagcaacctacgccgcccctctgcacgccctcacagcaagctctggggagatgaaagatgcatctgcagatcgaccacaaggggagtcaagaagccagcagccatacggtctagctaaagatcctaaaagaaaggcaaaaccgaaggatccaacatggaactatagttactggccggatttgaacaaaaaagatgtggtgaagtgcatcctttgtggcaaaattgtttatgcatgtgttagaaggttgaagcagcaccttgttggtggtcatggtgatgttgctaagtgcccgaaggcaacatcgacaatcagcaaagagatgagtgattatttgaagaagaatgctagagagaagcctattgagttggatcatgataaagagggtgataaagacgatgacgttgaagtacttggagaaggagaaagtagagcatcccattcaattgttcagcccagttccataacaacccaaaagagaaggctctcagctgaagcaagacaaaacaatcaacacacattgaagtcttctaagtcaattgcatccatgcttcacaaagcacctgaagatgtggttcgtgagaggcatagcaaggtcaacactcaaactacattgcagcgaaagagcaaggaggagaaggaaagaacatatatgtatgttgttgattttatttatgagtgtggcttacaacctaatgtcatcaactcaagggcctttgagatcatgcttgaggtggttgggcaatatggtcctgggtatgtgaaaccttcatatcatgatgttagggtgtcgttgcttgagaaggcaaagaagagtgtagatgagataaaaaaagactcatga

SEQ ID NO: 29822 - DNA, 459 bp, Zea mays
  Peptide Sequence Number=SeqID_73197
atgcgggggtgggcgctgggcttcgtctcgaggggatcacccggggctggacgcaggggggggagcatgacctcggagcgcagtgacccggcgatggaggatctctaccagcgagtaacccctagtgtcgtggtgactgatcttggaccgccagacaaccagatcccccctcccaacatggtgaagccccagggcgagcaatcagatcccgagcgacagtatctacgtggttccacggcggcgcccccgtgtgtgcacggcggaccgatgagttcccccgcgagcttggtttatggggggatttcactcgtgatgactatggctaggggcaaagcggggccggattttatactgaggcagagtccgcgttcaaggaggccgtggccgagaatctcgccgacgccattgcctgagatccctggcggctccaccgggttcggttgtaacgaagcgagctag

SEQ ID NO: 29823 - DNA, 600 bp, Zea mays
  Peptide Sequence Number=SeqID_73198
atgggcccgggcccccacgccagagactgggctgttggtttcggcggaggtgaagagacgcactaccgcaggcggtggcgtgctcctcacgcggcggttcgccttctccgcacacggaaaccgacgcccaaggagtgtgactcgtgggcccgggcccccgtgttagaggctgggccgctgctttcggtggtgtgtgttgggcgagatcttctgcggcgtatcagggcgtcagtgggggaatccttctttaaaaaggggattcccctgattgtggtagtcatcctcatcactcgcagtgccctttcgctcttgagttctccgcgctcttctgccgttgtggcctccatggccttgctagaccctctcgagcgtctccagcccgaggtggcactctacttggtgcgcaacctgctcggatggggtgcgccggcgttcgtcggaaggatctatgtcggcgcctctgttcacggcgaccttacctccggggagttcatgctctttgtcttcaacctccctagcgggttggtgctgccaatcttgcctttcttctgctggaggtgcacgacctcgtgggggcggcgctcttgcaccggtgcttag

SEQ ID NO: 29824 - DNA, 360 bp, Zea mays
  Peptide Sequence Number=SeqID_73199
atgaagcagtggcgggacaacgttgaccgactgctcggcatggcacactctggctcgaccagatcgaggccacggtcatcccggcgccaacataaggcgtcggcgtctgtgcgctcaccctcagtaaggggtgcacagaccaatgacctctgggcagagctcaaccgcatgcgtgcaggggaggatgcccaggtctctctggagagggcgcgggagcaccgacaaaacttcgagggtcgtgattacgctcgagtctctctagagagggcgcgtgagcgccggcaaaacatcgagggtcgcaacctcgatcaagacttcactgcggtagcaccgcaaaccccagtgggcgcccggttctag

SEQ ID NO: 29825 - DNA, 432 bp, Zea mays
  Peptide Sequence Number=SeqID_73200
atgttggtagactacacaatggtactcgatagaccaggtgtgtcggtcgaaggcccaacgcaacaaggtatcgagagcgtcgcggaagtgacacccgcgagcagcgtcacgagtgatgggtctagcgatccatccctccggctccggctcctccaaaagctccgtgccatggctcaaacttccaccggtgttgtcatcgtctccgtctccgtcaggggggcatctctggctgaggtgcaggggaaggcggccactcagactccacctcctgctgaggtgagggggaagagtcctgctgctcctgctcctactcctggcgtcggcgctcctgctcctcgtgcaggcgatgatgcagtctctccaggtgacgggactgatctggcaccgtgcgacgcaggggatgctcctccaggcgagaaggcaaaaaggtaa

SEQ ID NO: 29826 - DNA, 87 bp, Zea mays
  Peptide Sequence Number=SeqID_73201
atggggacaacctggggtggggtggtttgtaaagcaagggtccttacagagaggtactcaggaaagagcctgagccccctaaagtaa

SEQ ID NO: 29827 - DNA, 219 bp, Zea mays
  Peptide Sequence Number=SeqID_73202
atggccgggagtggtctggccacggtggccgagggctcaggctgcttggcgggcggcgcagagctcgtcggagctaagtgctggacttggggagtcagccgagcgatttcaggtcaagggcagagagttgtcgcctcgccaatgtgccagtgtcagaaggccgagttccgagggcatcacttcaagggctggtttggggattttggaaaattcaaatga

SEQ ID NO: 29828 - DNA, 444 bp, Zea mays
  Peptide Sequence Number=SeqID_73203
atggctgctgaagacgattcgtttggctctgtgtctaagtgttttgaatctgatgattctaggagttcgattgtgtggacaaaggagtctttggataaggacttggattattttgtagcattggatgtggctgcggcggagacttctccgcgtgtgatgggtgctgaggatctttcgggtgcgagtaccgggtgtaggcggcgaagggcggtggcgaaacgaagagtgagtgaattgtcgcgaagtgataggcgtcatcgtggtgacatggagggtggtcgtcttcgtgtggacggggctggcaaacgggaattgttgtcctcgccggctggggcgagtgtaggtgaggaagagctgcaaaatctgtttgagggtgaggaattgaggataatgttgttcaactacagggggatggggatcatcccgaaggttgagccaatgtaa

SEQ ID NO: 29829 - DNA, 348 bp, Zea mays
  Peptide Sequence Number=SeqID_73204
atgggcaagaacaacaagcgcaagcgcgagccgactcctccatcagaggactttggcgactcggaatactcggaggaggagttctcctctgagtccgaggggtctccagctcccatctctcccccagcgtcgttcgatgactcggacgactctcaggggattgccgcggaggtctggacttacatctgggccgtcgagcgctctgggctcgagggctcggatgagtcggagggaggcaacggcggcagcaggagcgacaacggcggtagcaggggcggcgacggcggcagtagcgggggcagcggcggcggtggcagcagcaagggcagcaacaaggccagtggctaa

SEQ ID NO: 29830 - DNA, 822 bp, Zea mays
  Peptide Sequence Number=SeqID_73205
atgacttcccacgaatcctcagaggacggaaatgcactatcccacactgacgggctagcacgagagggctttccccgcattttgtgggaagtacttcagggggccggatacacgacaccccctcagtacgcggtgcagcagttcgagaagcaccgagtgccccgctgtagggtgaggatgactttggagcctcatcccctgcagccaggctggcgctctttggactccgagtcctttggataccgagctgaggacacgatcgaggcgatcgctctacacgggttgaccactttctgtggattccatcctttggagctggctacccaccccattggcttgttccccgccgaaagggaggacaacccgatgtggaaggatcgggtggagcatgccaaggatatctgggccatctacccaggacagactgcgcacttgaccgtacggtgcatgaatgctctgtaccgtctgcaagtgatgcgcggtgaggcgatgtcccatctgatggcactgttggaggccacaaagatcaccctggataacagagaggagctcgtgctatccactgatatccaagagttggaagaactagtgggcaccagggagaacaccatcgaggttctcgaggatcaactcattaacacccagcagcagcttgccgaggctaatgagcacctggatatgcatcaccaggagatccaggacctggaggccaacgaggacgtcgacatcgagggaggagaggagcctgcctctagtgtggacactgctggctcagggagaccaccttcccccgagtcgagtgttgcctcgttcgctcattag

SEQ ID NO: 29831 - DNA, 1029 bp, Zea mays
  Peptide Sequence Number=SeqID_73206
atgccctccctgggtgggcggaaagtgcgaagttcagccttcccgttggatgtgcgaggccgggatctcgccgtggtcgtacgtgaagcggaggatggggcggtgcatattgtggggcgttatgtgccgaggacggaggccctgtggagttgggatattcgcggatccaacgattggctgaatagggtcttcgagctgaataatttgccgtacggtggctatcccggggatgatgctgtcgaccgccgcgggaaaaggctagtggccttgatggggacgtgcgcagcccttgggggaaggatgtcttcgcccgagctccgggagtcttcggcgcggatgctggaggttaccaggggtcgatggcccaagaatgttccgatcccccgcgcgactggcgaagacttctttacgtctcgcatggctcgtgatttgaaggcggccgactttccggaccgcgttgcgtcgggtgtccctgactgcggacgtggctgccgaagtcgagagtctccgggcgcagcatgcgggatgctgtccgggacaagtcggctgcggaaagcaaaaaccgcaggctggcggagaaagtggccgccatggaggccgagaagacggacctccggcgctagctggcagaggagaggagggaggcaaaccaggccatcgctgaagcgcaggttgcgtgagcggaggcccaaagtggcacgggcggagggcagtctcgccagccaacgcggcgaggagctggaggcgaggttcaacgccctacgcagccgcgtggacaaggccgaggcctcgatgcgctcggaagtcgagcggacgcacgcgtatgcgccgcccgaggctgtagaggtcaatccggtgccgccctcagatgccgatgaaggctcctcgactgtactcgtgcctactgtggccggtgaagacccttcgtcagcccctacgccgacgggcgaagatgccttgagggtggtggccgaaccggcagccgaagaccccacggccgcggccgggccttcgcaggtggctgaatag

SEQ ID NO: 29832 - DNA, 192 bp, Zea mays
  Peptide Sequence Number=SeqID_73207
atgggacaaagccctgagtacgaagtgtactttcgcaagacttacccgacaaagtacaagactctcaaggatatgctggctttaagggagtcaaggtcagtgaccaagtcttcatatccacgaagttacggcgatctgaatcgattatactcagctgaggacctccaatcacacgacatatgtagcacttaa

SEQ ID NO: 29833 - DNA, 903 bp, Zea mays
  Peptide Sequence Number=SeqID_73208
atgacttctcacgtacccacggacggagggaacgtacattcccacaccgacggtcttgcacgagagggttttccccgtattttgtgggaagttctgcagggagcgggttacgctacgcctccccagtacacggtgcagctgttcgaggagcaccgggtaccttgctgtagggtgagcatgaccttggagcctcatcccttgcagccaggctggtgttccttggactcagagtcttttggtttcaaggccgaggatactgttgagttcatggctctgcatgtgctgacaaccttctgcggatttcaccccttggagctgtcaacccaccccattagcttgttccccgctgagaaggaggacgacccaatgtggaaggatcgggttgagcacgccaaggatgtatgggctctctaccctgggcataccgctcacctgacggttcggtgcatgagtgccatgtatcgtgtgcaggccttgcgaggtgaggcaatgtcccagcttatgggcctagtggagtctaccaagatcaccctggataaccgggatgaccttgttgtcgacttgtccactgagctggaggaaaaggatcttcaggtggagcagatggccaaccaaatccaagagcttaaggatcaggtggaggccagggagaacactatcaaggttctagaagatcagctccagaccacccagcaacagcttgaggaagccaaccaacatctggatctgcaccatcaagagattgaggatatgcaggcagaaggggccgatgaggacgtggatatcgagggaggagaggagccggagcctgcatctagcttagacactgctggctcaggaagaccaccttcccccgagtctagcgttgcctcgtttgctcatttgatttcagagtcagggtag

SEQ ID NO: 29834 - DNA, 180 bp, Zea mays
  Peptide Sequence Number=SeqID_73209
atgacggcaatcggtgtcagtgaggcattgtacgccaaggcggtgagccctgttctgttgacggggaatcgatgggaacaattgatgttctctggaggatatggttgctggagtgacttggccgtctaccttgccaccgggttggacagtcgagtgggaccctacctcagcatgggatga

SEQ ID NO: 29835 - DNA, 546 bp, Zea mays
  Peptide Sequence Number=SeqID_73210
atgttttggcgcatgaccggcctctccgcggcctcgcccgtggatacaattctggacaaagaaaattttacattggaagaacttcttgatgaggatgaaattattcaggagtgcaaagcactgaactcaagactcataaacttcttacgtgacaagtcccaggtggaacagttgcttcattatattttggaagaagttccagaggatgctgaaaggaagcgctccttcaagttcccttttattgcttgtgaaatatttacttgtgaaatcgatgtcattttgaggaccttagtagaggatgaagagctaatggacttgcttttctcatttgtgaaacctgatcatccacatagcacattattgtctggttacttcagtaaggtggtaatatgtttgatgctgaggaagactgctccacttatgagttatgttcaggggcatccaaagatagttgtccagcttgttgacctgattggcatcacatcgataatggagtggttagaaaatacagatgtccgcgaaatgacagcagtcaagtttgcataa

SEQ ID NO: 29836 - DNA, 384 bp, Zea mays
  Peptide Sequence Number=SeqID_73211
atggctagctgcgagccaaagggatcagcgaagggcgctcgcggcgcgccagaggcctgcgccgtcgccgacatcgaccccaagctggagttatacgacggcgccaacacctacgtcattcgcctcaatcttccagggttcaagaaggaggacttcaaggtccagttgaactccggcggctggcttacgacggccaacctcgacggggtcgccggccgcttcgacggcaccgtgctgtacctcaccgtgcccaagcagccggtgtgcgagaccgacatggtgatggcgaggccgctgatcgaggccaaggaggagtgcgcggccgcgccggcgcgggctgttagagaatgtgagcctaacggcccatgtcggcccatgtgctaa

SEQ ID NO: 29837 - DNA, 909 bp, Zea mays
  Peptide Sequence Number=SeqID_73212
atggatcccgctgccgttaagtttctcctcgacgagatcggcaggcttttcgacgagcagaacgcgaagtgggacgcaaggttttctcagtggaatgcgaagcgggagccagaaccgtaccttggagacgaagttgaggcagaggaagtagcggccagcgatctgcgtgaggcgcgcgatctggaacgggaagaggtcgagcatgcgaagctccacgaagatagaagccagggagcggccgatgcggggcgagaggtcgcgctcgcggcacgcttgcttgccgctgatgcgtgcgcagccagaatcgtcgacgttgctgcgcccttcgactcctacgtcccggcctacgccgctcagtttgacggcttcaacctcgaccacgcggccttcctcggcaacggggccaactccggcctcatgggctccgccttcttcaaggaaagagaggaggcgcgcaggtgcatgccctcgcaggacaagctcgtcatcgacctagatccgccagacaacatagagacgtcgctttcggagtcagccttccacgatgttcccggcgccaactacatggaggcgctcaccacatgttcaactccgggcctcaccgagcgcgccatggacgagctcatcaggatggcgcaggccggcgagcgcctgtgggtcaatacgggtggtcgcgaggtgctccacgtcgacacgtacgacagcatcttcgccaagcccggcggctcgttcctcggcccagacgaccgcggcgtgtccggcaccttcgacgccgatgtcacggcggacttcctccacgcgcaggagctggacatcatgtgcagggcgcaccaagtggtggaggacggatacaagtacttccccgaccaccagttcgtcaccttcttcactgcccccaactaccgctag

SEQ ID NO: 29838 - DNA, 1263 bp, Zea mays
  Peptide Sequence Number=SeqID_73213
atggtgtttacttggactgttaggaatttttttagagttactggtttatacaatcagcatgacagaggtgtggtgtggctaatcgttgctcctgattgctactttattcaacacaatgagcgggtgcacatgatattctatggcttcgatctactaagtttgcaacacttccagggacatttcattgaagctgatatgtttgctccttgggatggtcaggaattaacccagtttcgattttctggactaccaatatattggcagcagtcacatggcctgaacagtctattatttttcagaaagctcaagtattcatcatcagttgagatattttgtggtgcacagttttcatttcctaatattctattgcccaagtcttggtcacaggagttagccaccaacatagaaagacatttactaccagaaatgctagaagtggccaatggctatatttttcatgagcttcatctgatgcttgcctctattggagtgacacatatgatcagttgtggtaaatatttgatatggatcattggcttgctaactccatgggatccgggcagagtggtcttcgacctcaagttcgtgatgctttggcttgaggcattgacattgttccaagacatgcagttacaacgtgtggagcctgacaagttctttgttatcactctcctcacatgctatgccaacatcggtgcttttgatcaatttgaatgggtccattggtatgctgaagacaggaatatgaagattgatgcagtctgtggaacaacattgatggagatgtgctcgaagtgtgggcatgttgacaagtcacttcaaatcttggtgcagatgcaaggcaaagatgctgcagcctggactgacatcatctgtgatctgaccacaaatggtcaggcaagcaaggctcttgaactatttgaagagcagccgagaagcaaaacaaagcctaatggtatcacgttccctggagtactgagtgcatgttgccatggtggcttggtcgatgaaggacagaggcatttccaagccatgaaggaggtctatcaaatagagatgagaatcaaacattatagctgccttgtcaatcttctaggacatgctggtcaccaggatgaggaggctgcaacgtcaaacagcacagcgcaaattccttgtacttttgagcggtgcttgcaattttcctgggatcctggtggaagtaatgctatacatcgacttgagggcaagtcaatttttaagaaggggagaatgttagagaat

SEQ ID NO: 29839 - DNA, 516 bp, Zea mays
  Peptide Sequence Number=SeqID_73214
atgagcgacgggtgccagtggcggaagtacggccagaaagtggcagcaacccgtgcccgcgcgcctactaccgctgcacggccgggcgcgcccgactgccccgtcaggatgaaggtccagctgtgcgcgcgcgacacggccgtgctggtcgccatgtacgacggcgtccacaaccacccgctcacgcctacgccgccgcggcgatggcgtcgtccaccgtactcgcgtcgtccacgccacgcgacgcggcaggcgctgctgctaccgccgctcaccgcgctgccaccggcgccgcagcgctattcgttcagcggcgccgccgtggccatatccggcccgccgactgcggcgtccagtcaatacaacgtcgtcgtcccaatggctaacatcatgatgaaggcggtcgcagaccctagcttccgaacggcggtgatggtcgccgtcgccagctatctcggcgagcagtgcggtggaagaaatgtcgacgacatcttgaccttggcacctccctgctag

SEQ ID NO: 29840 - DNA, 1590 bp, Zea mays
  Peptide Sequence Number=SeqID_73215
atggcggtggactggcaggagggccaacatctgcggcttctttggcagcctcaacacgctggatctttgctccagactcttcaggttccaaggagagcagctgctagaaaacgcatgtgcctgacaggtttcaagtgctactgtggtgccaccttctgtggcgtgcacgtgggcacatttggcttccaggcctctggccgtgacaccatcgtgtggccaaccgtgaataatttggatgatttgactgatgtgattgtagaattcatctctgtgctgcttacaattggaagtgaaactgctgaaaaagagctaagaaggcagtcagcaataaagcgctcgattgatttgttctttgagtatccatataacaactttttgcaccatcatgttgagaatataattgttgcttgcctggagggtaaaagacctgaagttgttgagcatgttcttcatgaatgtgatattgttggtaaaattcttgtctcagagaggttttcatccttgtcgactgagtctaatgggcctactgttccctctgaagggaaaacccctccaagaattggaaatgttggtcacatgacaagaatagccaataaacttattcagttgggcaatagtaacaacacaatccaggctcacttacaggaaaataatgattgggttgaatggcaaacaaatgtgctggtcaaacgcaatgaagtggagaatgtttatcattgggcttgtgggcgcccgacatctttacatgaccgtggtagggacagcgatgatgatgacttccgggacagggattacgacgtggcagctcttgctaataacttaagtcaggcatttcgttatgggatatatagcaacgatgacattgaagaggcacaaggatcacttgaacgagatgatgaggatgtgtattttgatgatgaatcagctgaggttgtaatatcttctttgcgtctgggagatgaccaggacagctccctctttacaaattcaaattggttcacatttgatggagagagaggcattgatgatcgtttatctgcctctgttccttcatcatcccccaattctctggagacttcactagaggccgaggaagctgatgatggtaaagtcattggcactgaggatgaaatggaaacagtatatcttggaaatggtagtgctgaggaggtaaaagatgtagcagaatgtaatgaacagccaaattgttgtactgaggatgagcgattgaaaaatactgaagggattgaacggcatccagatgtttcaaatcactataccgacatatgtacaaatgaggctgcctctgctgcagcagaatcttcagccccatcagttgagatagtggcaaagaaaacagtagatgaaccatcggaggcagaaagaacagtggatgaaccggcagaatcatctttggacagttctgtctctatacctttgcctgctcctgttaatggtagtgagcctgccaactcggaagcctcttccgaacaagttgcccatgacactgatgtgcagcaaccagtcaaggaagctcctgatgaggacgttaatgcaaagaaaactgatgtagccaaagcaagcgagtga

SEQ ID NO: 29841 - DNA, 1270 bp, Zea mays
  Peptide Sequence Number=SeqID_73216
gagggacaggagaaccaggagggaacctataacagtggttgacttggaggttgacgctagccaggaagaagagattttggctgcagcaaacgcaaactgtagccaatggccagctcccgagattgatcttctggagagaacaagcaatgagaggatatatgcagaaatgttcttgcctagcattggatggtcttcgccatcaaggatccagccactgcttgcagccattaatagctgcaagattccagagttcagttacgatctatcttggctaaaccatggttctcacatgggcaagcagatccaggatcagaagaagttacttgaggagtgcttggcgagatacttgaccgaatcagcccggctgttagatgaaagccaggtggtcaccgaagtgaatgttatggtgcagaattgtgttggccttgaactccgggattcgtcttactatctcgctcccagatgggtggcgatcttccatcgtatttacaactggaggctagcaaagctctctaccggaaagttctcagaagcttatgttctgactcagcacctgtatcaggctcctgcagcagctggctcaaacggtaccacacaagggcttactgctaacaccgccagcagcgatgctgtggatcacatcatgatgcctgccgtttcaaccggcatcacactagacgaaatcatcgagatcagttgtgacctcgatgttgttgatgcgcagccagtaactctgccaccacgactgcctgtgcatgttcatgaagaacctcaggcacttgctgacaacaacgacgtgcatggagttgatgaaatgtacataccaagaagagtagagttgggggaggtgatgcccatcgacacagacgacaagctttctcggctaagagtagagttgggggaggtgatgcccatcgagacggacgacaagctttcccgtggcgcagacgatctcaagagcgtactccacctagaagatgtggccgccattggctacggggccgccatgcctccagtggcgctgcccgacaaggaggctgggtatttgggggattatcggcgaagcatcatggtgcccgacgaagcaggggctgtgactagcgcgctggacgttgctagggggccgcctgatactggcggtggctgctgcctgggggcagcggcaaagctcatgatcgtcgagacctttgatacccagattggtaggagccatgttccctatcccgacgatatgtttccgttgcaacgcacgggcatccacctagtatag

SEQ ID NO: 29842 - DNA, 765 bp, Zea mays
  Peptide Sequence Number=SeqID_73217
atgctcgggaggctcattgctggtttggaggctaggggaatgtttgaggatgtgaacattatattggtaggtgaccatggtatggttgggacctgcgataggaagcttgtgtttctcgaagagttggctccatggatcgagttgaagtcagattgggttctgtcaatgacgccattgctggcaatcaggccgccagatggtgtgtcgccagatgaggttgtggccaagatgaatgaggggcttggatctgggaaggtgaagaatggggaatatttgaagatgtacttaaaagaggagttgcctacttgcctgcattattcagagagttacaggatcccgccaatcatcgggctgattggggaagggtataagatcgagatgaagcgctccaagagaaatgagtgtggaggagcccatgggagagcacaaccaaatgcagcccattacgctcttgcgtctctagaaaggattggtcgtgttcactcaatggttacccaaaatgtggataggatgcatcatcgtgctgggggtaatccatttgagctgcatgggagtgtatatgaggtaatttgtttagaatgtggtacatccatcagccgagaatcattccaggaggaagtgaagaacctaaacccaaaggaaggcccatgtgatcttattgctcccttagatcttccacatttttacagtctttccaccgtgtatcagcttgtgactcaatttggaaggataccagtataccacacattctgtggaggattctga

SEQ ID NO: 29843 - DNA, 177 bp, Zea mays
  Peptide Sequence Number=SeqID_73218
atggacatattgcaagcctctatggaccaaagtgataaaggtgctaatcatgtttgtctaagtgctagggatcatctgaagttgagccaaaggaagccaaagggatttggcacaaaaggacccaacatacagtccggtgattgtacggccgaaatgtccgctcttgggctcgactag

SEQ ID NO: 29844 - DNA, 483 bp, Zea mays
  Peptide Sequence Number=SeqID_73219
atgcacgagcaggcacttggcgacatgctgatggacggttggtcggcggcgatgcgcaggcagcagcatgcaggtgtcgaggactttttatttctgaaatacactgagtatatggatgttcgggtaattcgggtaccgatttcgatcgttaccggtgtattttccgtaccgaactttcgttttcgatgtttccgaaataccgatatcgtttccgtttccggagttatcgtttccgattttgtttctgataaaaaatataaaaacgataatggttctagtgtttaccgaccgttttcgaacgttttcatccctacagaaggctaccttattggccagacacagccggccacgacaccggctcccgcccagacactgttgactgggatcctctcttccctgtacacgcgcggcgcgctacggaggcggatgtgtgcgacgggaagtccgtggatttatccgtgtgtgaaggtgaagttttcctag

SEQ ID NO: 29845 - DNA, 513 bp, Zea mays
  Peptide Sequence Number=SeqID_73220
atgaaagatggattagacactgatggggacagatggacaaatcaggaaactttgctattgttgaagggcatagaaaagttcaatgataactggaatcatatcgcaggtcatgttaggacaaaatcaaaagcacaatgtattcaccatttcattcgtctcccggtggcagatggtttgttagagaacattgaagtgccagaagcatcccttccatctggaatgcaaagcagtggatttttgcattcagattccaatgttcatcataagcagagggtaaatgtcagatacactacaacaagcgatgaggcaaccacacctcaggaaggtgacggcgtgctaacgctaatttactatgacatggacctgcgagagtgcacctggggcatagtagatgtgaagataaaccgacaacagtctagcaagggcaagcccctgagcaagaagcagagggaatggaggttgcagacggcgttcgagtcactgaagttggtcaggctgtactctgaatgttga

SEQ ID NO: 29846 - DNA, 162 bp, Zea mays
  Peptide Sequence Number=SeqID_73221
atggccgccccgccaaccactcgccccgtcgcattaactccgcggcgggacaggcggcacctatggcaggagaagcgggcgacgcttcgccttcgccgtagaaaccgcgccaaaaaagggaccgagaaagggggataccccgaaaaagatccttccccgtga

SEQ ID NO: 29847 - DNA, 1014 bp, Zea mays
  Peptide Sequence Number=SeqID_73222
atgtcttctcgctcccttatgcatcgtgtctttccaccttccaagcccccggatgggggatacccgccgtctttccgtctcatctttggaggaacgcaactccgtgggagttggtacctttcagccatcgttcggcttcaaggattttcatcttgcagcccggctgcacccctccaccggcggtcacccaagatggtgacctccagcttgatggtgaggggaagcgagccgggctgcggcctctgcccctcccttagcctcaaggattttcatcaccagggctggggaggggactgcaccgtgcctggctctcggacgcgagtggcttcggagccgctcgcggcgccggcgtctgccacggcagctggaagaggttcttccgccggcgagatagccaaggccggccacggaccgacctccagctctacggccttctgcccgtccttgcctcacgagtttgggcatgggcgggggcctcctggcagcagcatccgccctgaggtcagtgctgccgctgttcggccccccggagcagaagtcgtcgtcgtcgctgctgctggagcgggtgacggcgcgccgttcgtcggtcttctgttgctccgcaggcccacccctatcgagtggggttattcgcctgttgattatctgaaccgcttcaccaagcatgagtcgccccgtgtcaaggtgacgagtgagccgggtcgttcgttagcgggaccgacgccggagttgaccagccgaggcctcgggtcgggctggcgcccttggaagatggttggccaaggccccagaggtgaccggccgagccgcctgctcgggccggattcccggagaagaccctggcggcgatggcccgggcgtggtgatgacgtcgtccttcggagtggaagtcttcggaccgcgtcgccgtccgaggctaggtcgaacctcgccgaagttgtcgtcgatgccgagggtgctgctgcccccttccagcgtcaagacccgagcctgcaggatcagattgtcttgtag

SEQ ID NO: 29848 - DNA, 1305 bp, Zea mays
  Peptide Sequence Number=SeqID_73223
atggcgcttcctgttgacgtggcgggcctgtgccctaggtcgggcgacgtggaggctcctccgaagccgaggtcgagtctgtcttccatggccgaggccgagtccgagcccctgggtcgggcgaggcggaggtcgtcggcagaggccagggcggtgtccgagccatgggtcgggcggagcggagttcgccgtcttccgggtcttagcccgagtccgagcccctggtcgggcggagcgaagttcgccgtcttccggcccgagtccgagccctgggtcgggcggagcggagttcgccgtcttccgggtcttagcccgagtccgagccctaggtcgggcggagcggagttcgccgtcttccgggtcttagcccgagtccgagccctgggtcgggcggagcggagttcgccgtcttccggggctgagcccgagtccgagccctgggtcgggcggagcggagttcgccgtcttccggggctgagcccaagtccgagccctaggtcaggcggagcttcctatggtgcctttggcaaggcctggctccctatcagcatcactgtcaagtggcactgcagtcggagtggcgcaggcggcgctgtccttctgtcagaccggtcagtggagcggcgaagtgacggcggttacttcggctctgccggggggcgcgtgcctctgcagctttatgctgatgggggttaccagctgagaattaggcgtcttgaggggtttcctcaccataagcttcgccgccgccgcctgttccttcccttttttgctcttcgcttccgcacccggctccggaggctagagctgccccgtctgaaggagaaggatccctctacctctacaggcgccaccacccccgcactagagatgagcaagcgctacgcggaggtttctcggctacttatggcgggcgggggccgcatgtccggcgtcgtcaacccatcgcagctcatatgttcccctcgcaagggcgcagccttcgctaatcgcttctccatgttctcgatccgcttttcgcagatctgggacaaccttggccgctactacgcgccgaacccggacgacgacctggtcaccggctacgacgacagggacgtggtggtggagaacctgcgtaagctctgcgtgcaccgcgtcgccaacgccttcggtctaccctggatctgggccaaccgtggccgctactgcgcgccgaacccggacggcgacctggtcaccggctacgacgacagggacgtattggtggagaacctgcataagctctatgtgcaccgcgtcgccaacgccttcggtctaccctga

SEQ ID NO: 29849 - DNA, 486 bp, Zea mays
  Peptide Sequence Number=SeqID_73224
atggcccaatcatcagtatccgtcggagatgagaccttcgcccctaggagccacatcacgttcagcaccctcgacttccttgccaccttaactggcgaactctgccttgccaaccctgacatgcatccaggagcaaggcggagaagagacacctcaagaggcatgccaccgcccttaagtggtgcctcaaccaacttgccgcccactgctaaacggtgggaggagggaatgccgctatcagccctggcggccatcgttggccgccagccagcgttcgtcctcgacctactcgaggacgactcaagctgcggctcgaccgagtttaactctgactctgacgaaggaatggggagagcttgctttgtggcaagaccactgcaaaatgacaatgggcaagggaggaacaaggaggcccccaatgaagaagaggagtaccagcgccaagggcacatcctcgcttgtgaggcctccctccgtcagaaatag

SEQ ID NO: 29850 - DNA, 279 bp, Zea mays
  Peptide Sequence Number=SeqID_73225
atggatgttttgatgattaggtaccttggagaggaccagcaaggacttgggaaaggacaagatgttgaggaggagcagcaagggcgtccacaacaggaagggataagccttcgtggcgaggtcattcgtgtgtcacgggtgataacccaacggagccgtggtgtagtgattgcgaggaaccgttcgctcggagccttggatcatcaacgtcgagatctccactcaatcaaattatcgtatctcacggaagatcgggccgcgtctactatcagtccgtag

SEQ ID NO: 29851 - DNA, 456 bp, Zea mays
  Peptide Sequence Number=SeqID_73226
atgggcaagagcaagaaaggcggaagttcgtcgcaccattctggcgacaagcggaagcgcgagccgacccctccctcggaggacttcggcgattccgagtactcggaggaggagttctcctccgagtccgaggggtcgccggtccacgcctctcccccggtgtcgtctgacgactcagacgattcccaagggattgctgcagaggtgtggacatacatccgggccgtcgagcgcgctgggcttgagggctcggatgagtcggaggtctcctcgaacgaggggaactcctctgactcgtctgaggaggggagcgacggtgacgacgatggcgagggcaacggcgacgacgggggcgacggcgatggcgacggcgacggcagcaagggcgacggcaagggcggcaacggcagcggcagcagcaagggcggcagtggcagcggcaaggccagtggctag

SEQ ID NO: 29852 - DNA, 564 bp, Zea mays
  Peptide Sequence Number=SeqID_73227
atgcaggcggcatgcaaccgcgccaagtggacgcacttctccgactcccgacacgccagcatggaggcccaggcccacgcgtcgcgcaaccggcacgccagatgctgcatgcaagcaactgcatcgcctgcgccaccaccgcgcctcctcgattgcggaaccaacaccgcgactcgaggcgacccagcgcgcgacccagcggcgccagcccgacgcggcggccaacgcggccaaaggagggccggcagtaatgatggtggcaggcgcgcgggagcagcggtcgcgtcgtcagccaagctcacgtcccatccgggggcagcgagagagccccctctcacgggaccaggaaagggggataccccgaaagggatccttccccgtgaaggaaccaggctccgagcctccttactgatcaggggttcgaaggctggccccccgaagggttcaacagtcgcctcagatcgcgtgggccctacacccactactggtcagaggttcgaaggccggccccccgaagggttccacggtcgcctcaggctactcgggctccgtgcccattactga

SEQ ID NO: 29853 - DNA, 786 bp, Zea mays
  Peptide Sequence Number=SeqID_73228
atgtcattcgggtcggtgaaccagcagcacaggcggggcctcctctacagcgcacgaagaagttgcggaagagggaagtacaggggccacccctatgaacatctcgctgaggtggatgaagatggctgcctagaggacggagtggggcgtgaggtgttgatgctgaagcccgaactcctccagcagcagcaagaagaagggcgagatcggcagcgccaacccgtaggagatgtaggaggtgaacaacacgaactccccggcagcaagatcgccaagggggatggcgccggtgcggattcttccggcaagccctggcgcgctccacccaagcaggtcgcgcaccaggttgagcgcctcctcagactgaaaacggtcaggatgaccaagcgaagtcatggcttgtgcggcggcgtgtggaacagaggagcacgaaggcaaaggggtgcaggtgattgggagagaatgcgaaaaggttgtgtgctggatttcgggtgcggaaagagcgaaccgtcgcgcgcgatagcgcacctccttggggccgctacagaagacaaaaggttatgcagcggcaacgaggcgtcccacgcgtggcccgacgaaaccaccaggcgtggggccgagggtcagtcagccgcggagacagatatggcagttgacatgactgaaggcggattgacagcgggcgtgtcagcatacgcgctaaaacgacgcaccaatcaccgatcatatcatgttgaagcaaagtacaagctttggccccacctacaggctcgcatcctcccctaa

SEQ ID NO: 29854 - DNA, 708 bp, Zea mays
  Peptide Sequence Number=SeqID_73229
atggcgcacagaggcgcgtcagtcctctggccccgccgccaccaccaccatctggggcaacaacaacaacagcagcagcaggagcggcgatcgccccgctttcagggttactggaaagtccagggccccaaggctccttcctccaccgctcccaaggtcgcacctccttcaccagataccaggcccactggtgggtccggctctcagcagcaagaatctgctgagagtggtgccggcggtccgcctccggctgctgccaagatagcgccagtggcttcccatgccccagccggggatctggcggtagcagcgcctgcgccaggcgacgtcgcagaggtggaggaggtcctagctggggggtccgcgcccactcccgacactaggggtgacgccggaggcgcgtccagctccaatcccccacctgcgccggaggagatggaggtggtgtttgggcggcggctccggccgggcgccgagcaagaagcggcgccagtcccactcccccgcatgacgtcccatgcccaccaggtccttagtgacactggggcagcaatcttgcgggagtgggaggcgcttgaggctaagcaccagtgcctcagtgactggcgcacccaactggaggagcgcaccaggacggtgtcccaacaattcatctctgagcggtcccaactcgagcgagaccgcaaggagtacaagggggacctctag

SEQ ID NO: 29855 - DNA, 492 bp, Zea mays
  Peptide Sequence Number=SeqID_73230
atgggcaagagcaagaagggtagtagttcttcgcatcactccggcgacaaacggaagcgtgagccgactcctcccttggaggacttcggcgactcggagtactcggaggaggagttctcctccgagtccgagggctcaccggtccatgcctctccccccgcgttgtctgatgactcagacgactcccaggggatcgccgcagaggtatggacctacatccgggccatcgagcgcgccgggctcgagggctcggatgagtcggagtactcctcggacgaggagaactcctcggactcgtccgaggagggcggcggcggcgatggcggtgatggcgacgacgacggaggcgatggcgatggcggtgacggcgacgacgacggcggtgacggcggcggcaaaggtggcagcggcaacggcggcgatggcagcaagggcagcagcaggggcagcaacaagggcagcaacaagggcagcaacagggccagtggctag

SEQ ID NO: 29856 - DNA, 504 bp, Zea mays
  Peptide Sequence Number=SeqID_73231
atgaacaaaaacagaaacttgcagaatggaattgggattcagatgggtcagattcaagtgatagaaatcaaggagaccgcgaaagaaaggagaaatgggaagagcaaggccgcggatgagaaaaggaacataaatgacggattcgtgggtgtcttctgttggaacagtgaccccacgatagatccaccaagaatagagctccttcggaggaagaactccgatggatacaagatggaaaaggtcggattcaaggacgacagacatatggttacctgcgaagggcaactgaccgttgggatcgataggaggaatgattgcggtagacgaactctgggctttccgcttgggcgccatctcaaccttgctggcgagcagagcgaaggcaatattgcaagagagcagagaaggcctggatgcagaaaagcaaaaactagggcacagaatgcagaggcgtgcgacagtgcagtacatatggggttttctcggaccaaatgtcatttctaa

SEQ ID NO: 29857 - DNA, 597 bp, Zea mays
  Peptide Sequence Number=SeqID_73232
atgtggaggctcctagtgtcgagctcgaccccacgtgccttgccactgcctaggcctattccctcttgccccgactccggttccgaccagggcgctggttccgtcgatgctcagacccaggcggccagctctgcccgtgttttggcctctagacaacatcccaggcttcaacatgtgtggaatctgtcgtgccttcaaaggaacataagcttgaggattcaacctgaagataagcttaatgtgcaattcattgccaagtcgatatccaatttgatagtaaatctttctgttgatgagaaggaaaatgttactcaaatcgaaatgtgcatgcaactagatgttgctactgaggtctattcaatgcgtgttggtgacacgttcaacatggttctagctctcactctgaacctggatggatcatcagacactggctactacacacaggcttggaagaaaaaactcttgctgacgattatgaatacatcatgcatgataaaacttgaaaagaaaaggccatactcgctggagaggattttcaacacccttaggtctggctctcggaagacacaggtgagtgatgtagttgttggcttttga

SEQ ID NO: 29858 - DNA, 342 bp, Zea mays
  Peptide Sequence Number=SeqID_73233
atggggaccctctctggcggatcctttgtcgagtatcccaggtggcactcggcaaaggtggattctttgccgagtgctgtcgggcagacactcggcaaagggaaggagggtatagagatagagatggcaatgggtaaatacccaccgggtattagtaccacatacccatacccacgacaaaaaataacctcaccgggtcacccatatacactggtgggtatagatttacccccatacccatacccacgtgggtatgggtcacccatcgggtcacccgtacccacaaaaattaaacatctatcaaaatattatattatacaaatatcaagtatatccatctaa

SEQ ID NO: 29859 - DNA, 441 bp, Zea mays
  Peptide Sequence Number=SeqID_73234
atggggaggagtacgattggaggagctagccaatcgaccctcaggcagaatatgctagcgcaggaggacaagcccatggacggttggagacaacaagccgagtacgagaagaagagagacgagtattatgcaagcctccaggcccaaaatcaagctcttctctcgcaactagcccaacaagcgggcgtcccgatgccgacatatgggatgccgcctccggactttgcactgccaatgccaatgttggcgcctccacctccgcctccgcctccgtcacaattccctatgggatttcagacaccacccgcttcagttgccgcacctggagatgggtctggtcaagacgacacaacacattcgtgggtgaacaaccttttcaacacgcagagtccagccggaggaggtgactactcgaaccatccagacgatggatatgattga

SEQ ID NO: 29860 - DNA, 366 bp, Zea mays
  Peptide Sequence Number=SeqID_73235
atggcgaagctgtacgtgcaagcgttcccgcccgcggatctgaacaagaacaccgagtggtttatgtacccgggcgtctggacgacctacatcatcatcgtcttcttctcctggctcctcgtcctctccgtctttggctgcacccctggcaccgcgtggaccgtcgtcaacctcttccacttcgcgatcacataccactttttccattggaagaaaggaacaccttttgctgatgaccagggaatgtacaacacattgacttggtgggaacaaatggacaatggcaaacagcttactcgtaataggaagttcctcattgttgttcctgttgtcctgatatggttaagttccgttaatattgaatga

SEQ ID NO: 29861 - DNA, 168 bp, Zea mays
  Peptide Sequence Number=SeqID_73236
atggatatagcaagcacatatcagagggggtatgagcgtggaggactttggattcttatggtgcaacaactgcagtgcagtgcaacaaagaaccaagcacatggatacaaaggcgagattaaagagaatgggaaaaggcaaataaaaagggttgcatctgtggcgtag

SEQ ID NO: 29862 - DNA, 1080 bp, Zea mays
  Peptide Sequence Number=SeqID_73237
atggaggagatgctcatggctggaaacgcaaatctaaaccagaatccaaacccaccgccggctgcgccctcggctcccggcgcccagagggcaggcgctcccgccgcggttgcggcagcgccgcctagcgctggcgcgaccggaggagcggggccggagcggcgggcgcggccgcagaaggagaaggcgctcaactgcccgcggtgcaactccaccaataccaagttctgctattacaacaactatagcctccagcagccgcgctacttctgcaagacgtgccgtcgctactggaccgagggcggctcgctccgcaacgttccggtgggcggcggctccaggaagaacaagcgctcgtcctcggccgtgtcgtcggcggctgcggccgccgccgcctccacctccgcggctatgtctggcacggtccccgtggggctcgcggccaagaaccccaagttgatgcacgagggcgcgcacgacctcaacctggcgttccctcaccacaacggccgcgctctgcagccaccggagttcccggcgttcccgagcctggagagcagcagcgtgtgcaaccccggagctgccatgctgggcaacggcgccgccggcaggggcatgggcgcgctctcgggtttggagctgctgaggagcacgggctgctacgtcccactgcagcactttcagctagggatgcccgcggagtacgcagccgcgggattctcgctgggcgagttccgcgttccgccgccgccgcagtctcagagtgtgttcgggttctccctggacacgcacggcacggggggagttggcggcgccgggggttacagtgccgggctgcaggagagcgcggctggcaggatgctcttccccttcgaggacttgaagccggcagtgagcgctgctggcggcggcgcgagcaacggagctgatcatcatcactacgagcacagcaaagatcaagcagcaggcgacggcggcggagccagcggcgtcaccggcggccacgaggctccagcaggattctggagcaatagcatgatcgggaatggcagcagcaatggtggcggaggctcttggtaa

SEQ ID NO: 29863 - DNA, 345 bp, Zea mays
  Peptide Sequence Number=SeqID_73238
atggccgtcgcttggcagacagacaccgtggtggaggccgccgaaacagcagtccgtacagcggacgaccaagtgacatcgtgtatccaagatccaaagttgtccgacaacttcagccataggtccgagcccccgcaggaggctcccgggccccacgttacagttgggggccgggcccaaatggggtcgcggtcctggacccctgtgtgccatcgagaccccgatcaagggcaatccgatgctgccacgcggagtcccaatgtcgccacgtggcctatggctcgttacgtaagccaacaggcggaccttgacacaagactctggcatgaggcgtccctgtattaa

SEQ ID NO: 29864 - DNA, 498 bp, Zea mays
  Peptide Sequence Number=SeqID_73239
atggaaggccacaagtctttccaatgcaaggcgatgatcggggataaacaaaggcgaaagctcaagcaaaagccatcaagcaaaatctccaacacctacatcaaaaaggtgaacaaaaaggatgctacaccatatttgatcaagaagaaaaagaacggaaaggtgatagcaatcaaggccaacaagcaagccaacaaaggaaatggggccaaacgcatctgggtgccaaaggagataatttcaaccatgaaaagcaccaagaaggtttggatcccgaaagggaatttattgccaagtgagttagtgaaaattttggacccaaatttcccacccatgactaagatatgcgtatctatttatcttttatctagtttaccttccttgcctagtattacatttgttatgtacttttgtttaaaatcatgcatactagttcacaggatgcgaagagaattggaccaaggcaatgaggatgcaacacctcaaaagaagacataa

SEQ ID NO: 29865 - DNA, 342 bp, Zea mays
  Peptide Sequence Number=SeqID_73240
atgccgacgtggatccaccacggcggccgcatgctctacccctgctacgacggcgactctatttgtcgatgtggagggtcactgattgtcgcatccaaggtatgcggcggccgttctttttatatcccgaacgcgaggccgaggacccagtcaaatcccaccgacccgccgaaatcgcggattctgttaggcttcggtgctcgtttcaacgaggaagacgcctggaacgccagacccaccacgcaacaacccaaagcgaggcaagcgtgcgtccaaggcagccaggtgggacccaccggtcgtcccaggcgcacagcgcgcagctcccctggcggaggttga

SEQ ID NO: 29866 - DNA, 309 bp, Zea mays
  Peptide Sequence Number=SeqID_73241
atgccgatgtggatccaccacggcggccgcatgctctacccctactacgacggcgactctatttgtcgatgtggagggtcactgattgtcgcatccaaggtatgcggcggccgttctttttatatcccgaacgcgaggccgaggacccagtcaaatcccaccgacccgccgaaatcgcggattctgttaggcttcggtgctcgtttcaacgaggaagacgcctggaatgccagacccaccacgcagcaacccaaagcgaggcaagcgtgcgtccaaggcagccaggtgggacccaccggtcggtcctag

SEQ ID NO: 29867 - DNA, 420 bp, Zea mays
  Peptide Sequence Number=SeqID_73242
atgaccctgggtacgtctgttacatggccgaggctcgggctacgctcccgaggtaccctaggacatttccgagaccagcgggaacgatttgtaatggaatcccaccggagggaggcaccgagccctcggaccctatcaaatgggtccgggtccagcaaatcacctgcagaacaaaccgtaaagactgataagcacggattcaagtcaaggcctcgtctaccaagggacgcgatctcgtctcacccgagcccagcctcgggcaggaacagtagtcccagacagattcacgcctcgaccgagggcctcttcaggcatagggcgcaccctcggctcgcccgaagccaagctcagccagactttgtcgtacagcgacctcggccaaatcgccttaccaaccgaccgtattgcatgcacatttaa

SEQ ID NO: 29868 - DNA, 366 bp, Zea mays
  Peptide Sequence Number=SeqID_73243
atggcgttttgccgttttctcatgcttgtcgtcggtcccaccgcccacgccggtctcgttgctgccgccggtagtcagcatcttgcgatgcgatgccagtatgtctatgtcactgcaatattcacccatattctcattccaaaattagttgcccggtgggaaagggggaagaaaaacacgtcggttcttccttctccacgttgtgcgtgtgcgcgtatccagatccccaacccctatcattgcatggtcgccggcgccgccagaccgccgtcgccgtcgaagcagcggaccaaccaaaccacctgccactgccgctctgccagcggcgacgagcactacaggaaactggttaaagaacgtgggtga

SEQ ID NO: 29869 - DNA, 327 bp, Zea mays
  Peptide Sequence Number=SeqID_73244
atgaacgtatgtgagctcactcttgctgtctcacaccccccacaggtcaagaacaggtaccgctggatgaggcgcttggaggatgctgtgatcctcgggcgcaacagggagctccgcctcgcccgacctcaggcctcggcctcagcctcggcctcgggagagggtctccgcttcgcccgaccccaggcctcggcctcagccttagcctcgggaggagtcacatcctcgcccgacctcggcctcggcctcaggagaagtctccgcctcgcccgacctcgggctcagaccgaccgcgccacaggggatacattattaccctacccctag

SEQ ID NO: 29870 - DNA, 354 bp, Zea mays
  Peptide Sequence Number=SeqID_73245
atgccgacgtggatccaccacggcggccgcatgctctacccctgctacgacggcgactctatttgtcgatgtggagggtcactgattgtcgcatccaaggtatgcggcggccgttctttttatatcccgaatgcgaggccgaggacccagtcaaatcccaccgacccgccgaaatcgcggattctgttaggcttcggtgctcgtttcaacgaggaagacgcctggaacgccagacccaccacgcaacaacccaaagcgaggcaagcgtgcgtccaaggcagccaggtgggacccaccggtcggtcccaggcgcacagcgcgcagctcccctggcggaggttgagcagcacgtag

SEQ ID NO: 29871 - DNA, 2322 bp, Zea mays
  Peptide Sequence Number=SeqID_73246
atggaaggatgtgccaaggttggaaggagcgacaggcatcatggaaggaaggttgtcgaaggaagggccgcgaagagagcgcccaagaagcagaaggttctggagtcctccgacgattctgatacggagcagcagcagcagcttcaggaggaggactccgacctcgacgtttcctctgattccgacgccgaggagctctctgggtcggacgctgaggctgacgagctctcgggctcggacgccgatgctgacggaggctcgacccgcggcgacgacatggatgatgacgacgacgacgaagatggtgaaagcgatgatgactctcttgcggacgacttcctcgctggtagcgacgaaggaagcgcattatctcctcaaggatttaatgagcttcggacgaaggtcttgagtaaaatatcacgaaggcacaggacgcagcctgtaagaaattacaattatgcccttacaaaagattacaattatgactcagacccttatggactaaaaaagggtggtgactctggtctggagtcagatgggtctgatgaccttgaggcaaagtcacgagcaattgacgagcagaaactcaaggcggaagaagatgcagaggaggaacttcaaaccaacataagatcagaatctgatgaattcagattacccacaacagaggagctggaggaagaggcacacagaccgcctaacctaccaaatctcaaaaggaggatatccgaaattgtacgagtgctctcaaacttcagcaaactgaggcagaaagatgttccgcgaaaagattatatcaatcaactgaaaactgacgtcatgtcatactacggatataatgattttcttgttgaagcgttaattgagatgttcccagctgttgagcttgttgagttactggaagcctttgagaaaagaccgcctgagtgcttgcggacaaatacactgaagagccggaggagggatcttgctgctgctcttataccaagaggatttaatttggacccgataggaaaatggtcaaaggtaggattagttgtctatgactccaccatttcagctggtgctactactgaatatatggctggacattacatgaaacaaggtgcaagttctttcttgccagtgatggcacttgctccacaggagaaggagcgaattgttgatatggcggctatgctgtcatatacaatgaccaatattagaattgattattctcttatttacagagctgctccaggcggaatcatctatgcaaatgagttcaatgagaaaaggttgcatgggcttatgggaaacatccatcgaatgggcgtgacaaataccataatttgtaactacgatggtaaagagctacccaaagttcttgggatgaattcggttgacagagtattgctggatgctccctgcacaggaactgggaccatttggaaggatctacagatcaaaacttcaaaggacattgaagacatcaggaactgtgcctttgtccaaaagcaattgctgctagctgctattgatttggttgatgccaactccaaaactggtggttacattgtttactcaacttgttcgataatgatcccggagaatgaggcagtgattgactatgcacttaaaaagagaaatgtaaaacttgtgccttgcgggttggattttgggcgtccaggattcatccggtaccgggaacatcggtttcatacttctttagaaaagacaagaagattttatcctcatgtcaataacatggatggattttttgtagccaagctgaaaaagttaagcaatacaatcccggtgacttctgagcagcctaaagcgtccgaaggagcagctgagaaggccgatggagaagatgagaaagttatttctaatgaacaggagacagctgttcctggtaaagatgaaaaaactgtgcagatgataaatcataaaaagagtaaggtgactaataaaagaacaagtgtgaccaaagaggctggagggcataaacgtgaacctaataggtcaggaaagcatctcaataaaaataaggataccgataccaaggaagttgatggccctgaaagcactgaaacaaatggagatgggaaagaagagcaacgtgaacaaaccaagcaaacgagccacaaaaggaagatagattctgttaaaactaaaaaatctggccctgtgagcttctcgggtgttcaagagaagaatcaggtgagtggcaagaagacaaaaaggaaatggcaattcaagctgaggcgagactgggaagctgaaaagaaaggtaccaagaggagtaagacgagtgacatatctgtcagtgggaactga

SEQ ID NO: 29872 - DNA, 420 bp, Zea mays
  Peptide Sequence Number=SeqID_73247
atggcgagctcatcggtgctcgccgtcccctccatccctctccctctcccgggcgcctataaaaggacccgcccgagccccgttccctccacaccagctccgaccatctcctccgctttcccccgagccaatcgagctagcgccgccgcacttccccgtcgctccggtgagccccgctcttccctcccatcggaagagggatccgatcctccggaatttatagctccggaagaagggcaagaacccgacccctccgagataaacctcttgtgccaggaaagcttcgacgaaggcaagtccatccttcccttgatgcattatttacctatttctctctaccactgcctaagcctggaatatgggatgggaatcgaattgcatggtgagcatgagagagcccgcattaacaatcacctttga

SEQ ID NO: 29873 - DNA, 705 bp, Zea mays
  Peptide Sequence Number=SeqID_73248
atgcctcataatatctgcaaagaagggctacgctccgataccagctgtgacggaacctcccaagtaattaggcccacctacagttgtccttgtctaacagacatcagacatcctgtagatgttcccaagtcacttgacaagttcggtatctttcctaacctcaccaggaacgtttcacccgtcttgcagacattacagaacatcggagataaagaaatgcggaagcgattacataaacttacatttattaaaaaggtttcaaggaaggtaatcaagtttaaggaaggtaatgcaaaaattgttttatcaagcaactcctatcacctaatgcaacaagcaagtgagatagattttaaaaacatcaagggaggtggcaaatgcaccggggcttgccttcgttcacagattgcagataagccctccaccttctatctcttcgcaaaccaaagtccacgacggcgctcacgagcggagatactccggcgagcctctgtaccggtcgattggggcaacgacaaggttctccgagcaacagacatgaaattggctaccttaatcatttccccccaacccaattgcatccaagaccaactaagaagctctggccacggtgaccgaggacaaggcggcaagattgtcgtgttcccggcgatgggtggcggtctagttcaattgggcgggtctaagagctttaggagggcctag

SEQ ID NO: 29874 - DNA, 591 bp, Zea mays
  Peptide Sequence Number=SeqID_73249
atgcagattatcactgaagacctattattggagccacctgaaactgaaagtgatgtcatccgtacagagatctcggatgacatccctttggctagtgatccagtcgggcaagaaataacccgggcagtttctcacgcttcttcgaccttagagggtggcctagttcgtgggaacacactggctctcgacgttgcaggccagggtcgcctagctcctgtggatacggttgagggtgcttcggcttccgaaggtgtcgctgaggataacctagcccccgagggtggtgctgaggatcacccagcccccaagggtgccgagcttggttgctcttcggctgcttcgatggacgttcacgtcggatcgccatcggttcaatctgaggaacttgtggtgatgagtcctcctactgctcttgttggtctggtcactttagaggccagtgacccggatgttgggaatccgccgcctgctgtcagagctgaggtctccctaagtgatgctcacagtattgtttctgcctgttgggggccttcgtcctccgaaggtcctcaaaaacgtaatttaacagtgttttccaagtatggtttatag

SEQ ID NO: 29875 - DNA, 192 bp, Zea mays
  Peptide Sequence Number=SeqID_73250
atgacgactgtcatgaccccctcatctcatccacctgtgcccacatccgagcacaagcaccgtagccgtcatcgtcgcaagctcggagaaagcgaggatccgccgcaaccagggcgcgccgccaccgtgcgcgatgtcggattggggaaagagatttgggccgtcggatttggtgtcaacggctgtgattag

SEQ ID NO: 29876 - DNA, 459 bp, Zea mays
  Peptide Sequence Number=SeqID_73251
atgactcctctccaagatggtgagggaattgctggcatcacggtacaatctatccagattgtcatgggaatcgagaagtgttcgcctctcctcctacaagcaataagagcactgaatatcgagacaaaggcgcgaaacagaagcatcaggaatagcaaggaaaatctaccttgtgagccctcttctctgaatcaagttgagcgttcaaggagttcagggtccgagcgctgtccaagaatgcagaaacttggttcagatcagcctgactctgggcatacttttcctcagcatcggaacaccattgagtcagagctggaacgtcttttgaacttcttcaccttctatttcggcggtattcgcattgacttttcgtgcttcgccttatatttcggcggtatttggctctgcattgcctttggaacgacttttgagcagaaaacttacactgcgctcccttag

SEQ ID NO: 29877 - DNA, 351 bp, Zea mays
  Peptide Sequence Number=SeqID_73252
atgtccgtcgtcttcaagaacaagatcactctcagcccaggagtcgtgttccgcttcggaaccatctcgtacatagcggacataaaggggagattggaatcattacccatctctgaagataagcctaccatgcaggggaggaacctccccaacatgatgcccggtgatggagaaacagacaccaaaatgtacggagacatcatgaagccggagaatgggacccgacgcaacccgtatctcgggacgaagcttcagaagtgggagaaactcctgatgaacgagtacaccgagaaagacgcaactcccgccatcgcgatcactgacaggctcaagaacgagaatgggaactag

SEQ ID NO: 29878 - DNA, 516 bp, Zea mays
  Peptide Sequence Number=SeqID_73253
atgcgcaggggcaggagaggcaggggatggccttgccgggctgacgggaaacgcaagcgtcctccaagtcctccttcagaagaatttggggattcagagtattcggaggaggtttcctccgagtttgatcggtcgcctgctccatcgtccctcgtggcgtcatctgaggactcggacgactccataggactgtccgttgcagcacgggcgtaccagcgatccatggacaactccatgggactgtccgttgcagcgcgggcgtaccgacgatccatcgagcgcgccggactctgtgggtcggatgactcggaggaggtctccttggaggagatggaggactcctccgactccgaggagtggagcggcggcgagggtgacggcagcgagggtgatggcagcagtggcgacgatggcggcaagggcagcaacgacgatggtggcgaagacggcaagggcgatggcaagggcgatggcacgagcgacggcaagaccaactgcataatgccgctggcataa

SEQ ID NO: 29879 - DNA, 294 bp, Zea mays
  Peptide Sequence Number=SeqID_73254
atgatgctcagcggtggaaaggatcagacagagagacagggcggctgggagatgaagatgccagcagaaaaaaatcagaggagggagaggatagggatggcacgccgtcaggaaaaaatcaggaagcagatgatttgctgctgcgcgaggaagagccatttggctgggaaggagctgggcgacttcagcagattttcctctgcagctcctagagataaccacgaggacatatcctgtgcaatcactcattttggtgcaagcgtgcaatcaaactatccagagcatccaatctag

SEQ ID NO: 29880 - DNA, 261 bp, Zea mays
  Peptide Sequence Number=SeqID_73255
atggaattactcagcaagtcttacccgactaaagaaaagactctcaagggtatgctggttatatgggagtcaaggatttcaaggagggtaatcaagatcaaggaagggaaaacactaaagcagcagccgcatcgagatggacaggggcgcggctggagcttggagacggactggggcagggagaggcgaccagcgcgcaagggagacgagctggggcgcggcaccaggctgaggctctgcgcagggactccagggagttga

SEQ ID NO: 29881 - DNA, 195 bp, Zea mays
  Peptide Sequence Number=SeqID_73256
atgtggaaggatcgggtggagcatgccaaggatatctgggctatctactcagatacggacgagaagaagagagacaggtttaggagggggctcaacactaagctccgtgaccgtctcaacaccgtcagggccaacagctacaatgagttggtcaacatggccatctcccaggaggactgtatcacggctcgttag

SEQ ID NO: 29882 - DNA, 153 bp, Zea mays
  Peptide Sequence Number=SeqID_73257
atggcggctaggttgactgtgctgcacaacctaggattgtcctcaccgacaggtggtggtgcaacctctccaagtggctggactgaccggtcacgggacggcgaagcggacgctccacgagacgggaagtggactagctttatgtgggggtaa

SEQ ID NO: 29883 - DNA, 372 bp, Zea mays
  Peptide Sequence Number=SeqID_73258
atgtgcaagggaccagaaacaaccttcgtcgcttactcagttaatacagccaacctggccattgcaaagatggggtttagatttgttgggtccactcccaccagcacaaggaaacttgaagcaggcctaaaaatagtttcagcggccttcggaatctgctttgaattgttaatcttcggcatcatcatcctacacacaacaaagccgtataagggcacagaagtcaccgtgccccgctattacttcgtcaagcgcctcgacttcgccttcaatgtgttcgaagcagctgccaaaacccagacacatgttccgaagctctttcaaagattgctgcagcttcgtattttcgacagcttcggtgtaacacccctg

SEQ ID NO: 29884 - DNA, 657 bp, Zea mays
  Peptide Sequence Number=SeqID_73259
atgaacataagaccggcattcaaagtgccattacaaacggaactccggttccacctccgcggcaacgacaacgacccccgctccgggtggccgaactgcagcagcgatggcctcagggcggacgctgctgcaaccttgccctcgcctacgccgacgctcgaggggcgaggacaagggccgtcagccctccggcagatccccactcagatcctcccggacgagtggggcaccgacctccgcgtggaggcgtcgtaccggtgcaaagtcaggaccaccccagaacgcgaacgccgccctggcagcgcgcgacatcttgggcggtcctcccgtgcgcacggtgcaacaaccgccttcgcggcaggagggggcaccgggagccaagccggcgagtccgacgcgccgaggctgacgacgcccgcagtcgaccagccccgcgttgtcgaagtccgcccctctcgcagggccagtgagcgccctctccctcgaacgatgaaggagaggctgacccacgaaaccgcgcgggaggtagagctccgactcagcccagcctccaccccagcgaggatgatgaacatccttgaagctgagggtgggaccaagatcgcagcctggcttgcttcaccccacccaggggctggtggtcaccgtctcgggtga

SEQ ID NO: 29885 - DNA, 735 bp, Zea mays
  Peptide Sequence Number=SeqID_73260
atgcaggcggcatgcaaccgcaccaagggggcgcaccctttcgactccgacgcacccagcatgggggcccaggcccacacgtcatgtaaccggcgcaccggttactacgtgcgaaatgggccggtaggcgggcggaagcagcggtcaagtcgtctgcaggctcacgtcccctcctgggacagcgagagagccctctcccacggtgacaggcggcacctttggcaggcgaagcaggcgacgcttcacctccgccataatgaccgcgtcaaaaaagggaccgggaaaggggatactccgaaagggatccttctccacgaaggaagcgggccccgagcccccctactaatcagaggttcgaagtctgggccctcgaaagggttcgacagccgccttagagcactcgggctccgagccctcctactgatcagaggttcgaaggctggcccctcggaagggttcgacagccgcctcagaccactcgggctccgcgcccactacttatcggcgtttcgagaccggggggtccctgggccgacgagtgaatgtcgccgcgtgccccagcccagatgggtcggcgcgaggccgagcgcgaaaggggggagaaaggtggccggagaccggcgtgagagaggtggaaatcccgcggccttcgtgttcgtcccgcgcccaggtcgggtgtacaatgggggtgtagcagagtgctacgtgtctagcggaggagagctagcgccctaa

SEQ ID NO: 29886 - DNA, 447 bp, Zea mays
  Peptide Sequence Number=SeqID_73261
atggcggtggcaggcgggcggaagcagcggtcacgtcgtcagccaagctcacgtcccctcatgggacagcgagagaaccctctcccacggcgtgaagacggcgcgcccgtgttccgttcctcgaacggctcgcgcacgcgcaacggccgccccgcgaaccactcgtcccgtcgcattaactctgcggcgggacaggcggcacctttggcaggagaagcggggaccgggaaagggggataccccgaaagggatccttctccgcgaaggaaacgggccccgagcccccctgttgatcagaggttcgaaggctggcccctcggaggggttcaacagccgcctcagagcgctcgagctctgcgcccactactagtcagaggttcgaaggccggccccccggaagggttcaacggccgcctcaggccactcgggctccgcgcccactactga

SEQ ID NO: 29887 - DNA, 534 bp, Zea mays
  Peptide Sequence Number=SeqID_73262
atggtgagagaacgaagaacacaaacaaacacaatgagcaagaacacaagagacacaagatttatcccgaggttcaatcacaccaccaaggtgccctacttcctcgttgaggtgcccacaaagagccgggtctctttcaaccctaatcctccctttgccgaccacaaagatttgaaatgggagaggcaagaggtgtgtgagagagagtgggaggtgtttctcaggttagaaatggagttttgtgcgtgctctgctgtggggaagagtgtgggaggtgtatataaaggtgacccaaaggctagtggctgttggggaaatctgactgaaattcggttgaaccggtttcaaattcggttgaaccggattccaccagtcggttttcggttcactggcggactcagccagagactggaccggactcaaattcggttgaaccggtttgaaattcggttcaaccggtttcaaattcggttgaaccggattcaaaatttggttgaaccagatttccaaaaatctgcacatgacttttcctga

SEQ ID NO: 29888 - DNA, 555 bp, Zea mays
  Peptide Sequence Number=SeqID_73263
atggcgtcgctgctccagctccccatcgacgctccgagatttgtccgccccgctgttccgcagccttcggcgcacccctgctaccccgactgtccctgccctgttctcgctctctatggcgtgagcatcggccggtacgggtctatgctgctcacccgctgccctgagtgcgaacgtctagagccactagtgaggctcatatcgaaaaggtcagagaatggcaactttggtagggaattcgttaagtgtgaaagcaagccacgcctagggaagaaaaaatgcaaatttttcatgtggatggatgattacattaagatggtcgaagggatagggtttactagcagcctaggggagatgatggcatctaattttggggacgaacgagtggcgacaattagggcagatgttactgcaaactgggacatgtttactgcagaactgaagaagatgagtaacaacttgagcgacttgaagaagatgtttggagttttgtatgcttccatgatttttattgccttgcttttctttattatgaactatggttgcaagcattaa

SEQ ID NO: 29889 - DNA, 594 bp, Zea mays
  Peptide Sequence Number=SeqID_73264
atgagccatgcgagacgaaaagaagtcttcaccagccgcacgggggatcggaacattcttgggtcatcgacccccggtaacctccagcattcgcgccgaagactcccggagctcgggcgaagacatccttccccgagggctgcgcacgtccccatcaactccatagcaaaactatcggagacccccaatccccccactgcggtacctatttttctcttcttagtggttggggcggcctcctacgaagggccttcctcagtcacggccactggcctcttccgcggcggtccacagcgtcaaccccaggatagccgccgtatggcaagcgattcagctcgaagaccctattcaggcggacgttggatccacggatatcctaactccgcagggcctccgtcctcggcacataacgccccacaatccgcacaggcccatcttccgcttcacgcacgaatgcggctggatcccggccacgcagatccagagcgaaggccggacttcgcacaagttgatcgcccagggagggcatctggcgagggcatacttcgcccaacgcccagccatgcgccaagggccacactctgtaaccgatga

SEQ ID NO: 29890 - DNA, 1392 bp, Zea mays
  Peptide Sequence Number=SeqID_73265
atggagaaggaccgtcaagacgctgcgcagaagcgtcgggcgatcgttaggatcggggatcctttgcgcgaggcgaagaaggcgcgggggagcgcgaaggctgctgcccctggcagtagcaaacctgtgccggctgcgaagctggccgatcccgggtacatcaaggcgtcggcgaggtcggatgtggggcaactggctgttgtcccgcctccggtggcaaccacttcgtcaacggtggtggttggggcgaagggtgtcgcgcgggactcgtgggccaccttctgcgagagcgacaagattctgtcggccgctgccgctaaggacgtggcgggttccatgtctcagcaactgaggcaagcgtcgcagcagctgtcacagcagctgaagcaaacggccgactttgccgaccacgtcgcgtcgggtgctttgactgcggactttgctaccaaggtcgagagtctccgggcgcaacatgtggatgctgtgcgggagaagtcggccgcggaaagcaaaaaccgcaggctatcggagaaggaggagctgggggtgctcccgaccatcgtgacgggtttcatgtccttcgcctccctcgtcacctgcgagggggccatgaatgctttgtcccgcgaggggtgcaggcattatgaggtcttcgaccaagcggacgagaactttaaacgtgaaatcttcaaagtcgaagaccctgtgctgaagcaatcggcaggggcactattcgataggatgtggggcccgcacgaccgagagacggtcagggagcggtccgaccgggcaatagatcagatggcgcacgccgaagacgtcgaggaccttggtggtctggatggcgcgccgcccgaggccgcagaggtcgatccggtgccgccaactgatgccgacgagagcccctcggcgacccctgcgcagattgcagccgacgaagaccccgcaccagcccctgcgccgacgtgtgaggacgcctcaaagacggtggtcgaggcagctaccaaagaccccgcaacggtggccgagccttcgcaggttccgatgtttgggcctgcgcaagcaaccactactgacaataccgattttgcggcggagactccaattgtagtgcccgccaatgataatgtgtctggctatgtgtctgaatgttttgagtccgacagtgagtctgggagttcgtttccttggacggaggagtcctcggacgaaggcttagattattttgttgcgttagatgtcgctgcagtggagccttcgccgcgcgtggtgggttccgaggggctcccgggtgaaggggagctgcgaaatctttttgagggtgaggaattgaggataatgttgttcaactacagggagatgggtatcatcccgaaggttgagccattgtaa

SEQ ID NO: 29891 - DNA, 150 bp, Zea mays
  Peptide Sequence Number=SeqID_73266
atggggaatcgggctcggtcctggagacgggagaggaatggggaattggcgatagagaaatttgggcccacgtttaaggaatctagtgggatctacacgtcagtcgacagcaactcaaggaaacggtacggctgcgacgtgtctgactga

SEQ ID NO: 29892 - DNA, 471 bp, Zea mays
  Peptide Sequence Number=SeqID_73267
atgaagcctctttgccgagtgccagccgttggctttcggcaaaggctgacggtcgtcagctttgggacggccgctgacagccctttgccgagagccccctttgccgagtgtttgacactcggcaaacttggctttgccgagtgccgtcctgtgccgagtgttcagcactcggtaaaggggctctttgccgagcgcctaactttaccgatggctctatgcctctgctgctccgtgcctctgctgctccgcggcctgagctccggccgtttcgcgctgtcgttgcctccagcgactctgttgcccgatgtctgcctcccggtgctctgtgccccacgcttcggccaccgaggcaagcggctccgctgcccgatggctgcctcccggtgctatatcccccacgcgccccgcgctccgcgctccagaggccctgcgctctcgatgcctcccgcaggcaaggagcagcacatctaa

SEQ ID NO: 29893 - DNA, 276 bp, Zea mays
  Peptide Sequence Number=SeqID_73268
atggaccatgatcagtaccttcttcagcatgggcagtccgtgttggatccgcatgaagacgacgacgacgatggcgcttgcttcaactctatctacgtctacttcacaaactgtaaccaaatagcacctgataacaagatggcaaaaacattcgacgtggtttcagcgcacggccatcagctcaaaatggcgaccttcctcttctacgcaaacaaaactatcatcaaagcttcgcacacaagcttgcaggggtcacagtatcatcctagcctatga

SEQ ID NO: 29894 - DNA, 516 bp, Zea mays
  Peptide Sequence Number=SeqID_73269
atgggcgcgattcaggtcaaggctccgtccactcaagggacacgatcccgcctcgcccgagcccagcctcgggcaaaggcagccgacccaggaggattcacgtctcgcccgagggaaaacagcgccgcctgcactgctccgactgctgtgccactcgacagagtgaggctgacagcagctaagtccagcctcgggcgccataggaagctccgcccgcctgaccctagagctcgggctcaacctcgacgtcggacgacggtctccgcctcgcctgaccccatggctcgaacctcgacctcggaagacggactccgcctcacccgaccccagggctcggactcaaccttgacgctggacgacggactccgcctcgcccgaccccagggttcagactcaacctcgacctcggacgacggactccgcctcgcccgaccccagggctcggactcagcctcgacctcggacgacggactccacctcgcccgaccccagggctcggactcagcctcgacctag

SEQ ID NO: 29895 - DNA, 258 bp, Zea mays
  Peptide Sequence Number=SeqID_73270
atgtcgggagaacaaaccaagagggagatggtcaccgacgaaaaacccgaagcctcgggaagaaagaacgaggaacagactccatcaaaggaggctggcgacaaacacaaagaaaaatccaccggctccatcaagtcacataggaagggtgacaagaagaaaaagaaaatgaagaaggcacaagtgggcgacggggactatggctccgatgaggctgcccaaataaggcattttaatcccaagcagacgaatctctag

SEQ ID NO: 29896 - DNA, 564 bp, Zea mays
  Peptide Sequence Number=SeqID_73271
atggagcgtcgccccgcccgattcggccatgaactgctttcccgagacgtagtgaagtctctgggccaaaacttgtgccccgagcgtcatcgtgggtgggtgcccatggcggcgcatgggttcgtggctatgcaccaccccgatgagcggttcggggtgccctggccgttcttctcccacggggcacccaatggagtccaccgtgcgatcctgagaatctccttgactcgccaccgaggcctcttcaccgagaagcgtgtaggccgacgatggtggcacttattctctcgtcctctctccacactcacggttgttacagtagatatgacgatctcggtatcgggctcacaacgtttctggagaataggagtcctgacaaggaggtcccaccgagcaactacaccatatggtgagcgcggtgcggacatgacgctaaggagtgggccccgcacgtcggccacacggtggagcgctggtgtgttgtgtgggccgcgtggaggtggaatggagatgggctggtgggtgaggaatgggccagtggatagattcggtcgaggggtgtag

SEQ ID NO: 29897 - DNA, 1083 bp, Zea mays
  Peptide Sequence Number=SeqID_73272
atgacgagtttgaaacctgcgtcctctggtgcaccggacatgtccggtggcacaccggacagtccggcggacgggcgccgtttcgcctccgtcatgatgactgcctcaaaaaaggctggcccctcgaagggattcaacagccgccctagaacatggagagtcagggatgaccctgggtacgttcgttacatggccaaggctcgggctacgctcccgaggtaccctaagacatttctgagaccagcgggaatgatttgtaatggaatcccaccgaagggaggcgccgagccctcggaccctatcgaatgggtccgggtccagcaaatcacctgcagcctcgtgcgcaacaaggtctccgcctcgcccgaccccaggcctcgggagaaggtctccgccttgctcgaccccggcctcagcctcggcctcaggagaagccctacaagcgcgaaccgtttgggtgttgaaaacctaggaaaacgtgaaggtgtcagaacgttgagagagaggtggccgccatccctgacgctgctgcaaagtgaacccacacacatctcagctcagtgttgcgggtgccgcgtcgccgttggcgttgcctcccatcctgcaaaaatgctagtaatcctcagtcgttacggcgtcgctgtgcctcgcatccacatccgctccgcgtcctgcctgacacgcggacgtgaagcgctcccctcccggcctcccccggtgtccagtccagtgcggtgggcgaacggcaacgacggcgaaggcgcctctctcggtgtcatctcgaccccttgtccctttgcggcgcgcgcccggcgatgccgctcgccggaacaccgccgcggcgcggtgcggggaagccaacgccgtagcacggagttggccccggcggcctggacgcacttggacggactgttggttcgggcgtggaagctggggcaagcgatgtcagcggatgcgattagtcgcgtcgcgtggaagggatcatccagggcgacgccgacgacgagggagggtgccagcgccgtagcacggcacggggctgaggctttagcgtcgcttggaggccgcgccacaggacactag

SEQ ID NO: 29898 - DNA, 93 bp, Zea mays
  Peptide Sequence Number=SeqID_73273
atggcgctatgtacgtctcctgtgctgacaaagtgttacgactggggtaacctaatagaggcgcctaacgtccaattagatagaattttttag

SEQ ID NO: 29899 - DNA, 138 bp, Zea mays
  Peptide Sequence Number=SeqID_73274
atgtcgatctgcgcagcgcaccccatgccgatgccatggaatattctagggatagtccaggtgcccaagggcataaacatccttacatcggacgttggacactcgagcacctataaatacccccgtatagtgccctga

SEQ ID NO: 29900 - DNA, 153 bp, Zea mays
  Peptide Sequence Number=SeqID_73275
atggggtccaggcacagtgcttgctctgccgaggctgggtgccgaggttctttcgttttgctttttagtcaccctcctgcggggagaggtaaagaagaaggtgtcgaggtggaccttcaggagttccaggacgttgatgagttcgaggattag

SEQ ID NO: 29901 - DNA, 603 bp, Zea mays
  Peptide Sequence Number=SeqID_73276
atggccacggctaggggctgcagccggccggctgccgtgcgcagaggcccatccctgccttgccgcgtccgtgggggcgatctgcgcagggtcttagcaggggcctcgggtgggcggttgcgagcaaatcacgtcatgggtgcactaggcggttccttcggagaagaggaacagtctctgggcgaccgtgacgcgcggacgccagaaaaatctgggatgcgctggcgagcaggcctggcggcctgggcgtgggcgagcgccccccctgcgcgcgagctgggccactgcgtgcgagcgggccaaggggggggtgaaggcgcggctgctgggctgggcgcgctgctgcgctgcgggtgggccgcggggagggggaacggcttgggccgcggcgcgtgcgagcgttcctgcgcggagcgcgtagcgtgcacaggagtgggccagcgggggcgctgggccgccggggtcgagctgggccagcggaggggcgctgggccgccgggcgcgagctgggccacacgctcgattgggctgcgcagggaggaggcctggcgcgcgggaggagtgggaaaggcgcgggatggcctgatgcttgagaccgattga

SEQ ID NO: 29902 - DNA, 411 bp, Zea mays
  Peptide Sequence Number=SeqID_73277
atgggcaagagcaacaaacgcaagcgcgagccgactcctccatcggaggacttcggcaactcggaatactcggaggaggagttctcctccgagtccgaggggtctccggctcccgtctctcccccggcgtcgtctgacgattcagacgactcccaggggcttgcggcggaggtctggacttatatccgggtcgtcgagcgctccgggctcgagggctcggatgagtcggagtactcctcggacgaggaggactcgtccgaggagggcggtggcggcgatggcggagacgacgacgacgacggaggcgacgacgacgatgacggtgacgacgacagcaggggcggtgacggcggcagcaagggtggcaacggcggcagcagcagcaagggcagcaacaaggccagtggctag

SEQ ID NO: 29903 - DNA, 480 bp, Zea mays
  Peptide Sequence Number=SeqID_73278
atgcgggcactgttcccgcacgtcgcctaccaactcccgatgggacgcacatacgacaagagtgtaggctggcactcggacgcaaactctgcctcgcccgaagccaccctcagcctcggggcaaactccgcctcgcccgagcccgacctcggctacttgctcctcgcaaatcccgcagaagaccactccttcaactgtggcgcgcacgtctacgaatcctggagcgggctcggtgacggcctcgggcggacttctgcctgccccgagcccagcttcggcctcgatatcaataacgaaaaggcgtcagacgtcactgtatattgtagagctgacgtattactcaaaggccatttgccttaccgagtactgtgtcaaccactacggcatggacaacctccttgtcaggggctcgggtacgtgatcaagcccttggtcttgacatcggctcttagcagaaatcgggcggacataagtcaatag

SEQ ID NO: 29904 - DNA, 2547 bp, Zea mays
  Peptide Sequence Number=SeqID_73279
atggcgggcaccgcgcggattcttcctgccgccgcggcggcgctgctgctgctgctctgcatcgcgggcggcgcgcgggcggccaacgtgacgtacgaccaccgcgcgctggtcatcgacggcgtgcggcgcgtgctcgtctccggctccatccactatccgcggagcacacccgacatgtggccggggctgatccagaaggccaaggacggcggtctggacgtcatcgagacctacgtcttctgggacatccacgagccctacgacttcgagggccgcaaggacctggccgcgttcgtcaagaccgtcgccgacgccggcctgtacgtgcacctccgcatcggaccctacgtctgcgccgagtggaactacggaggcttcccgctgtggctgcacttcatccccggcatcaagttccgcaccgacaacgagcctttcaaggcggagatgcagcgcttcacagccaaggtggtggacaccatgaagggggcggggctgtacgcgtcgcagggcgggcccatcatcttgtcccagatcgagaacgaatacggcaacatcgactcggcgtacggggcgcccggaaaggcgtacatgcggtgggcggccgggatggccgtctcgctcgacaccggcgtgccctgggtcatgtgccagcaggccgacgcgccggaccccctcatcaacacctgcaacggcttctactgcgaccagttcacgcccaactccgccgccaagcccaagatgtggaccgagaactggagcggctggttcctctcgtttggcggcgccgtcccctaccgccccgtcgaggacctggccttcgccgtcgccaggttctaccagcgcggcggcaccttccagaactactacatgtaccatggagggaccaacctcgaccgcagctcgggggggcccttcatcgccaccagttacgactacgatgcccccatcgacgagtacggactagtcaggcagccaaagtggggccacctaagggatgtgcacaaggccataaagctctgcgaaccagcgctcatagcaactgatccgtcatacacttctctaggtccaaatgttgaggcagcagtatacaaagttggttcagtttgcgcagcattccttgccaacatagatggtcaatctgataaaaccgtcaccttcaatgggaagatgtacaggcttcccgcctggtctgtcagcatccttcctgactgcaagaatgtggtacttaatacagctcagatcaattctcaaacgacaggttcagaaatgagatacttggagtcgagcaacgtcgcatcagatggctcatttgtcacgccagaactggcagtatctgactggagctacgccatagagcctgtaggtatcacaaaggacaatgcacttacaaaggctggactgatggagcagataaacaccacagcagatgccagtgatttcctctggtactcaacaagcatcacagttaaaggtgatgaaccctatctaaatggcagccagtctaatctggcagtcaactcacttggacatgttcttcaggtctacatcaatggtaaaattgcaggaagtgcacaaggtagtgcaagcagctcactcatctcatggcagaaaccaattgaacttgtacctgggaagaacaaaatagatcttctaagtgcaacagttgggctgtcgaattatggtgcattctttgacctggtaggtgctggaattactggcccagtaaaactgagtggactaaacggtgcgctcgatctgtcttctgcagaatggacatatcagattggactcagaggagaagatttgcacctatatgatccttcagaagcttcaccagaatgggtctcagccaatgcttatccaatcaatcatccactgatttggtacaagaccaagttcacacctcctgcaggtgatgatcctgtcgcgattgacttcacgggaatggggaaaggtgaagcatgggtgaatggacagagcattggtcgatactggccaacaaatctggctccacagagcggttgcgtcaactcttgcaactatagaggagcctacagttcaagcaaatgcctcaagaagtgtggccagccatcacagactttgtaccatgttccccgttcgtttctccaaccaggcagcaatgatctagtccttttcgagcattttggtggtgacccaagcaagatatcctttgtgatgaggcagacaggaagtgtgtgcgcacaagtatcagaggcacatccagcccaaattgatagttggagttctcaacagccgatgcagagatatggacctgcacttcgcctggaatgcccaaaagaaggccaggtcatcagcagcgtcaagtttgcaagctttgggacaccgagtggcacatgtggaagctacagccatggcgaatgcagcagcactcaggctctctcaattgttcaggaggcttgcatcggagtgagcagctgcagcgtgccagtgtcgtcgaattattttggaaatccatgtacaggggtcacaaaaagccttgcagttgaagctgcatgctcgtga

SEQ ID NO: 29905 - DNA, 178 bp, Zea mays
  Peptide Sequence Number=SeqID_73280
atgggggcgcgggcccaccagccagggagaggggaggggctgacggtgttagcgacaacggagagggagagggactcgaccggggccggccggcggggcggggctaatttcgcccgcgggggcctagggcggccggtccacggcacggtggcgggcttccgcgatggcgaagccgccg

SEQ ID NO: 29906 - DNA, 116 bp, Zea mays
  Peptide Sequence Number=SeqID_73281
atggatgaacaaagtgcaaatcaagagcaaagccaagaggctgtttcggtctggggcaccggactgtccggtggtgcaccggacagtgtccgggtggtgcaccggaacagtgtccg

SEQ ID NO: 29907 - DNA, 171 bp, Zea mays
  Peptide Sequence Number=SeqID_73282
atggcagtcggggtcagtgaggtattttacgccaaggcagtgagccctgatctgctgacggggaatcgatggggacggttgatgttattaggaggacatggttgctggagtgacttggccgtccatcttgccaccgggatggactgtcgagtgggaccctccctcgtctga

SEQ ID NO: 29908 - DNA, 813 bp, Zea mays
  Peptide Sequence Number=SeqID_73283
atgcccctcataaaagtttaccacaatgactcagacccctatgggctaaaaggtcattctatctttaagtcggttcgacccttcatcttcggatatgttatggaccttcggcgacgaagcatggtcccaacagggaccgagaaaggggatactccgaaagggatccttctctgcgaaggaagcgggccccgagccctcctactgatcaggggttcgaaggctagcccctcgggagggttcgacagccgcctcagagcactcgggctccgcgcccactactggtcagaggttcgaaggctggcccctcggaagggttcgacagccgcctcaggccactcgggctccgcgcccactactaatcaggggttcgaaggctggcccccgaagggttcgatagccgcctcagaacacgcagagcgatggatgactctgggtacgtccgatacatggccgaggctcgggctacgctcccgaggctcgggggctgctctcgcaaacccaactccggccgaaccgttgacagcgtcaacataccagcccgagaactcagaacctgactatgcacccgggctacgaccagtcaaggctccgtccactcaagggacgcgatctcgcctcgcccgagcccagcctcggacaggaacagtagacccaagtggattcatgcctcgcccgagggcctcctcaagcaacgggcgcacctttgactcgcccgaggcccagctcaggcaggcttcacggagaagcaaccttggccagatcgccttgccaaccgaccgtatcgcaggagcattcaatgcaaggatcgcctga

SEQ ID NO: 29909 - DNA, 507 bp, Zea mays
  Peptide Sequence Number=SeqID_73284
atggccatgatggtttcaacatcggaaaagatgtgcctctgccaggaccgtcttgatgtaggcttgatgatcgaggaccctttaactggtcgcatgcctcgtcatggaggctgcgtatcccagaggccttacgtcaggctccacctgttggcttacgtcacgtgcagtaggccacgcggcagcatcgggtctccgcctgggcggggagcagaagcgtatacgacaaggtccggacacgtgtcggctccggaccgccgcctggccttgattaaggccagggtattctctatcccagaatcccgggaccctactgtgagcagcctagaccccacacaaaggggtctggatcccatcctaggggtccggtttgcgcccgaggaggtcctggaccttacccggaggcccggtctgtacatacaggggttcggcacctccgcacgggcgtctgggcccgctggtgatgcccagagtggacacgcggcggtaccggacctgcccaggtggtga

SEQ ID NO: 29910 - DNA, 1050 bp, Zea mays
  Peptide Sequence Number=SeqID_73285
atgcaggcggcatgcaaccacgccaagtggacacgcttctccgactcccgacacgccagcatggaggcccaggcccacgcgtcacgcaaccggcacgccggatgctgcatgcaagcgactgcaccaccacttgcgccaccaccgcgcctcctcgattgtggaaccaataccgcgggtgggagcagcggtcacgtcgtcagccaagctcacgtcccatccgggggcagcaagagaaccccctctcatggcgtgaagataatgcgcctgacaggcggcgcttctggcaggagcagtgggcgacgcttcgccttcgccgtaataaccgcgccaaaaaaaggctggccccccgaagggttcaatagccgcctcatatcgcgtgggccctacacccactactggtcagaggttcgaaggccggccccccgaagggttccacggccgcctcaggctactcgggctctgcgcccattactgatcaggggttcgaaggttggcccccgaagggttcacagccgcctcagacgccgagcgagggatgaccaggggtacgttcgatacataaccaaggctcgggctgcgctcccgaggtaccctaggacatttccgagatcggagggaggcatcgagccctcggaccccgtcgccaggggaccgggtccggcagatcacccgcaggtacttttgggcgtgcctctgggccccaagccgacccctaacgaacggggcacggacgtccactcggattacccgcttgcagctcaccggagacaccatgttcggcgcccatcgagggcaacatggcgctttcccccctcctccttgcggaaaggcgacgcaggggcgtatgtaaaaaagccgagtctgtccctgatcgccctctcaccctgtgcagaggctcgggggctgctctcgcaaacccggctccggccgaacccgttgacagcgtcaacataccagcccgagaacttgggccccgaccgtacacccgggctacggccagttcgcatgagggaacaaccagaccagccgaagcattacgcaaggcattaa

SEQ ID NO: 29911 - DNA, 741 bp, Zea mays
  Peptide Sequence Number=SeqID_73286
atgggggatacccgccgtcttttcgcctcatcgttggaggaacgcaactccgtgggagttgctcctggatggggagaggcaagccgggctgtgatccccgatcccgccctcagtatcgagggtgttcgtcatcctcgctggggcggggagcgaggcgagccggggctctacctcctgcgcgggtcggtgggccacctcttcttccagcttctggtggtggcaatcgccctccagccctgcggcagagacatcctccagccatgccggggaaggcgaactgttgctacccagctaggatgcaacattccgccctctccctcgcattcgcggcgaggacggcagcaaggacctgccgcctcgcctgttgattatctgaaccgcttcaccaagcatgagtcgccccgtgtcaaggtgacgagtgagccgggttgtccgttagcgggaccgacgccggagctggtcagccgaggcctcgggtcgggctggcgcccttgggagatggttggccgaggccccaggggtaaccggccgagccgcctgctcgggccggattcccggagaagtccctggcagcgattgtccgggcgtgatgatgacgtcgtcctccagagtggggatccttggaccgcgtcgccgtccgaggctaggtcggaccttgctgaaggtgtcgtcgatgccgagggtgctactgcccccttccagcgtcaagacccgagcctgcaggatcagagtgtcttgtag

SEQ ID NO: 29912 - DNA, 162 bp, Zea mays
  Peptide Sequence Number=SeqID_73287
atggtgggtacaagtgcggtcacagcacgacggcagtcagggtcactgaggcattgttctctggaggacatggttgctggagtgacttggccgtccatcttgccaccgggatggactgtcgagtgggaccctgcctcggctgaggaggagcatgaggagtga

SEQ ID NO: 29913 - DNA, 1614 bp, Zea mays
  Peptide Sequence Number=SeqID_73288
gaatacagagaaattactatgagaagaattgagcacttgaagcatcactacaaaagatatgatcaatacaccgttttggtgcgaggaattccaacatgtccagaccatggggcttacgggtgttatgtggatcacttcttctcaaagcattatcggacataccgatcataccaaatcgtacatgacataggaaacattgaggcattgcagaagctggcgtcctccattgagaaacggatacagaggaaaagggagaccagtaaatgtagtctcttgggacggatctggagcaagtttacatcggatgcaacaggcattcacaaccatgaagagaaactgaaaaatgtgcaagatactatccgcctcctacagtgtgaaaatatgcttaaacaaaaggaggtacctgtagcctttgtgtcgttcaaatcccggttggaggctgcccaagctgcggagacgcagcagctcgccaatccactgtcgctggtcacaacctacgcgcccgaaccaacggacacgatatggaagaacctgtccatcccgttctggcgcatggctacgtacaggctcggagtcttcgctgccgcggtcttgctgacggtgttcttcaccatccccgtaacggccgtgcaggggatagcgcagttcgagaagatgaagaggtggttcccgccggcgcgagctgtgcagctcatacctggcttgaactccgtggtgaccgggtaccttccgggcatgatcctgaacggcttcatctacctggttccttccgcgatgctcggcatggcctcgttcgaaggctgcgtcgccagcagccagagggagatcagggcctgcgacatggtcttctacttcttgctcggaaacgtgttcttcctcagcgttctctcgggctctctgctcgaccagatcggagagtccttcacgcaccccaagaacatccccaaccgtctcgcgagcgctgtttctgcgcagtcggatttcttcatcacgtacatcttgaccaacggcatgtcagggttctccttggaggtccttcagttcggtctgttgatatggcagtttttaaaggcgcgttcaattggacacagcgaggaaccatatctgtatggcttcccttacttccgagtcgtgcccgtggtttccatcgcaatattgatcggagtggtgtacgctgtggttgcgccccttctgctcccgatccttctggtgtacttcctgctcggttacgcagtgtacatcaaccagatggaagatgtttatgagatcacatacgacacatgcgggcagtactggcccaaaattcaccactacatattcctatcaatagcgctcatgcaagtcaccatgataggactgtttgggctcaagtcgaagccaggagcctccttggccacagttcccttgcttgtgctcaacatccttttcaacgagtactgcaaggcccggtttcttccaactttcaggcatcgaccagtccaggctgccaatgagcttgatgaggctgagggtacgactgaaggcgacgttgacgatgcaatctgcgcttataggccaccatggatgcgtccgacgaacctggaatctagttctgtggagcctttgaatgtttga

SEQ ID NO: 29914 - DNA, 204 bp, Zea mays
  Peptide Sequence Number=SeqID_73289
atggctcaccagagctatggcgtccatcgcgagatgtgttccatcgtgggcgttcgtctccgcgcccgaatccgcgctcgctaccggttggagaaactaggctccgtagctccgggtgcactactcaccggcgagagcagccgcacgggctatgggcgccgtcgtgcgcagccgccagaggaagaagaccctccgcgcgtgtaa

SEQ ID NO: 29915 - DNA, 434 bp, Zea mays
  Peptide Sequence Number=SeqID_73290
atggacgcggaggggttgctggcgtcggcggcgatcaatctgggactggcgctggtggcgctctcgctcttctccctgctcaagaagcagccggggaacgcgcccgtttaccgtccccgccggatggcgaccggcgaccttcgtgctgatggtggctttctaccgctcggccacgggcgactaaccccgtcgttccggtggataggcgcggccttccggctctctgaagacgacgtgctgcggcgccacggcctcgacgctctcgtcatcgtccgcctcttcaagtttgggatcaattgtttcagtgtttgctcgattgttggactactggtccttgctccaacaaattatactagtgaaggtcgcgctgaaatcagaagatcgaattccatggaactgttcacggttaccaatgtgacacggggatctaatag

SEQ ID NO: 29916 - DNA, 825 bp, Zea mays
  Peptide Sequence Number=SeqID_73291
atgtcggagctgagcgtagaagcagcgccttcatcgattgaggttcaagtccccaagcaggctaatggcggcgatgttgctgctgccgaactcgatgatgtatgggaggatgtttcaggttctcctcggcacgcggataccttagacagagaatggatccacaggcagagtcagtttcagaagatgggatatcgtgatggtgtaacagaagggcagaaggactctgcccaggaaggcttcaatgttgggttcaggcaatctgtaaacgttggctacaaatggggccttgttcgtggggttggcagtgcgctagctagtcttcctgacagcttgaaagaaaaactggtgccggatgttcagcgtagggggaaattacaggacctgcaccgctcagtgcaagaaatatcagcagatgatgctgtccagatgttccacgagagtatctgccagagcaaccgtccttccgatggatcaggatcacacgtaacatcaacctcggatggagctacagaatcaaataggatgaaaagcctatcaaaggaccttgtgttgctgttgcgcgaatgctcggatattaaatggtcttcctgtggaagtatagtatctgtgattaaccctccgcgtagaaaatgtttatacaagcctcagccctcaggctcaaagcattctggtagtttcttaccgtatgattggttggcggccaaccgtaaccagtgcaccgacgggcctgtacgtgcatgtgcaacaaaagtactttttccaccatttacctgcatgcgtggagacgggaccggcgaggatctctaccaaaccaggcgggcgtga

SEQ ID NO: 29917 - DNA, 900 bp, Zea mays
  Peptide Sequence Number=SeqID_73292
atggcgcggggacttattggtttcttggagcggtccgggactccgggttgcttatccgagcggcgaccgagggaagggaggcaggcaaggcaaggccaaagaaagggaagggaccctgtgcaccgggtcatgtggcgtccctcatccgttatcatattcgaaggtccaaaagaacttcgcagccaggaattccgcccgttcgtgcaccgtgctgaggccgccctgcgcatcaagggagtgccctacgagttcatccaagaagacctgctggagaacaaccccatccacaagaaggtgccggtgctgctgcacggcgaccgcgccgtctgcgagtccctcgtcatcgtgaagtacgtcgcccctcctccccagcgaccccgccggccgcgctgccgctcgtttctgggctcaataccaagtgccggccggaggccgttagttctgtctttcttgacggagggcgagctgcgggaggggttcctccaggagacgaagaagaacctggcgctcctggaggcgcagcttgacggcaagaggttctttggtggcgactccgtcggctacctggacatagcactcagtggactgtctcgttggatagctgtgttcgaagagatgaccggcatgagcttggtgggcgacgaggacgatgacttccctgctctgcgccgctgggccaaggagtacacttcaaacaaagctgtgaagcagtgcctaccgagcatggaggatctcaaagcacacttctgtgcaaagacgggttctagcgcgtcccacattttcttgccaaaggacatcgtcacatatacaccaacgaaggatctcctagcatgcccagctattacccccttgactataatatcagcatcccggaacaatcgatcgtctttagcagagtga

SEQ ID NO: 29918 - DNA, 1086 bp, Zea mays
  Peptide Sequence Number=SeqID_73293
atgggcgcggtggcgccatggttggagcatggtaaaggaaccagatttacttaccacggtgcagcagcggcactcaacaggactcccctgtcaccggtcgcccacccaggacgcggcaagctgagggcaaatccattgtccttcccatcgcggcatggcgaagaagagctcgagcaggggctcccgagcacggcggcggcgctcggtttctctctcctctattcctatcacgacggcacccgcatctctttctctgtatcagccatggcgcgacccagaagcgcgcaatacggtattctgttgcgtttctccggtgttcggttcaaggaagatgacgaccctgccaaggcggcccaccgtcagcggcagcgcaggttggtgtatgaggtgagaccgccgagtggggtccgcatatctaatgcggcaaagggttatcttagcgttgaatctcagccaaccgtcacacatctgacggccgagagcttgtcttctcaaccccaaacaccagggtggcgaagcaaagcaggtgcggcggcgcaagcatgggcgcggtggcgccatggttggagcatggtaaaggaaccagatttacttaccgcggtgcagcagcggcactcaacaggactcccctgtcaccggtcgcccacccaggacgcgacaagccgagggtatggatcgacggcggcccatggctcctacgcttggcgctactggtacgtgcgtgatggcggcaaggtgacgtcggagcacggcttcgcccaggcaaatccatggtccttcccatcgcggcatggcgaagaagagctcgagcaggggctcccgagcacggcggcggcgctcggtttctctctcctctattcctatcacgacggcacccgcatctctttctctatatcagccatggcgcgacccagaagcgcgcgatacggtattctgttgcgtttctccggtgttcggttcaaggaagatgacgaccctgccaaggcggcccaccgtcagcggcagcgcaggttggtgtatgaggtgagaccgccgagtggggtccgcatgtcagcatcacaagcctgcccatgggcgcacggttag

SEQ ID NO: 29919 - DNA, 252 bp, Zea mays
  Peptide Sequence Number=SeqID_73294
atgaagctgtggaaggagacttccaggagttccaagactatgacgagttctaggcgtgggttagcggcaacccccagtcggctgcctgtgaaggccgtagttatctacgtttcttttccgcactttgatttacttcatttattttcaaatgaagtgttcacatgtgatgataaatggaaaaattcacatacaaaggaaaggaaattctccttttttttcttttacaaaatgggtgtcacacccggattttag

SEQ ID NO: 29920 - DNA, 414 bp, Zea mays
  Peptide Sequence Number=SeqID_73295
atggcctcggatccatataacagacgaaatggtgtgaatccggttgcccggcattctgttgtgtttagggcccagaccacttcagtgaaaatcttcccattggcgcgttcgacgacgccgttggattgcgggtggtatactgaggcgaagacaggcttggtgccgatggaggaacaaaaatccctgaagtcttggctgtcaaactatttgtcgttgtcaaccatgagttcggacgggactccgaagcggcagacgatgttttgccagaagaactttttggcggtcttcgacgttattgtggatactgctctggcctcgatccatttggtgaagtactcgatagcaacaaaggtgaatttgaggttcccttgggtcgtgggcaatggtccgacaatatctagcccccggcgttga

SEQ ID NO: 29921 - DNA, 792 bp, Zea mays
  Peptide Sequence Number=SeqID_73296
atggggaagaagaaagcgatccaagcgacaagaactcaaatgaacacaaaaatctctctctcacaagtcactaagtgtttggagtggttttggactttggagagtgttggtgcttgttcacctgagcaagtggatccaacgggagagtggagagagtgtttgcggagttcaacggggaatggcaatagctctgttaatctgctccctcaagggtactgtacgggggtatttataggtacccgagtacctaccgtcctcaagcaaggacgtttatgccctcaggaacctagagtatcctcagaatattcccccaagaggaggttacagaccgtcattacagaaaaggctattacagatgaggcccgtaacacgcttatccctgccaccctgtggggccgttacagtgggctgaatcccacttgggcttccagacacgatgaggacgtgaggctagcagacatcgtcagagtcttccctccgtcttgcaatggagaagagcaaagggcagccgcggagtccagtcgcgaagtcctcatcagaccggcgtccttggcatcgttggtgaagcgaggcgacgaaggcatcgagcgaagggtagtgtcttcgccttcgccccaacatttgccctccgcgggaccagttcgactgagtcatctggtgtcgaagacatcgctagatggtggagacgctgccctcgctcgaagtggtcccgcgggggtttttgaggtgacctttgatggacgtggcactgttggactgcgtgtttcccaaagtgtcgcgccctgtatataa

SEQ ID NO: 29922 - DNA, 399 bp, Zea mays
  Peptide Sequence Number=SeqID_73297
atggagcgggaccgtcttcgagtagaccggtttggtaaacgagaactattatcctcgccaattgggacgagcattggtgagggggatctacggaatctttttgagggtgaggaattgagaataatattgttcaattatagggagttgggcatcatcccgaagaagtgctctaagtcttcgccggaaggcattactagcctgtacgcgctgggcgatgccttcgacttgacgatgaatgtaccctcccattttggctccagcttgccccgtgattctgtctgggtggtctggacgagccttggtttgagcctaatatttgttgagggcctgtggggcgaggacgtggtctccgtcgatgaggtctttggtcgttggttcgtcgacatcaggaaccgctga

SEQ ID NO: 29923 - DNA, 696 bp, Zea mays
  Peptide Sequence Number=SeqID_73298
atggcgacatcatcgagtgatttctctgcttcttttgtctcccattcctctagctgtgaaccaaccccagagtgggatcctataccggcatatgagaaacaagcccctttgcactgggatgcagaaggatgggactttgaggttgcatcggaatccgacggcgacctcgccgactgggacgacctccagttcctcgttgacggggagctagactctgacaccagcactgactggtcttggacgtacgatggagaatcgttggatgtggagtccttcgacaacgatgacggcctaatgtctggacattggatgggcatcggctcctcggacgacgaagacgacaatgacgagaacgacgacgacaacaatgactacggaagcagtgacgaggacagcgacgacaatggcgatgatgacggcgatgatgatggcggggcaagccaatgcgatgagatgcctcccagcaagcgtcgtcggctgctacatggtagcttattctgttcctgcataaggttgcccaatctagcaccttcattcactgattcttgttccccggacaaacctactcagtacaacctgcgtggcaagagaactgcacctactcagtacaacctacgccagaagcgtgccaaaacaactcccacggcaagttcttatgtgcataacttatcttgtttcttatatcctctgttttag

SEQ ID NO: 29924 - DNA, 111 bp, Zea mays
  Peptide Sequence Number=SeqID_73299
atgcagctgctcgcgctcgtagccaccagtgcggagctcgctgccggcgtgccctggatggcatcccggtgcacgataacggtccgtctgcggattccgaggaagttgtag

SEQ ID NO: 29925 - DNA, 342 bp, Zea mays
  Peptide Sequence Number=SeqID_73300
atgcagtgcgtcgaagggctactccagctccactaccgcggcgtcgcgcacctcgacgtaaaacctgacaacatcctcgccaactcccgcggggaaatcaagatgggcgactgcatgacagccggtagagcaggaatgacggggagactggaatgcagggactcaccagaaggagaagaaccggagcccgccgccacgctagggttgaaccggagccaccagaagctcaccgtcggccagtgcacaggccaaatccgaagccgccgccgccgccacgctagggttggaccggtcgcgctcacccaagtccagttcgtgagtcgtggccccacttgtcactga

SEQ ID NO: 29926 - DNA, 330 bp, Zea mays
  Peptide Sequence Number=SeqID_73301
atggtcaggacctcccttgcgaacctaccgctgccgcgtttaccaccgtccggattttgcgcaactgaccagctcgatggggtgataagggctcgaccgcgggtacctctgaccatcttcgtgacctcctcctcttctctaccctcctacgcgcgtgagccaaagcaggcgcagcgccgcgacaagcacacatcgagagaagggaaggccaccaccggggatagccgtcgctgggtgatctctactctcggagttggatcgtggggggccgtattcgtctatgaaagccgtctgcgcctccaattcgtgttggacaccaccgtggggtga

SEQ ID NO: 29927 - DNA, 1578 bp, Zea mays
  Peptide Sequence Number=SeqID_73302
atgcatggacgacagtcgtcgtggcccaaggccaagacggcggtgaagagatggctgaacctcaagtcccattccgactgcatcgatggaagctttgggcttgggctggtggagagctctgctgacgtgtatggcggctccccgtccccgccggcgccgagctcgtcgcggcggcatcccaaggaactcagcatcttcgttgggacatggaacgttggagggcgagcggcgcacggagggctggatctctcgaactggctcgctgacgacggccttggtggtggttcctcctctcctcacatctacgttctcgggttccaggagatcgtgccgctgaacgccgggaacgtgctcggtaccgaggacaagggcccggcgcgcaagtggctggacctcatccggcgagcgctgaaccaccctccagcagcgtcgccgtcgagaagcagcagcagatggcgcaggtctccgtggcgtgacacgcaccggctccggaaaggcggccgggtgagtttctcggacctgctggcggcggaggaggacggcagccgcaggccgagcacggcgtcgtcggagccggacgacggtagcgaagcgtccacgccgtcaccgggaccgtcgtctagcagcgaggaggagccggcatgcgcggcggccagcaggcggccacgcggaggacgacaccgcgaccgctaccgcctggcggccagcaagcagatggtgggcatcctgctgtgcgtctgggtccgcgccgacctcctcccacgcgtcactcgcgtcagggcgtcgtgcgtcggcaggggcgtcatgggctacatgggcaacaagggctcagtgtccgtcagcctcacgctgcgtcccggcgttggcggtggccggggcgcgtcgctgtgcttcgtgtgcacgcacctcgcgtccggcgatagggacggcgacggcgccaggcgcaacggcgacgtggcggagatcctcaggcggacgaggttcgcacggcggggcgcgccgggccgcaccgcctgcgggacgagggcggcgccggtgaccatcttggagcacgacaacgtgatatggctgggcgacctcaactaccggctggtggcgccggcgggcagaggaggaggaggaggcacgcggacgtgggagctggtggaacggcacgattgggcggcgctgctggagcgggaccagctgcgggcggagcagaaggctgggcgcgtgttcgccgggtgggaggaaggccgcattgggttcccgcccacgtacaagttcgtggccggctctgacgcctatgccatgacgagcctcgtcgacgacggctccctgtcccgggagaggaagaagcgcacgccggcatggtgcgaccgcatcttgtggcgcggcgagggggtggagcagcggtggtacgcgcgaggcgagtcgtgcttctcggaccaccgccccgtcgctgcgctcttctccgtgcgcctgggcggcggggactacgacggggcagagcgcgcggtgggggctggcagacgagacgacggcgacgacgacattctccttgggaactacgatcgaacgcacaagctttctttctga

SEQ ID NO: 29928 - DNA, 336 bp, Zea mays
  Peptide Sequence Number=SeqID_73303
atggcgggcggaattgagctcgccggagctaaggaaagggggctggccggtgagggattcgagttagggatcaaggtgaacatccctgatctttggctcaagagcattgccctggcttgcatctgggtcggcccaaaaagaaggtacgagggcttgctgggcttccatgttgtggccaaggttttgctaccaccagaatcgaagcacgaaaagctcatcttctcccttcccaacttgttctcttcttctcctcctagtagaccatcatctccatccataggttcatctccatcctctttagataccactggaacttggaggcagacaggcaggtag

SEQ ID NO: 29929 - DNA, 475 bp, Zea mays
  Peptide Sequence Number=SeqID_73304
taaccgcggcggaagaaagggtggaggggcttaccggcggctagattgctccggtgaagtggtcgaggacgaaggggaggtctcgaggatcacaacgggaggttcacgggatgccagagaagatatgagcgcaagggattggacggagactcactggatagctcggtccacgcgcggcggcggaagaccgaagtctggtgaggttgatctcgggcctccggtgaagtctggccgggtccgagggcttgggaagcttcacgggctactggcggagctagccgaagcactggcttgcctagaggatggctggagtgggctggccacgatggccgaagctctggcggcaatggcgggcggaattgagctcgccggagctaaggaaagggggctggccggtgaggagatatggagccaggaaatccggtctgtctccctgcccaaacccgaggcaaatccaaggttttgtcgtgtctag

SEQ ID NO: 29930 - DNA, 2622 bp, Zea mays
  Peptide Sequence Number=SeqID_73305
atgccctcccatggtgggaagctggtgcgaagtcctgccttcgcgctggatctgcaaagccgcgatccggccgcctttgtgcgtgaggcagaggaaggggcggtgcggatcgttggtcgatacgtgccgaggatagagggccagcgtagctgggatatccgtgggtcgaatgaccgtttgaacagggtttttgaattgaatcgactgccgtataacggctatcccggccaagacgatgtggaccgccgcgggaaaaagccggtggtagagtctggagacgaccctgcgccggtggccgccccatcctcgaagaagaggaaactaggtactgttgtgggaggacttggggtttccgatggttttgctagagaattgatgaggacatgcgcggccccagggggaaggatgtcttcgcccgagctccgggagtcttcggcgcggatgctgagggttaccgggggttggtggcctaggaatgttcctatcccccatgcggccggcgaagacctttttacatgtcgcatggttcgtgagtggaaagtgtttccttacgggcggaatattgctgctgttgtgtcggcagtgatggacaaggattgccaaggagctgcgcagaagcgccaggcggtcgtcaggcttcatgaagctaggccaaagaggcagcggggggctgcgaaggctacggcccccggcggaggccatccgccgaaggcggccgtccctgcatccagcagggcgccggagcctgcggctgccgccggtggttccaaggctgcgaaggctgcaccggcgtccggcagagtgacggaggctgtgaagtcggcccgagggttgccgccgccgggcaagtgcgtcgccgacttcgccaccgacattagtgtggacgactatcttgttgggtcggacgagggccaacttatcgttgttccgtctgccgcggcgaccatggcggctgccgtaatgccaaaggcgaagggtggtgctcctagtgctggcggcgagatgacggcacttgctgctgtgagggacgaggcgggcgctgtgtcccgccggctggaggagatgaaggaggcgctaagtcaggcggctgacttcgccggccgtgcagcgtcgggggcccttacggccgttgtgtctgccgaagtcgagagacttcggacgcaacatgccgacgccgtccgggaaaaatcggccgccgacagcaagtgccgcaagctggcggacaaggtggccgtgctggagggggaaaaatccggcctccggcgccaattggtggaggagaggagggaggccaatgaggccctcgccaaggcgcaggctgcgctggcggaggccaatttggcacgggcggagggcaatcttgccagggagcgtgccgcgcagttggaggagcggctcaacgccctgcagagccgcgtggagaggaccgaggccgcgacgcgcgcggaggctgagcggacgcgcaaacagcttgtggattcataccatgagctgggcgcgcggaccggtgacttcgaagtgccggaccgagagctcggacttcgctgcctggagtgggtacatgaggagttgcaggcactccccactatcgtggaggggtttatgtcgtatgcctccctggtcacctgcgagggggcgatgaacgcactctctcgcgaagggtgccggcacttcgaggtcttagaccaagccgatgaggattttgaacgagatatctacaaggttgaggaccctatagtgaaggagtccgccggagccatctacgaccggatgtggggtccgcacggtcgagaggtggtcagggagcgggccgagacggcgagggctcaggcggcgcgcagcgagagggtggatgatttcggggcgttgaacagcgcgctgcttgacccgaagtcgaacccggcggaggccgtgtccgaggccgccctggggccgcccccggagactgccgaaggcactcctgacgcccccgcagccgctgcggccggcggaggcccacccctggagaccgccgaaagcgttcctgatgcccccgcagccgctgcagccggcaaaggcccgccgccaactgctgtgtcgagggttgaagatcctgcgacggtggcgttggaggcaaccgcggaggctcccacaacggctgggtcctcgcaggttcaagattttgggcctgcgcacgcaaccgccactactaattttttggcggcttcaaccgtggatggtgttaataaatcggatgggtctacatctaagttttctgattttggtgactccgggagctcggttgagtggactgaggagtcgtcggatgaggacttggactattttgcggccttggatgtggcagcggcggaggcttcaccgcacgctgcggacacagaagatgtgcctggtccgagtaccgggcgcaggcggcgaagggctgttgcgaagcgtagagtgagcggggcggagggcggtcggcttcgtgtgagtagggctagccggcaggaactgttgtccttgccggctgccgcgagtaccggtgaaggggaattgcgaagtctttttgcgggtgaggagcttaggattatgttatttaactatagggagatgggaattattccgaaggttgagccgatgtag

SEQ ID NO: 29931 - DNA, 396 bp, Zea mays
  Peptide Sequence Number=SeqID_73306
atggctgcagatgaagggggggtcacgacggcgacgacttattatacccctggtgagggcacaatggccccgaccaaagtgggagggacggaccgcgttggccacgcagggcatcggcgcaagaatcgtggacgattggagatgatagggatgaatctgactgcgagggcccaccaagaaagttccaagggcagaccagtaggaatacccgtcagaacaagtcccaaggttcttagttccgctccggaaaccaaagtggaaacaacaactaccaagtacaacgctctggacaacagggtcagaggaacaaccaatatcagaaccaacagaggaacagcactcagaccggtcaaaggtctagtggtcaacaacagaatcgtcaaggaagcgccgtga

SEQ ID NO: 29932 - DNA, 456 bp, Zea mays
  Peptide Sequence Number=SeqID_73307
atggagaccaccattgatggccatcaatggcgtgaagttgactgtggggtagacgaaccaaacacgttcgaggacgacccacaggacacgttcgaacaagatggttcgtacaatccaaaccacccggaccaacaccaactacatccctccaccacggcaagttcccatgtacccgtggtggtcgaggaaatcaatgtggatctccctcgcattcgtgtggagaacggagtcattctggaagacagctcggaggagtttctacctacgcccaccccattagcagaatcactagccttcgcagctggatcgtcatcttcagcaccgccagcaccagcagtccaagcccatgatcccggaggcgatgacccggacgactttggcgatgatgatgaagacgacgaagaagaaaaagaagaagaggagaacatgaacgaagaagtcaacaatgaacaatag

SEQ ID NO: 29933 - DNA, 411 bp, Zea mays
  Peptide Sequence Number=SeqID_73308
atggggctcccggggcttggggactggcctgggcgcaaccagggcgatctggcgggttcagacatgggcctcacgccggcgcaggagcaccagagggcgctgcacacggcgagaagcgctggcgtcgcgaagcaacggcggaggcgcaagggctcgatgaggcgacggtggcggagctccgactgcacagggggaactccgatgagcgtggactggacgcagcagggagggaaagggcacaccgaagggtgtcccgagcagctgacagtaaggcagagctcaccgtggcactggacggggcacgagcgcgacgacgaccacgtaacaggcagaggacgaaggcggggcggtggtggggctctctgcacgcgtgggcaaagcgagagagaaggcgagagggttgggcagtag

SEQ ID NO: 29934 - DNA, 426 bp, Zea mays
  Peptide Sequence Number=SeqID_73309
atgatgctggtagactacacaacggtacttgatagaacaagtgtgtcgatcgaaagcctaacacaacagggtatcgagagcgtcgtggaagtgacacccgcgagcagcgtcatgagtgatgggtctagcgatccatccctccggctcattcgagtgctccgtgccgtggctcgaactgccaccgacgtcattgtagtctccgtctccgtcagggggaaggcggcctctcagactccacttcccgctgaggcgagggggaagagtcctgctgctcctgctcctggcgtcggcgctcctgctcctcatgcaggcgatgatgcagtctctccaggtgactggactgacctgacatcgtgcgacgcagtggatgctccgccaggcgagaaggcaaaaaggggatcacagacttatgtgcagtgcacctga

SEQ ID NO: 29935 - DNA, 429 bp, Zea mays
  Peptide Sequence Number=SeqID_73310
atgggagattacacccgaggcgtccagaaactgccgagagaacttcatgactccaccagcccgaggggattttgtaactgcatcaagtacaagtttaaatggggcatatcttccaactcccaaggccgtttaaatgcaaataagtacttgttggaaatctcccttcgtctaattgttggtggatcaagaattaaatgggagattacacacgaggcatccaggaactgccgagagaacttcatgactccaccagaattccttctttctatttctctatttaagcaactagcatccaccaaagaactggggttttggttgatgttcaaggctattcttggcacggcaagagcagcaacaacaggagccggtgtatctatcgctaaggcgcatcacccttgtggttgttgtagtcggatagcacaatgttga

SEQ ID NO: 29936 - DNA, 375 bp, Zea mays
  Peptide Sequence Number=SeqID_73311
atgcaggatgcagcacgacgagcactttctcagtattgctcgttgtttagcggggtagctgacggccttgacctgaagtactacccttgccgttcgacaggcagtgctggaggtgtgattgtctctccagttggtgagggcaatcccaggctgagcagcatggtcaacctggcgccgtgctcaacacagagttggaccacgcccttgacgagttggatgtctaaaaacaggcgcagaggagcaaggcgtgctcagccagagcagcaggcacaccaggaggaggcagccccacagcagcatttgccaccgccacccccaatgaccattgagcagatgttcatgatgcaaacccaggcagttcaagcaattggttag

SEQ ID NO: 29937 - DNA, 558 bp, Zea mays
  Peptide Sequence Number=SeqID_73312
atgaggtgcgcggttttctctgtctactcttttgggttgcggaaacaaaagcagaaggctagcgcaaatggcaggggcaagcgacacctctggcaggcaaagtgggtgtcgtttcacctacgtcatgatgaccgcgtcaaaaaagggaccgagaaaggggatatttcgaaaaggatccttctcagcgaaggaaacgggccccaagccctcctactgatcaggggttcgaaggttgcgccctgcggggttcggcaaccgccccagagcactcaggctccgagccctttactgatcaggggttcgaaggctggcccctcggaagggttcgacagccgccccagagcacgcagagtcagggatgaccctgggtacgtccgttgcatggccgaggctcgggctacactcccgaggtaccctaggacatttccgagaccagcgggaacgatttgtaatggaatcccaccggagggaggcaccgagcccttggaccctatcaaatgggtccgggtccagcaaatcacctgcaggtacttttggagcgcgcctctgggccactag

SEQ ID NO: 29938 - DNA, 459 bp, Zea mays
  Peptide Sequence Number=SeqID_73313
atgcctataaagcagcctcggccatacctccccgcgtgctcacaagtcttgcccaagccagagatcactggaatttgccccgagcacgccgcgccaccgcccgccaagctttccgagcctcggccgctgtggccagctccctccagtcgtgtccaagctgcaccaacccctcggttagcttcgccattagcccgtgaagctttccaagtcctcgaacacggcagaacttcaccggaagcccgagatcaccctcgccggacttcgatcgcccgcctccgcgcgtggaccgagctctccggccggattcctcgccgccgacgagcatccccgcctgcgcacgcggactggccaactccgaccatccccaacggcgacccgcacatcatcgtgatccccgagacctcccctacatcctcgaccacctcactggagcaacctcgccgccgagtttggaattaa

SEQ ID NO: 29939 - DNA, 375 bp, Zea mays
  Peptide Sequence Number=SeqID_73314
atggagaagcagaagtctttgaaatcttggttgtcgaactgcttgccgttgtcgaccgttagttcggatggtactccgaagcggcaaacaatattttgccagaagaatttctgggtcgtctttgatgtgatggtggagactgccctcgcttcaatacatttggtgaagtattcaacggctacaaaggtgtacctgagggagtatgtgttggggacttgttctcaaatgcttcaagaacaaggcaacatagaaaatgttaatcggttaagtccttcgtcctacgaagcattatttcccttgggatataatgattttcggacgaagatgtacctccaatttgaaggaaatgaaagtacaagcgtgacgcaaaagtga

SEQ ID NO: 29940 - DNA, 417 bp, Zea mays
  Peptide Sequence Number=SeqID_73315
atggttgccccgcctcctcctccgtcggcggggaaggtgacgggacagacccggatgccgctcttccgccacgtggggaaggcgtcgtcgattccgccgccggcgggcgggctgacggccgccattgtcgttgtcacgcggcggaggaaggagtatcatgtcgtagctgccgtcgagggacatgaactcaagactcccaaaacggagcatcgtcccgggttggagaggttgatggagactacccatctggagcttgacgggaagctgttcgtcaacacgcagcaggcccctacctggcacgccaactatcggcgtttcgaccccgggggggtccctggactaacgagtaaattgttgctgcgtgtcctagcccagatgggtcggcgcgagacggaacacaagggggggaaacagtaa

SEQ ID NO: 29941 - DNA, 672 bp, Zea mays
  Peptide Sequence Number=SeqID_73316
atgtggagggccgagcacaggggcggatggcggccagatgggggctcacgaccatgggggaaatggagctgcgcagggactgctgctgctgggaggaagatgaacagggcactggaaaaaatctgggcgtccatgggagttgctgccgcgcgagagagtaggagcagggggcgtcgtgccattgctggccgagggaggaagggcgctgggagctgggagggtgtgggcagagggaggcaccatggctgctggaggcgccgagctggaaaggggtcggcgttggaggaggccgacggcgccggggaagacgagccaccggagcaaatagggatgtcgcgccatggagtaaaaagaccctgctccctgcacgctgcttcctggaatggggagcgcgagcagaggaggccgactggagcacagggagtttggacttcatggctgttggccgagctcccagcaatggggtccagggaggagggcacgtgcgccatggggtctggccaccgagcgtcgagccaagggagcaagggcgccgaccaggaacctgcaggggaaagatgccacaagggaggcagccatgagaggcccttgcttcgtggggaaggagctgacgccctggtgttcaaccgtgtaggagaaggaggaaagaggagggctggtttgggcggctag

SEQ ID NO: 29942 - DNA, 273 bp, Zea mays
  Peptide Sequence Number=SeqID_73317
atggggtccctccccgggagcgagatccaggcgccgtcggcgaccttcgccgcccctgcgcacgcgcggaccgtccgaccgtcaggcagggaatccaagccactgtaccaggtcgcggaccgtccggcccttggccgcggaccgtccgcgcctctgcagagggcaccgtcgccggtcctcgttatagtgattggcgcccgaaaagctgtctacatacttttggcgactccgctggggactaggtgtctagacctgctaaaaatcggcccatag

SEQ ID NO: 29943 - DNA, 432 bp, Zea mays
  Peptide Sequence Number=SeqID_73318
atggatactcataggcgaccacacttcgacgacactaacttctcatattataatgctagaatagcttgttaccaagaggccgttgatctaggtgtttggagagtcactcgtgacgggatgaaaccacctaaaaatctcaagaaaccaaccacgagggaggaaaaagaaattaatttaaatagtaaaggaaagaagaaggctcccactctaagttcctcaagtgatgaagaggaggaagaagaaagtgatgatgatgaagataatcaaccatcaacatcatcctctgaggacgaagaaacaatccgacgcgtcggaaaggtgacaatgatgccaaatcaaagggaaagaagacgaagtcgcaaatttgcaaatcagaggtcgacgatcttctctttaacattgacaggaaaaagaaaagaaaagagaggatga

SEQ ID NO: 29944 - DNA, 705 bp, Zea mays
  Peptide Sequence Number=SeqID_73319
atgaacgaacccactggcatacgagatgccactaccaacggaactccggttcccccctccgcaggtacgaacgaccccactccatggggaaggcctgcggaaccacagaaggccgatggccggctcaccgccgcccgtcctgactacggcaacagtgggtcggcgctgctgcgatcttgccctcgccctcgccgacgctcgaggggcgaggacaagcacaccggcgcggtagcccgaggcgccggtgatggcagtgatcccgtcggtgacgaggacttctcaagccgcctccgcatcagcgccgatggcaggggacaccagccccccggcagatccccactcaaatcctcccagatgagtggggcgccggcctctgtgcaagggcgccatcccagtgcaaaagcaggaccaccccagaacacgaacgccgccctaatggcgcgcggaaccctgggtggtcctcccgtgcacacgatgcggcggccgccctccggcaggaggggccgccggaagcccggccgacgactccgacatgctggaggtgacgacgctcgccgtcgttcagccccacgttatcgaagtccgcgccgtccgcagggccagcgaacgcctctacccccaagcgccacgggaaagggcgacccgcggacccacgcggaaggtagagcgccggctcagcgtggcttccgccccagtgggggatga

SEQ ID NO: 29945 - DNA, 423 bp, Zea mays
  Peptide Sequence Number=SeqID_73320
atgccggtcgattggggctacggcagggttctccgagcggcggacatgaaattgggctctggccacggtggccgtaagcatggcggctatatggtcgtgttcccggcgaccagagagctcttagttcaattcaacggctcggcaagcatcgtggatgcacgagaatgcttaaacaagggagcagaggacacggatcggcgaggtcgcggtatgggcgagcagcagcacgacggcgcgagcacaggagttgggcgccgagcagccgaacgccatgggagagggaaatccaagctgggaaggtccagggcgcagggaaagaagagcgccatgggagaaccgagcgagctggagagagctgcggctaggaagaagaaaggtgcagggactggatatttgaagaccccacgggcggttacgagatga

SEQ ID NO: 29946 - DNA, 525 bp, Zea mays
  Peptide Sequence Number=SeqID_73321
atgaacaaaaacggaaacttgcagaatggaattgggattcagatgggtcagattcaagcgatagaaatcaaggagaccgtagaagaaaggagaaatgggaagagcaaggctgaggatgagaaaaggaatgtaaatgacggattcgtgggtgtcttctgtcggaacagtgaccccacggcagatccaccaagaacagagttccttcggaggaagaactccgatggatatgagatggagaaggtcggatttagagacaacaaacatgtggttacctgcgaaaggcaactgactgttgggatcgataggaggaatgatagcgacagacgaactctgagtcttccgcttgggcgccatctcaatcttgctggcaagcggagcagaagcaatattgcaagggagcagagaaggcctggatgcagaaaagcaaaactagggcacagaatgcagaggcaggcgatagtgcagtacatatggggtttccccgggccagacgccatttctaaaaagcgcccagtcatcacctag

SEQ ID NO: 29947 - DNA, 480 bp, Zea mays
  Peptide Sequence Number=SeqID_73322
atgggcaagagcaagaagggtggtagttcttcgcatcactccggcaataatcggaagcgtgagctgactcctccctcggaggacttcggcgacttggagtactcggaggaggagttctcctccgagtccgagggctcaccggtccatgcctctcccccggcgtcgtctgatgattcagatgacttccaggggatcgccgcagaggtgtggacctacatccggggcgtcgagtgcgccgggctcgagggctcgaatgagtcggagtactcctcggatgaggagaactcctcggactcatccgaggagggtggcggcgacggcgacggcggtgacgacgaaggcgatggtgacggtggcggtgacggcagcggcaagggtggcagcggcaacgccggcgatggcaagcaagggcagcaacaagggcagcaacaagggcagcaacaaggccagtggctaggcgccactggttttaaatgttag

SEQ ID NO: 29948 - DNA, 333 bp, Zea mays
  Peptide Sequence Number=SeqID_73323
atggtcgtgttcccggcgaccagagagctcttagttcaattcaacggctcggcaagcatcgtggatgcacgagaatgcttaaacaagggagcagaggacacggatcggcgaggtcgcggtatgggcgagcagcagcacgacggcgcgagcacaggagttgggcgccgagcagccgaacgccatgggagagggaaatccaagctgggaaggtccagggcgcagggaaagaagagcgccatgggagaaccgagcgagctggagagagctgcggctaggaagaagaaaggtgcagggactggatatttgaagaccccacgggcggttacgagatga

SEQ ID NO: 29949 - DNA, 573 bp, Zea mays
  Peptide Sequence Number=SeqID_73324
atgaacaaggcactggaaaaaatatgggcgtccatgggagttgctgccgcgcgagagagtaggagcagggggcgtcgtgccattgctggccgagggaggaagggcgctgggagctgggagggagtgggcagagggaggcaccatggctgctggaggcgccgagctggaaaggggtcggcgttggaggaggccgacggcgccggggaagacgagccaccggagcaaatagggatgtcgcgccatggaggaaaaagaccctgctccctgcgtgctgcttcctggaatggggagcgcgagcagaggaggccgactggagcacagggagtttggacttcatggctgttggccgagctcccagcaatggggtccagggaggagggcacgtgcgccatggggtctggccaccgagcgtcgagccaagggagcaagggcgccgaccaggaacctgcaggggaaagatgccacaagggaggcagccatgagaggcccttgcttcgtggggaaggagctgacgccctggtgttcaaccgtgtaggagaaggaggaaagaggagggctggtttgggcggctag

SEQ ID NO: 29950 - DNA, 324 bp, Zea mays
  Peptide Sequence Number=SeqID_73325
atggccttgatagggtttgcacaactagacaccaacaataatttttttgacacaacatgtgcacaaggaagttttagtcgatttaggggtcaagctatgggtgtctataagttgtgcaggtgtaacttcaaagcggaaataactaacggagaaaaatcgagtaacatggcgaagcctggaccacgctactccctcctggtcctctcccgcggaagcaataaccctctcgaccgtctatcccggtggcaggatgaaggccaagtcacaccatcaaccaatcatcctaaggagtacctgcaaaaattgtgccacaagcaaggctga

SEQ ID NO: 29951 - DNA, 471 bp, Zea mays
  Peptide Sequence Number=SeqID_73326
atggtgaccaccagttcgatggtggggagaagcaagccgggttgcggcctctgccccgccctcagcttcaaggatcttcatcatccttgctgtggtggggggcgagctgaggcagagttctacctcccgcacgggccggcgggccacctcttccttcagcattcaggggagaaggcgctcaccggcctagcggagggggcggacttcgacaacgtggggccggccggccgcaagcgtcgtgagctccagcatgcctggctcgctggctcagctggctctggcgctgcttccgatgccacatcccaccgctggggcggagcatggctgtccgcccactggatgaaggccaagtcacaccatcaaccaatcatcctaaggagtacctgcaaaaattgtgccacaagcaaggctgagtatactaatactcagctagacttacccggtgtgaggagtctactcctctacctctag

SEQ ID NO: 29952 - DNA, 330 bp, Zea mays
  Peptide Sequence Number=SeqID_73327
atggcgcttccccccttcctccttgcggaaaggcgacgaaggggcgaaaacaacgtcgctcgcccctctccgactgttgtgccactcgctagggtaaggctgacaacagctaagtctagcctcaggcgcaacaggaagctccgcctcgcccgacctttgggcctcggcctcaggaggaggtctccgcctcgcccgaccctagggctcggcctcaccctcagcctcgaaaggtggcctctgcctcgcccgaccccagggctcggcctcaccctcggccctcgcaaggtggtctccgcctcgcctgaccccagggctcggcctcaaccttga

SEQ ID NO: 29953 - DNA, 117 bp, Zea mays
  Peptide Sequence Number=SeqID_73328
atggccgtgagcccccatctggccgccatccgcccctgtgctcgaccctcgacgtgcggcgtcaaccgatctgtgcagcgagcaacaacctcgtgtattatagtagtggtggcgtga

SEQ ID NO: 29954 - DNA, 336 bp, Zea mays
  Peptide Sequence Number=SeqID_73329
atggaccatatctcagaagaatacaacaatgaagatgaagaagacaaccccatacagatggaggaggtctccgcctcgcccgaccccagggctcggcctcaccctcagcctcggaaggtggcctccgcctcgcccgaccccagggctcggcctcacccttggcataggaaggtggtctccgcctcgcccgaccccagggctcggcctcaacctcgacctcgggaggaatcacgtcctcgcccgacctcggcctcaggaggagtctccgcctcgcccgaccttggactcggaccgaccgcgccacggaggatacatcattaccctacccctagctag

SEQ ID NO: 29955 - DNA, 504 bp, Zea mays
  Peptide Sequence Number=SeqID_73330
atggacgacggtggctcgttgcggctgctgttttgtggggcagaggggaggagcagggacctaggcggtattgctcctgctgctgtcaatggaaaaaaagggcgcaggaaacagcaggggagggaggagatgggagtgctgagcgcagggaggaagaagctactgctgggagcaccttcgctaggggagctcggccatggctgccctgcacaagggaggccagagaggagggcgaaaaatctgggcgttcatagcaggcgagatggagctcgcgcccatggaagaagaagggcagggggcgtcggctgccctgcgcgcgacggggaagaaaccagcagagagctccgcggcgagcagcagctaaaggaaatggagaggagatgccgcgccctggctggagcagagatggcgttggggaagaaggcgatgctgccctgcgcgctggagcttggggaaggctgggcggccatgggaggggaggaagctcccaacgcgcagccgtga

SEQ ID NO: 29956 - DNA, 393 bp, Zea mays
  Peptide Sequence Number=SeqID_73331
atggggaatttgcctattcacccccctctaggcgacattcagaaggtccagctcctattccgacagggtcggcagtacacctgcaagttgtcaacggccgtgctaagctcctccacacgggctcgagctttggcttcccggtcccaagaaatggaacagatgggcttcgctccgataccagctatgacggaacctcccaagtcattaggcccacctacagttgtccttgtccatcggacctcggacaaccatgcaggtgcacctgatcacttgacaagtttggtatctgaattatttaccttgtccaagagcgtttcacccgtcacacagatattacaacacatcggaggtacgagtatgcggaagcagttacaacaacttattttatattaa

SEQ ID NO: 29957 - DNA, 102 bp, Zea mays
  Peptide Sequence Number=SeqID_73332
atggcggccgactttccgcccgccggcggcggaatcgacgacttcttccccgcgaggtggaagatcaactttcaagcatgccccatactctcccccgtcaag

SEQ ID NO: 29958 - DNA, 1026 bp, Zea mays
  Peptide Sequence Number=SeqID_73333
atggctcgacttagacacactgcacgaaagtccgtcatccccttcttaccctcccgccttgctgagcgtccgcttcaccgtcccgtggccggacagtccagccacttggagagactgcaccaccgcctgcatgaggagcaggaacgtcgacgacaggagcagcagggctcttccttctcgctccaacaggagatagagtccgtgaggagctgctcccctgtgcttcccctggaggcgccccctgcaccaccactgggcgccccagcttctggagtagctgctggagtagctgctggaggagacccagatgacggaggtggcgacgacagctcgagccacgacaccgacttctctgctgaccatgagccggaaggatgtgttgctcgacccgtcgctcgcgacgctgctcgcgggtgtcacttccacgatgcgctcgacaccctgctacgtcgggcacttaaccggcgtacttggtccatcgagtatcgctgtgtggtctaccagcatagtcgtggggtttacccggaccgctgggaggcgacctgcttggtgcgccgtccggagaacagtctccagggtgcggaggcctgctcagagcactattctatctctgagcgggactcagctgaggcggccatgcaagatgttgcacggcgtgcgctttcgcactactgctcggttctcggtggggtagctgacggtctcgacctgaaatattacccccaccgtccatctggcagcacaggaggcgtgattgtctcacccgtcggtgaggacaatcctaggttgagcagcatagtcaacctagccgccgtgctaaacacggagctggaccatgcattagacgagctgagtagggctcgtgctgagatcgccctgctgcgggctgagcgcgcggaacgtcgtcacctggatgatggttccctcgctcccgtcgggactcagcacccgtaccgctcacctcggcgtggacgccagccttatggcaatcccgactgcaagaccaagataaatctagaaccatag

SEQ ID NO: 29959 - DNA, 186 bp, Zea mays
  Peptide Sequence Number=SeqID_73334
atgacgaaggtcgatgcttgccgaaggtggtcgaaaagggttcaccggagaaatagaaatgatatcctgttacaagtgtaccttcggcttgagggaagtgattttgactcaagtccgaagggtccatgtcctgtaacaccccgggatccacaaacaccccagaatgctactaaactacacctctaa

SEQ ID NO: 29960 - DNA, 462 bp, Zea mays
  Peptide Sequence Number=SeqID_73335
atggctcgtctcagttgcactgcacccagctggagagactgcatcgtcgcctgcacgaggagcaggagcgccgacgccaggagcaggagcagcaggactcttccccctcgcctcagcgggagcggggtagctgacggccttgacctgaagtactaccctcgtcgttcgatcgacagtgctggaggtgtgattgtctcgccagttggtgagggcaatcccagactaagcagcatggtcaacttggtcgccgtgctcaacacagagttggaccacgcccttgacgagttgggcaaggttcgggcggaggttgcggaattgcgtgctgaatgcgcggcacgccactatcttgatggtggttctcccgcccctattgggattcagcacccttaccgttcaccgcctcgtggtcgcttcgactatggtacctcagactgtaggactcgcatagatttagatccatag

SEQ ID NO: 29961 - DNA, 75 bp, Zea mays
  Peptide Sequence Number=SeqID_73336
atggggatcttcggtcagcaattgggtaacgacttcgtctacaatagtttcggccatgttaataatttcagttga

SEQ ID NO: 29962 - DNA, 57 bp, Zea mays
  Peptide Sequence Number=SeqID_73337
atggagacttctgtgcgctggtggcttctcgtgggtgatggcgccaagggtcaatga

SEQ ID NO: 29963 - DNA, 129 bp, Zea mays
  Peptide Sequence Number=SeqID_73338
atgcaggaggcgtgcaaccacaccatggttgtgcaccctttcggcttcatcgcatccggaccgggaaaggggatatttcgaaagggatccttctccgcgaaggaagtgggccccgagccctcctactga

SEQ ID NO: 29964 - DNA, 1101 bp, Zea mays
  Peptide Sequence Number=SeqID_73339
atgaccaccagttcggtggtggggagaagcaagccgggctacggcctctgccccgccctcagcttcaaggatcttcatcatccttgctgtggcggagggcgagctgagccggggttctacctcccgcatgggccggcaggctgcctcttccttcagcattcaggggagagggcgctcaccggccttgcggagggggcgaactttgccaacgcgggaccggtcggccgcaagcgtcgtcagctccagcgtgcctggctcgctggctcagctggctctgtcgcggcgtccgacgctgcctcctgccgcttgatccgggcgtggccgtccgtccacctcaggggcgactgttgcgctgcgcgcaccaggggatcgtccaagacgtcgtacgccatatgggcggtgttcgtgttcttggattgtcttgtcctcactccggcacgatgcctccacgcggaggtggccgctgtcgtcggtgctgaggtggtggtcgccagaggaggtttctccgccgacgagaccgttggcgtcacccgcgtccagacctctggctctttggctttgatggcttgtcctcgcccctctggtcgccggcgagccatccggagtttgttatcctgcgggccctctggtgtggaggttgttcatacccgcgggagtggaatcggagttccgtttgtaatgaaccttcggccgctctgcgatgagatgaagccggaggcagcagtgtcggcgtggacagaggtggagttggctcaaaaagaggcttcgttggctcgggagcacgtggcttccctagcagaggaggtgcagcggcggcggctcgagcttggccagattgtccgcaagcaggaccaaccccggagtcatgctgccgaggccgtgatccgggctgaggtccttgggggacagttggctgaggctacggagcgaccaggcaagatccctccgcccgtgtcactgtccgaggccgggccaggttctgccgagggtggaaacgtcgcgagggaccccgctatcaaagcagtcgaaaagcgcgaaagacgttctagcaaaagactttttcgagaaaattttgacgcagagggggttccccccttctag

SEQ ID NO: 29965 - DNA, 468 bp, Zea mays
  Peptide Sequence Number=SeqID_73340
atgggcctctgcctgtccgtggctctctggaaggagaagctctacggcgccgacggcggcagcagccggtcggtgcggggccgcgtcgtcgtccataaggttgccggcgtggagggtggtgactgcgagtacgggatcttgggaggcgacgacgccgacgcggtgggggtagagcagaaggcggcgccggccatgggcgtggggagtggtggagtggacggcgctgccgctgccctgtccggcggcactccgctgcggccgatatggcagaggagggtgctgatgggcgtcaagtgccagctgccgcggttcagcggggatgatactgtacgacgagagcggccggccggagaagcatgctgcggcgatctcagtgctaagggacctgctctagtcttcgtcatcagcaagcgatggcaattctgtcgatgcgatattcatgtttggttatatgtacgtcattgttga

SEQ ID NO: 29966 - DNA, 82 bp, Zea mays
  Peptide Sequence Number=SeqID_73341
ggcgcgctcctctataattcaccggattgtccggtgagccagcggagcaacggctatctgcgccaaatgtcgactatgcaaa

SEQ ID NO: 29967 - DNA, 312 bp, Zea mays
  Peptide Sequence Number=SeqID_73342
atgtgggtgggcccatgtggcgttttttttctggcttgggctgcatgcagatcatgcgcatgggagaggattcctcaaggcagttctttcctctacatttcctgttttcctgcaagcgcatggccatggtacgacggccgctggacttccgggtgggagcggcaatacgccaactcgccgaggctgggaaggggctacagggggaagggcgtcgccatggccaagggagtcgtgtcgaggggagggttgcatggtgtgcgtaaggagaagaacacgtcatggctagagaagaagaccggcaagggtcggtaa

SEQ ID NO: 29968 - DNA, 312 bp, Zea mays
  Peptide Sequence Number=SeqID_73343
atgtgggtgggcccatgtggcgttttttttctggcttgggctgcatgcagatcatgcgcatgggagaggagtcctcaaggcagttctttcctctacatttcctgttttcctgcaagcgcatggccatggtacgacggccgctggacttccgggtgggagcggcaatacgccaactcgccgaggctgggaaggggctacagggggaagggcgtcgccatggccaagggagtcgtgtcgaggggagggttgcatggtgtgcgtaaggagaagaacacgtcatggctagagaagaagaccggcaagggtcggtaa

SEQ ID NO: 29969 - DNA, 1912 bp, Zea mays
  Peptide Sequence Number=SeqID_73344
tgaccttgcctgcctgtgagccgtctcctgtcctgcctggatttccacctgtcgttcgtcaggttaggatgtcgcgcacgaagaatgtgtcggcgccagggggaggcgatgatgaggatcctcgtcgccccttcagacaggtcaagggcaagacagtacacttggagcagcaggaaggctgcaagaagcggtgtatggacagagcagcccgtgcagcggcagcagcagcagccgttgcgcaggtcaagctaggagatcagcttcagactccttcagatcagattgcgtaccatgttcgtcgtctcgcctcccggcctcgctcctccactaccaccactacttcagcttccactccacctcccactttgcctgctcctgtcacccctgttgcaccatccaccacctccactacaccagcttccactgctcctcctcccgctcctgtttccgctcctcctattccacctgctcgttttcgggagcgcgatgagactgaggtgggacctctggctgctgatccccggttgtttgaccttcagcgtgctacagcggcatggattgctctgcgagtgcaccggcttttggatcttccagtatttctgctagccgccggtgctgactctgaggtgcacctcacatatctgcctagcattctgactcttttgactaccagcggcaggtatgttgaggagtgggtccgagttttctacgcgactgtatggatagacccagatcatcactggatgaggtttcgttttgagcgagaggatgtcactattactgccagccagattcccgagctctttggttttcacgagtcatcgactcgacttcacagcttatgctacggcacctctgaccctcctcgtcaccctcacgatggtgtggctccgggtgcagctcacgtcgcggctctgttccgcccgcccttctcggatgggtcgcgacgttcaccgatagatttcactacagcagccaagttcctatttcagcttatgagacggactcttctgccgaggatgggatacagggaggctaccacacatatccagctctggctccttggtgccctggtctctcactctgagtttgacgttgttgatttccttatttgtgagattgaggacaccgtattggatggtatgcgtgctcgtcgtcagctgccatatgctcactacttgtgccacatttttgctcagctgattcggcctccacagttccagggcacacttgaggcctcacgccttgtttttggatcctaccgtccagcgcctgaggatccagtgccagcttctgctccagtttttgactctcaggctgaggatgatgcagcagttgatgatgatgacgatgatgatgatgattttgggattccacctccgcctccgcctcctatgcctccacgctcacatgatcatgaggctgggagttctagtgctacccctgctgcccctcctgctattgaccccacacttgcttcgattcttcagacactcactcagcagcaggctcacttggacaggcaggattcctttcagcagcagcttctccaggatcgggctgagagcagggcattcatggctctcatgctacagcattctggtgtctcggttcccccggttcagtctacaccacctcctcggcttcaggctcctgttgtgccagtgattcagtcaggaccccctcttccttctgttggtccttcttcctctccgctccgggcggtcaccctggctttcacgtctctgcttctgcagtgcggccttagtccgagtcagtaccagctccagcttctacagcagatcctggatccgagactaactctgaccccccgccagtgttcgctctgctgcctcgaccgcgaccggatgcgcccccgccgcctcctcccgcttcagatgtataggttcgg

SEQ ID NO: 29970 - DNA, 321 bp, Zea mays
  Peptide Sequence Number=SeqID_73345
atgtcttgctcagaccaccagaaagaccgactttcatttccatgggataaacgaaaatctccaaacaatatctctagccttggtgcaaacaagtggaagatgcttactgatgtggcttggaggattggaacaaagggaatggaaagtacctttctgaagggtggtagtgcattgactatgaaaacaatatatgaatcgttagccaatagattgactggaaaactgctgaaggaggctgcaaattacaagataaagaaagaacttgttaagcagctcggatattacttgcattcaactgaatatcaggaatacaatatatag

SEQ ID NO: 29971 - DNA, 966 bp, Zea mays
  Peptide Sequence Number=SeqID_73346
atgaacgcgctctcctgcgaagggtgccggcacttcgaggccttcgaccaggcggatgaagattttgagcgagatatttataaggtcgaagaccccgtagtgaaggaatccgccggggccctctatgaccggatgtggggtctgtacggtcgtgaggtggtcagggagcgggcggaggcggcgatggctcaggcgttgcgtggcgagcgggtggacgacctcggggcgctgaacagtacgctgcctgacccggagccgacccctgcggaggccgcgctcggggtcgccctggagccaaccccggaggccgcccccacacctgctgcggccggcgaagacctgcccccaaaggtgggcgaaggcgcccctgatgtccccgcagctgctgtgccgagtgctggagatcccgcggcggaggcggtggaaacgacagccggaacggcggcggagccagcggcggaggctcccgcagcgtcagggccttcgcaggttcaagattttgggcctgcgcacgcaaccgctactgctaaatttttggcggctttgaccgcggaaggtggcaatgaatgtggtggatctggatctgaattttctgagttttctgatgttgcttattctgggagctcggttgagtggactgagtcatccgaggaggatttggactatttcgcggctttggatgtggctgcggcggagacctcaccgcacgctgcgggcgcgcaagatatgccaggtcccagcaccgggcgccgacggcgaagggcggttgcaaagcgtagagttagtacggaggaagggtctcggcttcgtgtgagtagggctggtcggcaggaactgttgtctttgtcggccgccgcgagtacaggggaaggggaactgcggagtctttttgcgggtgaggagcttaggataatgttatttaattatagggagatgggaattattcctaaggttgagccgatgtag

SEQ ID NO: 29972 - DNA, 507 bp, Zea mays
  Peptide Sequence Number=SeqID_73347
atgggcaagaacaacaaacgcaagcgtgagccgactcctccatcggaggactttggtgagttggagtactcagaggaggagttctcctctgagttcgaggggtctccggctcccatccctctgcatgagtcgtctgacgattcagacgactcccaggggcttgccgtggaggtctggacttacatccgggccgtcgagcgctccgggctcgagggctcggatgagtcggagtactcctcggacgaggaggactcgtccgagggcggtggcggcgatggcgacgacgacgacgacggaggcggtggcggcaatgacggtgacggcggcgatgacggtgacggtggcggcagggcggcatcaaggatggcgacggcggcagcagtaggggcagcaacaggggcggcagcggcagaggcagcaacagggccagtggctagatgccactggggtgatggccgagctattattgtcaacatttgtgcttttgagatagcgtccgagtggtga

SEQ ID NO: 29973 - DNA, 882 bp, Zea mays
  Peptide Sequence Number=SeqID_73348
atgtggcagcacgccaaggaaagcttcgcacaaatgaatgtaaatggaaatttgcagaatggaattgggattcagatgggtcaggttaagacgatagaaatcaaggaggccgcggaaaaagggagaaatgggaagaccgagaccgtggagaagaaaaggaacgtaaattacagactcatgggtatcctctgtcgggacagtgaccccatgacaaatccgccaagaacagagctccctcgggggaaggaccccgatggacacgaggtggagaaggtcgggctcggagacaacagacatgtggttacctgcgaaaggcaactgactgttggggtcgattggggaatcaccgcggcggatgaactcaaggccttcctcttgggcgccatctcaactctactggcgaacagagcgggagccgaattgcagagaggatttggaagcaggaaagcaagaactagggcacggaaaggagaggcggctaaaagcacagtacttatgggatattcccgagtcagatgccgtttccaaaagccccagtcagcacccggcagttacttccaaaacaccagcgtgccacgttgtcacccggcggtcacttccaaaacaccggtgtgccacatcatcactcggctattaccctcaacatggccggcgcagcccgttctcactcgccagttacctctaaaacgccgatgtcatcgagtcactcggcagttacctctaaaacgccgatgtcatccagtcactcggcagttacctctaaaacaccgatgtcgtcaagtcactcggcagttacctctaaaacgccgatgtcgtcgagtcactcggcagttacctctaaaacgccgatgtcattttcagtcgctcggcggttacctctaa

SEQ ID NO: 29974 - DNA, 603 bp, Zea mays
  Peptide Sequence Number=SeqID_73349
atgtgcattgactctgctttgaatcaaatacaaggtatggtgcaatactttgaggcatacagaaatgaggggtttccttctagtctgatcatctccaaaggcattgcagatgaaatgggtctagaggcatcgtttccagtaaaacgtcgtgccttgaggaagaaacaatttgatgaaattgatatggcaatcacttctttgaaaaccagatttgaagaactcatggtgttcaaagatatatttggttttttattgagatcaactatcctgaagtcattgaatgatattgaactagaagagtgttggagcgaaggcagaaactccacccttcgctcgaagtctccgctgcttagccgctgctctgacagagacaaagcaggcacggacacccttcgcttcgatcggcaccagacgaagaccggcgacgaaggcattccacagtgcggcctcgtccagctcagaggcccacgtgcgttctggcccattgtaacgggccctgcgtggccgccgcgtattacgggcctaatttgtaaaggtatccctgtaattacagtctgtaaccccgctttatgggaatattccgggaatagcctaggtagctga

SEQ ID NO: 29975 - DNA, 780 bp, Zea mays
  Peptide Sequence Number=SeqID_73350
atggctccctgcttggctgctccatccacccggcgctccctgctccctcggtccctcctcccggcgctccctggtccctcggtccctccgccggcggtggcttccctgctccctcggtccctcctccggcggtggcttccctgctcaaccggccaaggtaatgtgtttatatctgttcaggtaatgtgtttatatctgtttagtcattcgcagttcatcaacaatgatctgaggattgtgcccgctgatgaggatgggccatctcagtccattaacaatggtagcagtgctgcccctattaacttagaggagggtgctgctaccaacaatggtactggagatgcaaatacttcagaaaatgttgatgttaggcaacaagtgcctcctcctcctcctgtcacagctggaacattgaaagggaaatgtgctcttgggccatttctaagtattttggtgattgagtgccaacacaagtgcttaaatgtgaatttatgctcatggatggacaaagtgcaaatcaagagtaaagagaggagtctcaacaaaacacaataccacaagagatcaaacacagagatgacacagtggtttatcccgtggttcggccaacaccaacgcttgcctactccacgttgtggcgtcccaacggacaagggttgcaatcaacccttctcaagcggtccaaagaccaacttgaataccacagtgttttgcttttcctttcaatatcccgtttgcgaggaatctccacaacttggagtctctcgcccttacacttga

SEQ ID NO: 29976 - DNA, 588 bp, Zea mays
  Peptide Sequence Number=SeqID_73351
atgggcggtggctcgccgtgcgcgtcgtgcaagctgctccggcggcggtgcaccaaggactgcatcttcgcgccattcttcccggccgacgacccccacaagttcgccatcgtccacagggtcttcggcgccagcaacgtctccaagatgctccaggagctcccggtgcagcagcgcggcgacgcggtgagcagcctggtgtacgaggcgaacgcgcggatgcgggaccccgtgtacggctgcgtcggggccatctccttcctgcagaaccaggtgtcgcagctgcagatgcagctcgccgtcgcgcaggccgagatcctctgcatccagatgcagcgccgggacgacggcgccggccccgacgtcgacgtggtggtcccgccgccgtcgctcgtcgcggcggcggcggcggccggcgccagccaccaccaccaaatgacggtggaaatgcagcagcaggcgatggccaccgacgacgacgtggacgccttcctcatgcagaacgccggcgccggagccatcccgccgcagctcatgtgctacggcggcgccgcgtcggcactcaagagggagtctctgtggacgtag

SEQ ID NO: 29977 - DNA, 354 bp, Zea mays
  Peptide Sequence Number=SeqID_73352
atggccaagagagtcaatgttcttgtgccccgtgacctgtggccatactccgtcgtgaccatggaggatctgcggaatctcatcgacggagccgaagtaccatgtcaccaacttggaagcctcaggatcggattcgtcatgcctggtagcgtcgtagtgattgccccgaagctatcgtcctcgaagttgggaggcagagctctcgccctgctggaccgcgatgctttccaggagatccttgatcttgcccgatacatgatgcccctcggtgacgtcgagcgatttggcgcgtgcccctccgtcgggggctcgacctaccatttcctgctcgaggacatgttggagttgtcgtag

SEQ ID NO: 29978 - DNA, 423 bp, Zea mays
  Peptide Sequence Number=SeqID_73353
atgtccggtgtgcaccggacagtgtccggtgcgccagtcagcccagaggagcaacggtcggatatgccaaatttggaaggagatcgcgcaccggactatctggtgcgccactcgatagaaggaaggaattgcctttcagtgggtatgggaaacccgttgggtactcgaaacccgcatgggtatgggtttgggcaaaattttatacccgtcatgggtatgggttttttagcggacgtattttttcttcgcgggtatgggtttggctgccttggggctataaaagggacccctaggcgcatgaaggagtacaccaagcacactttgagcattcttgatcattctcactccgactttgcgcactcgtttgacattcttagtgatttgagctccgttctagtggtgaactttgtgatactcatttga

SEQ ID NO: 29979 - DNA, 378 bp, Zea mays
  Peptide Sequence Number=SeqID_73354
atggaaacgagctccgagccctttactgttcaggggttcgaaggttggcccctcgacagggttcaacaactgccccagaacgaacagtcagggatgaacgtgcgtacctccatacacgatcgaggctcaggaaacactcttgaggggtttgaaggttggccccttggcggggttcgacaaccgccccagaacatagagtcagggatgaacgtgggttggcccctcggcagggttcgacaaccaccccagaacgtagagtcagggatgaatgtggaggctcgagggctgcccttgcacctagactgcgatcaagttgtttgtagaatcaacagaccaacgaagtccacaaaggagaacataaagacctcgaaggagtaa

SEQ ID NO: 29980 - DNA, 189 bp, Zea mays
  Peptide Sequence Number=SeqID_73355
atggcgttatttgctcgtgctggatatatattggcatcaagctgctgtgccagctgtacctccataacaaaaaggaaatgctccaaacactcgtcactctggccgagttttcagatgtcaacaggacatatgatgattgaagtctttgcaaaggtattctacggtgaccctgcaaaagaagctctatga

SEQ ID NO: 29981 - DNA, 1902 bp, Zea mays
  Peptide Sequence Number=SeqID_73356
atgaggaggggcctcgacgttttgcttgttagttggaagctgagtggaaacacaagaacacacaaggatttagagtggttcgggccgccggagcgggaagcttcttgtagaagggatgatgagtaccgtgcgccgctcggcttgggcgcactgtttgtcaacagagtggacatgcgcgccgtctgctgggggctgcacgacgttatgggccttgcgtcatgcatagcccgttggcttatgtcatgggccacaagccacgcggtagcagcgggtctctgcctgagcgggaagcgtagggaagggcctggacgcgtgccagcaccggacccttactcaagccggggtcctcctcgttcagggaccttgctaaggcccggaccttactcggagggacctggggccttcccgagggacccggcataccttcttgggagctccggacttgtacgcacaggggtctggtgtcctactgtggagaagagggtacccctaattcagggtaccgacagtggcccccgggcctgcctcaggggaggatgcgagactgcagtcttctgtggcagccccgagaagacgtggcattggcgcgagcggcggtgcgattttccgcacccgatggggtgcgccggtgttctctgggggatccgcgtcagggtcgccccctccggcgatctcaccgccggagagctcgcgctcatggtggtgctgtcggtcttgtcttcttcttgcagctgttggaggagcgcaaccccatggggagggatgaccaccagccttgtggtggagagaagcgagctgggctgcggcctcccccctgccctcagcttcaaggatgttcatcatccgtgctggggaggagggcaagccgagttggggtccgccttccgcatgggctggtggcccgcttcttcctccatcattcgggggagaagggcgttcaccagcctcggcctcgcggaggaggcaaactttgggtacgcgggaccggccaactgcaggtgccaccggccgccgcgtgcccggttccccggcttggatggcctcggcgccgccttcgacgctgcctcctactatttggttggggtgtggctacccgtgcactacacgggcgacggtcgcgctgtgcgcaggtccgccacatccacggcttctcccgcgccggcggccacaccggggggggcgtacaagacgtcgtacgcccgtgggggcggcggtcgcgttcttggatggtcttgtcctcattcccgcagcgaggacgggagcgaggacctcttcgcgcgcactggggcggtcgccattcgccggtacggcactggtgcgcaggtgggcgctgtcgttggtgaggctccccactgcagaggtggttgcctccgctggcgagactgtcagtgccacctgtcgccgggcctccgactctttggctttaatggcctcgttgtcgccccctgtaggaagacgggggcgaggaccttttcgcagtggcaggtggccgccgctgtcggtgctgaggtggtcgcctccgctggcgagccgctcggagctagctatcctgcggccctactggtgtggaggcttgatttgttgaggttggataccagcgtatctgaaaaggttgtcaataattctcgggaggcagcttcgtcgagggcggtggagcgtgcaggcccatggtacgggaccaggctgagcggctacacgggcttcggaccaccccatgagactaatgctaagcggccacacaggcttcagaccaccccatggaacggggtcccgttctctggagccggcccccaagctgtcggacctcccaactttcgtatcgggggccctaaactgcaagcctggctgctcaattcggatgtcgtcatgtcagaacagattgaagtcgtatgggtgggttag

SEQ ID NO: 29982 - DNA, 513 bp, Zea mays
  Peptide Sequence Number=SeqID_73357
atggctcccggtgaggtcgtagagcttggagggtgtcgcaacaactccctggccgctgacaatgctcctggagtcgccctcgatggagtccgggacgtctgtgcagccgggaagcttcttgtagaagggatgatgagtaccgtccaccgctcggctcgggcgcactatttgtcaacagactggacaggcgcgccgtctgctgggcggcgcgtcctctccgcaataaatgcaggggctgcacggcgttatgggccttgcgtcatgcacaacccgttggcttctgtcacgggccacaagccacgcggcagcagcggggaccttgctaaggcccggaccttacttggagggacctggggccttcccgagggactcggcatgccttcttgggagctccggacttacctacccatgtggcggggtcgggtgccgttctccgtgtggcatggaggtgtcgcacgggtgcagcgtcttcatgctgtagaagagggtacccctgattcagggtaccgataa

SEQ ID NO: 29983 - DNA, 1069 bp, Zea mays
  Peptide Sequence Number=SeqID_73358
atgggcaccgaacatggtgtctccggtgagctgcaagcggggcccacgcgatctgaggcggctgttgaacccctcggggggccagccttcgaacctctgatcagtagggggggctcggagcccagttccttcacagggaaggatccttttcggggcgaagcgtcgcccgcttctcctgccagaagcgccgcctgtcccgccgcggagttaatgcgatggggcgagtggttggcagggcggctgttgcgcgtgcgcgagccgttcgaggaacggatcacgggcgccctgtcttcacgccgtgagagggggttctcttgccgcccccggatgggacgtgagcctggccgacgacgtgaccgctgctcccgcccgcctgccaccgtcattactgccggcccactttcggctgcattgaccgtcgcgccaggctggcgctgctgggtccatccggcgcgctggttgcgtgacgcgtgggcctgggcctccatgctggcgtgttgggagtcggggaagcgcgtccacctggcgcggttgcatgccgcctgcatggctgcccgccccttccgcccgttggtctgggcagaagtggggggtctcttcccggctgcacccctccaccggcggtcacccaagatggtgacctccagcttgatggtgggggaaagcgagccgggctgcggcctctccccctccctcagcctcaaggattttcatcaccaaggcaggggaggagactgcagcgtgcccggctttcggacgcgagtggcttcggagccgctcgcggcaccggcgtctgccacggcagctggaagaggttcttccgccggcgcgatagccaaggcaggccacggaccgacctccaactctacggccttctacccgtccttgccttacgagttttggcatgggcgggggcctcctggcagcagcatccgccctgaggtcagtgctgccgctgttcggccccccggagcagaagtcgtcgtcgtcgccgctgctggagcaggtgacggcgcgccgttcgtcggtcttccgttgctccgcaggccttccctcatggagtggggtt

SEQ ID NO: 29984 - DNA, 363 bp, Zea mays
  Peptide Sequence Number=SeqID_73359
atggcattgggagatctcatggcgtccaggttcggccactcctcgtcctcgccgtcgccgtcattggccccggtgccgccgctaccccatcaccaccacaaccaccaccagaaccacgtcgcggatgacctccccgtcgccagcgggccggagcccaagaacgggttggaggtccccgaggtggagaagccggcgtccgaggcgtacctgccccaggtggtcgtgctgtgcgactatcgccacgaggggatcgacgaagctaccaccgccgcgctctctaccagcggcctcgtctccaactggcgacccaaggaccgggtaatggacgtgatgcagtttgcagatgctgtacctagtgcttga

SEQ ID NO: 29985 - DNA, 363 bp, Zea mays
  Peptide Sequence Number=SeqID_73360
atggagtgggacagcgagtccgacggcgccggcagcgtcggcgtcgacgagcaggaagaggagcaggaggaggagcggggaggcgagggaggaggtgttgacgccggtgggatgttcacgctcgcgattgaaggcatgctgcgcgcgtctggtccgtgcgggctcgtcgtcaccaacgcgctcgagcccgactgtcccatcatctacgctaaccgcggcttcgaggaggctacgggctaccgcgtcgaggagtttcttggcaggaactggtctgtaccaccttatattccatatatgcttccatttcacattcgtcatgcagccagtttcatctggttgcaaggactgctctgtgccacttag

SEQ ID NO: 29986 - DNA, 1923 bp, Zea mays
  Peptide Sequence Number=SeqID_73361
atgtccaatatgtcttctccccctgacccaacccctccccccgaccccaacccatccccttcctccaccagccaccacagcccctcgacggttgccactccggcgccggcgaccacaccactgccctgtcctcttggcttctgcgcctctcaggtggggcggtccaaattccagcgatgggatgacaacgcttcgggttcctcctctggtggaacagtgcactcctataaggaggcccttctttcctcatctggcgccacctcccaggagttggacgtaaacacttctactgtagcgaggccgaagctctgtgacaaggaaaggaggctgcgtcggcgtgaagtccttggtgccggtcgacaggaggatggctggcaggtggtgaagagcagaaagcagtttcgttgtgcttctgcgcgaatagggaccattgtgaacctccgcggaaaatgcttcaactgtttctctccaaaccatctcgtggcttcgtgccggtgcccccctcgctgttttaggtgtttcaagctcggacatcaagcttcatgttgcccttccatacaggccggccctcagaagctgaagaccccaggccgcttgcgcgacctcctggacattgtcagttcatatccgcgcggaactgggagtgctgctcctccaaagaagaggtcggtttgggtgcgtatctctcctgcaccccacacattcgaccggaagactgatcagccatctccaatgttgaacaactgtgccccggctgttgatcaacgttcctttcgcaacaagaggaaaagaaggtccaagagtaaaagaggaaaaggtcctgctgaagctgcgggaactggtgcgtgtgtggattcccctccctcatcttctgaagctcattacactcagtcgaggatggaatgccacaacacatctcccccaactgttgtaggttcacgtgttcttacgttcactgatgagatggcaagggaagagatcaatttacgcaaagccatgttcgtcaccatcgcaggtaccagacctgtagtgcagggatcagaggtgttggatgaggtggctcgcagctttggagtatgcattgataaaatgtccatccaccattcctcaccggaggatttcctacttttcctgccggatgaggaaactgcctccaggattttcaatgggggcagattgttcactggacctcgtttctgcttattgttcaaaagatggtctcgtttctcgcatgtttctctgtctcgcatgtctcacttagtggatgtgcagactagtggaatccctgaacatgcatggtcttgctccactgtggaagctattcttgaggactcatgtcatattgttgaggtccattctgataccctgctgaagaaagacctctcatcctttacagtgcgagcatggtgttttgattttaaaaagttacaacgacagatgacgctacacattattttgcgtgctgctgccccactacagcaaaagactgctgcttttgaccgctgtagagatgctgtcctccaccatgttatcctacacatgctgttgcagaattgttgtcctccacacaaagaccacatgacttattccatcattctccccctaagacttgtgcgtcgtcttgtgggaaagtttagccatcccagaccgggaacaaagctcaaggaacttgatcctcccaaggggcttagtgagcaagtccgcaagttgatccttggtgttgatgtagcgtgcatggatgctcccttctgccaaaaacagtcacggatgaagtggtatctcacccggatgtgcttgctccgttcaatgaacacggggttcttggccaacgccagggcggactggctgtccacccggagttccactgctccaacgtctctcccgaggagatcaccgagcaggcgagtaagccagagcgcctga

SEQ ID NO: 29987 - DNA, 765 bp, Zea mays
  Peptide Sequence Number=SeqID_73362
atgatatgggaaaggatgagagagccatcgggggcacccccacagagccacctagggaatgctggggccgaaagtagtgagcatgctgacggtaatcatgggtgggagagaagacaaggccccgatcgtcatgcagacaaccgtggcgctggggaacacaaacggtccgatagcgtggcggtcctcttgagggtagatcttgacacagtcacgaaggacagggttcgagacctaatcaaagcccacaaatgtgccctggagaagctgaccgtcgtgaagggagacgcacatacggtaggaaggcaccacactcgtggcggaggtaagggttccgaggagcgaagctggaagtgcgaaggggtggcgctgacagggaaggttgcaccaccgaggaggataggaagcatgccggaggtgccagccctggtcaaggctgacacgaagaagaggggcagagacggccttgcgggtcgcgtcagcggcaagggagatggcaacatgagtggcaaaagacaaaagagcaagggggccacatgcagcctgggagaacccgacatccgaggcaaccgctgggaagaagcccgagggcgctacacgctgaaggtcccctacgcgggggtgcacgccgggaaggggtggtgcgactgggaaggggagcagggcgtcgctggagatcgaggtgcgctcggcacggaggagcacgggcgcaagggagagcttgtcctcgagctggaacgtcgaaaaggattctttgaagtaaagtag

SEQ ID NO: 29988 - DNA, 576 bp, Zea mays
  Peptide Sequence Number=SeqID_73363
atggttcttcctggtcctttgtacctcaacatccttgttgcccccaacatcatccataaccttctctcgtctacatctcaggttcgctccggacactttgctgctggttttgctgatggttctgtcaggatatatgatgttcgctctcctgataggttcgtctatgtggccaggccacatgccccaagaacagaaaaggttgtgagcataggatttcaacctgggtttgatccatacaagattgtaagtgcatctcaagctggagacatccagtttcttgatgttagaagggcagcagaaccctacctgactattgaggcacacaggggttcacttacagcattagtggttcatcgttatgccccagttgttgctagtggctcagccaagcaaatgattaaagtgtttagtcttggtggggagcagttgacgataattgggtacctgccatcttttatgggccaaagaataggcagtgtaaattgcctttcttttcacccatacaagtcactcctggctgctggtgctggtgacaatgctctggtctctatctatgctgaggaaaattacaagtaa

SEQ ID NO: 29989 - DNA, 3012 bp, Zea mays
  Peptide Sequence Number=SeqID_73364
atggaatctggttgggtggtcttcatggttggcattgggcccgcctcatggacgctggttcccgcgctgtatagtggtgtccagggtgtccagggttgccagcctttggttgatggcgtccaaggcctgagtcactggatcacttggatggaggacatggtgacgaagactggatgtggtgcacttgtattatgtttgaacataagtgttgatccacctgatgtaattaaaatttccccttgtgcaagaatggagtgctggatagatcctttctctatggcacctcctaaagcccttgaaagtattggaaaaacattgcattcccagtatgagcgcttgcaacctaaggctcgatacaagcttcagctggatccaacagtggaggaagttaagaagctttctaatacttgccgcaaatatgccagagaagagagagtccttttccattataatggccatggtgtaccaaagcctacatcaaatggtgagatttgggtgtttaacaagagttacacacagtatatcccactttcaattactgatcttgattcatggctgaagacaccttccatttatgtttttgattgctcagctgctggaattattgtgaaagcctttctagagcgcctagactggagttctacctcctcggcatcttcgcagaaggatttcattcttcttgctgcctgtgaagcacatcagacgcttccccagagtgcagaatttcctgctgatgtgtttacggcttgcctcacaacgcccatcaaaatggctttgcactggttttgtaagcgaacatcactccatggtcctctggatcgttctcttattgaccaaattcctggaaggcaaaatgaccgtaaaacacttcttggagagctcaattggatttttactgctataacagatactatcgcatggaatgttcttccacgtgatctgttccaaaggcttttcaggcaggaccttcttgttgccggtctcttccgtaacttcttgcttgctgagagaatcatgcgatctgcaaactgttctccagtttcttatccgttgttacccccaacacatcaacaccatatgtgggatgcatgggacatggctgctgagatttgcctttccaagcttcctcagttaattgctgatccaaacacagagtttcagccaagtcctttttttatggaacaattgatggctttcgaagtttggcttgatcatggctctaaggacaagaaacctcctgaattgttacccatagttcttcaggtcctgcttagtcaaccacacagatctagagtgcttgttctgcttggaagatttcttgatatgggaccatgggcagttgatttggccctgtctgttggaatatttccttgtgtgctcaaactgcttcaatcaagtgctatggatatacgtcaaaatctagtgtttatatggacaaaaattctctcccttgataagtcatgtcaggttgaattggttaaagatggaggacatgcatattttattaagtttcttgacagtttggatgctttcccagaacagcgtgcaatggccgcttttgttatagcagtcattgtggatgggtataggatgggtcaagaggcttgtatgaatgctgggcttatggatgtttgcctgagacatctgcaacctgagaattctcatgcacaaacagaacctttgcttttgcagtggctttgtttatgccttgggaaactatgggaagatttccctgaggctcagttacttggtctgcaaacaaatggaccagaaattgtaatatgcttattgtcggagcctcaacctgaggtcagagctgctgctgtttttgcacttgggaatctccttgatactacatcaaatagtcatgatgatggttccgatgatgatgaaaaggtgaaagctgaaataaatgtagttcgaagccttctgcagatctcttcagatggcagtccccttgttagatctgaggttgctatagcgcttactcgctttgcgttgggtcacaacaaacatctcaaatctgttgcttccgagtattggaaacctcaacccaattcattgctgaaatcactaccatcgttggcaaatataagtaatccaagcaatgtttacagtcccaacaatattctacaaggcaggattggtcctgtgttgagggttgccagtgatagcggtgccgctggtcgtgatggaagaatttctacaagcaacccaattgcaacaagtagtatcatgcatggctctcctgagtcagatgattcttcccaacactcagattcaggcatattactgagggggaatgcaagtaatggtggtttcagctacactagatcgaggcctgttgataatgtcatttattctcaatttatatcaactatgtattctgtttctaaagatcctgacccaacaattgcaactattggtcggagagcactgtcccttattggtgttgaacaagtggttatgaaaaatactaggtttaacagtggcggttcacatcgaggagagacatctgcgtcaaattttggaatggcacgatcttcttcctggcgtgatatgaagtctggtcccagtaatgcagaaccacttccccaatcaacaatttacaactggagttgtgttcaattctctaggccagttttaactgtctctgatgataatgaagaaaccaatgctagaagagaagagagagaacaaatcgcactagattacatcactaagtgtcagcgctcctgtgatggaaatgtacgtatatggaaaaattttgctcaaaagggtggagagaaacttgtaactgctttgtcatcagttcagggacatcgagctgctggtcgcagtattgtgattgactggcagcagcaatctggttatctgtatgcatctggtgacatgtcttccatcttggtatgggatcttgacaaggaacaacttctcagcaccattcagtcaactgctgatactgccatttcttccctggctatttattgcactttgtcattgaagaaataa

SEQ ID NO: 29990 - DNA, 1647 bp, Zea mays
  Peptide Sequence Number=SeqID_73365
atgggctcccgattcgccagcgcggcgctgcggctgctggtgtgcgcagcgctcctgctgggttgctgccacgggaggttcgtggtggagaagaacagcctcaaggtgacggcgcccgacgacctcaagggcacctacgagtgcgccattggtaacttcggggtgccccagtacggcggcaccatggtcggcttcgtcgcctaccccaaggccaacaggaaggcctgcaagagcttcgacgactttgacatctcctacaaggccaagccgggggcgttccccaccttcttgctcgtcgacaggggagattgctactttgcaaagaaggcatggaatgcacagaaagcaggagcagcagcaatccttgtcgctgatgacaaagatgaacctctaattacaatggacaaccctgaggagagtggcaacacagattatctagagaacatcactattccttcggcattaataaccaagagttttggggacaagctcaagaaagtaattgacaacggtgacatggttagtgtgaatttggattggagagaggccctgccccatcctgatgagcgtgttgagtatgaattttggaccaacagcaacgatgaatgtggcctgaagtgcgatagccagattgattttgtcaagagcttcaaaggagcagcacaagtacttgagaagaagggctatacagagttcactcctcattacattacctggtattgcccagaggccttcattctgagcaagcagtgcaagtctcagtgcatcaatcatgggagatactgtgcacctgacccggaacaggattttagcaaaggatatgatggtaaagatgtggtggtccagaacttgcgccaagtttgtgtctttaaggttgctaaggagcacaagaagccttggttatggtgggactatgttactgattttgcgattcggtgtccaatgaaggaaaagaagtacacaaaggagtgtgctgatggtgttatcaagtctcttggccttgatcataaagcaatagataaatgtattggtgatccagatgctgatgaagaaaaccctgttctgaaagctgaacaggatgcacaggctagtaagcttgacaaaggagcagttcttaaagcactttgtgctggttttaaggaaactactgagccagccgtttgcttgagtgaagatatacaaacaaatgagtgcctagagaacaatggtggctgttggcaagataaggctgctaacatcactgcatgcaaggatactttccgtggaagagtttgcgagtgtccaattgtgaaaggagtaaaatttgttggtgatggctatagtcattgtgaagcttccggatctgggcgatgtgaaattaacaatggaggatgctggaaagataccaagaatggtcggacatactctgcctgtaatgatgatggctgcaaatgcccagatggattcaagggtgacggtaggcacaaatgtgaagatattgatgagtgtaaggaaaggactgtgtgtcaatgcaaagaatgcaaatgcaaaaacacatggggaagctatgagtgtggctgcagtggaggcttgctttacatgaaggagcatgatacatgcataagtatgtgtaaccctcatacacgcacactatcagcttattattga

SEQ ID NO: 29991 - DNA, 1200 bp, Zea mays
  Peptide Sequence Number=SeqID_73366
atgtcttcgcgctcggggtccacgggcggagggagcaccggcggcggcagcagcgcggggggaggcggcgcggtgccgctggccgtgctgctcaggcgggaggtggccagcgagcgcaccgcgtcggagcgcccggagctgcactggggcctcttcagccaggccaagaagggcgaggacttcaccttcctcaagcccgaatgcgagcgcgtccctgacgtcccgtcctcctccttctccgccttcggcctgtttgatgggcataatgggaacggagccgcaatttacaccaaggagaatctcttgaacaacatcttgagtgcggtcccagccgatctgaacagggaagactggcttgctgcactcccaagagcgctggttgctgcattcgtcaaaaccgataaggatttccagactaaagcacgttcttcagggacaactgtgacatttgtcataatagatggattggtcatcactgttgcatcagttggtgattcccgttgtgtactacaagctgaaggttcaatttatcatctatcctctgatcatcggttcgatgcaagcaaagaggaggttgatcgtgtaacagaatgcggaggtgatgttggaaggctaaatgttgttggtggtgctgagattggcccccttagatgttggcctggaggtttgtgcctatcaaggtcaattggagatcaagatgttggtgaatttatcgttccagttcctcttgtgaagcaagttaagctatctactgcgggtggccgactcattattgcaagtgatggtgtttgggatgtcttgtctccagaagtagcttttaactgttcacgtgaacttcctccagtgcctgcagctgagcaaatcgttaaaactgctgtgcaatcaaaagggctgagggatgataccacctgtattgttgttgatataatagtagaaaaaaacaactcttccatgccacttgctaaaaggcaaccaggaattggtgtcttcaaaaatatgttcggcaagaaaaaatcatcggattcatcatcccattcccattcagatagagaatatatggatccagataacgtggaggaaatatttgaggatgggctggattctgaataccctgttcgaaatatgttcaaactgttcatatgtgccatttgtcaagtagagttaaagccaaaccaagattcatcaagaaacagtgggtaa

SEQ ID NO: 29992 - DNA, 321 bp, Zea mays
  Peptide Sequence Number=SeqID_73367
atgggtccgcggccccgggtctgcctcttcgactacgagtcggtaaggcaggttcttttcaacaagttcggccatttcttcaaggacgacgcccacccgactatcctggcaatgctcgacaaagggctggtcctggtggaaggcaccgactgggtgcgccatcggagggtggtcaacccagccttcgccatggataagctcaagtgctcatctcagatctccccaccggtgggcgacacgttctctgaaatgcattcgttcatggccggtttcgtaagtttttatatttggagacgatggtcagctgtgctgagccactga

SEQ ID NO: 29993 - DNA, 435 bp, Zea mays
  Peptide Sequence Number=SeqID_73368
atgagtgttgcggaggattgtagttattttaagaagtgtggtgtgttacctggtcttgtgggggtttctgatgttttcacccttttctctttatgctcactttggctcaactggatcttagtcttcactgttcattcaatagctaggtttgctgacattttgaggacaatatttctaacacaatttaccattttaaaggctagcgatagattcaacataaactctcagcttgagcatcttcaagccaaatatgttggtacagggcatgctgatttgtctagatttgaatgggctgtaaacatccagagagacagctatgcctcttatattgggcactatccaatgctagcatattttgccattgctgagaatgaatcgatcggaagagaacgttacaatttcatgcagtactacacagaaggtagcactgcctag

SEQ ID NO: 29994 - DNA, 741 bp, Zea mays
  Peptide Sequence Number=SeqID_73369
atggcgatccggatgagcaacaacgtgatcggcgcgctgaacctggtgacactcctgctctcggtccccatcctcgtctcgggaatctggctgcggtcgcgcgccgacggcaccgagtgcgaccacctcctgtccaccccggccatcgcgctgggcgcggtgctcatggccgtcgctgtcgcgggcctcgccggcgcctgcttccgcgccacctggctgctatggctctacctcctcgccatgctcgtgttcatcgtcgcgctgctctgcttcaccgtcttcgccttcgccgtcaccaacaggggcgccggggaggccgtgtcgggggtaggctacagggagtaccgcctcggggactactccacctggctgcggcgccacgtcgaaagccgcaaggactgggcccggatccggagctgcctcgccgacgcgcacgtctgcaggcgcctggaggagagggagagggagagcaaggacgcggcggggtctggttcggctcggcctgtccccggtcgagtccgggtgctgcaagccgcccacgagctgcaacttcactcgtgcaaggccggcgtggtggacgcgctcaagcgggactggaagcgggccgccatcgtcaacgtcgtcatcctctccttcatcgtcgtcgtttactccgtcggctgctgcgccttcaagaacagccgccgggacaactacgcctaccacagcggccgcggatggaaacgaggcggtgacgcttaa

SEQ ID NO: 29995 - DNA, 174 bp, Zea mays
  Peptide Sequence Number=SeqID_73370
atggagatcgatgaggaggaggaggcgggtcttcactgcaagatgtcgccgctatggtggttaggatcaacaacgaaggtactcgagtggccgcctatcgctgtcaaagacgtttacaccctcgagtacccggtttatccccagaatattcccatgaggagaggttacagatag

SEQ ID NO: 29996 - DNA, 991 bp, Zea mays
  Peptide Sequence Number=SeqID_73371
aagtcagatggaggtctgttgccaaaccaacttttgccagaatgaagttggtttccccaagttgttgagagcatgcacagttcgcctcagaattaggagccagccagagtatgatggtcgtgaattcatcgagcatggcacagagaagtgtgtcgtgactgtatatattggatccagtccgaaccatgtggaatggagtgtcactgctgcggggcatagattcggaaccacctgccaagtcgtcgctcgcaaggcattgagggccctgtgtcaaatttatgaagaagaagtggtcgacaccctgctcagattctttccgccctttcagagagatcgtccagtttggatgaccaggatgcatgcattggaaggacagcagctgcttgaggacgaccccacagtcgtgtacctcactgcatacctgctcaccctggatgcacagtatgatttcttggcttggcaccaccgtcagatgattgccctagcagaatatgcagagaagcgcaaccgtaagctccatgtggatctcaccacagctcaagcctgtgtaactgccttggaaagtcgtgaagtcattgctgttgaagccctgaagcaagccaaggatgagcacatccagaagttgattgaggcctacttggtaacccacaaccaacaaaagaaggcttgggaactcccggaaggatccatagtcttggaaggaattccagtctcctctaaggctatgggtaagcaagagcaccccaaatcctcccaagatcccctaccagagttgtttgagcccctcaccattaagaaaattccagcaccctcccttgaggtcaaagaagaagctgtaagcacccagccagcaccgccaccctctgaggagctacaagagccagtaccgcttgaagaagagttcgaccccgtcttgccatctcaatcgccgccagaagaagacatcaacctcagcttcctcttgacccatccaggagatgtctcagattga

SEQ ID NO: 29997 - DNA, 588 bp, Zea mays
  Peptide Sequence Number=SeqID_73372
atgaatccatgtttcttacatgaaaaccccgaacacacaccattagcaagaggcactcacgttggggtcgctcatcgacgacaagaagaaacttggcgactgccagttcgacctctagaaacagtcctacgtgaccgcatgtgccgctatgtacgacaagctccggcgcagccgccgcttggacgcggtgcagagcggctgctccgtgctgtccatcgtcaagcaaggggacctcatagtcgtcgccaacgtcggcgactctcgggttgttctgggcaccacattcgacgacgacaccatcacgtcgtccagctcatcgtccacctgaagcccaacctgccacgagtagcgcatccggtggtgcaacggccagggtactacctaactgatgagcccggggtgcacttcgttttacagcccagccaagagttatcagtactcggtatgtcgcgcgcgttcgacgactactatatcgaggactatggcgtcatcttggcgccagaggtgacgcagaggaggaccgacaacaatgaccagtttgtcatcctcgccaccgttggggtagcttttatgcaggcttgcctttaa

SEQ ID NO: 29998 - DNA, 165 bp, Zea mays
  Peptide Sequence Number=SeqID_73373
atggccagctgccacgtcggcctcgggccaacgatcaagtggcgcaccggacagtccggtgcccctagaaccaggaaagcagccaatcagggattctctgcccgcggcccagcttgcgcattgttcactgtccggtttaatactcacttagtgaagagcaattaa

SEQ ID NO: 29999 - DNA, 255 bp, Zea mays
  Peptide Sequence Number=SeqID_73374
atgggtcggcgcgagacggagcacgaaggggaaaaaggagacaggcaaaaggggaaacccgcggccttcgtgttgtcctgcgcccaggtcaggcgtaaggagagggtccaggcgatccttgcattaaatgctcctgcgatacggtcggtcggcgtggcgatctggccaaggttgcttctcggcgaagactgggcctcgggcgagccgaagctttgtgctgatgggggttaccagctgagattaggagtcttgggg

SEQ ID NO: 30000 - DNA, 492 bp, Zea mays
  Peptide Sequence Number=SeqID_73375
atgaacaggcttgggccgaaaccagcccaggtcggcccaacagcagcagaatcacgcccgcgcccgcgcgcgcgatggcggctttgcagaaaagccctcgaggttttatctaacaggaagcgggttcggttactatttcctggggtcactgacatttcacaaaaaggtcctctggtttctgtctattctgtgtttcacgtcctcgacggcgttcaagcgcggccgtgctccggcgagcaactacgccggccgattaaggctaagaccggtgctaatctttggctgagaccaaatccgagtccccaagaacgttttccccaacttaattgcactattggtggactagggagctccggccacggtaaccgtgcggatgaattcaagaactacgcgttcccggtgatgggtggtcacacagttcaaattgatgacttgataagcatcacgaagctatgcaagtgcttaaacaagaaagcaggggacgggggctga

SEQ ID NO: 30001 - DNA, 894 bp, Zea mays
  Peptide Sequence Number=SeqID_73376
atggcgtgccggcaaggcgccggcgacgcccgcacccacatcggcgccgaagatcgtctggcgcccgacgacgacttcgagttctgcatactctcgtccggcggtctcgcgccggtcggggacgacgcgcccggcatgtgcgtggccgacgaggtcttctacggcggcaagctcctcccgctccgcctctcctcggccgacgcggccgcactgctgctgctgcgctcggactcgctggacggcgccgcgacggcgtccgcgtccgcgtccacgaccaccagcagcggcttcagctcccgctccgtcagccgcggcagcagcagcagcagctgctgcgtcagccggagcacgtcgtctaacagcgcgcgctcggaccacgccggcccggccggcagcggcagctcgtcgtccggcaagagcgcgtcctccgccgtcccggtcccggtcccgccgcggcgctcgccatcgggcagcgtgttctacgcgcacccgagcccgtcgccgcagcgccgaagccggacggccgcgcccgcgccgccgcgccgcagcacggggtccgcgccgccggtcgcgtggggcgtcatacgcctcggcgtcgtcggcgctcccgaggtgtacgcgccgcgcccgcgcgcgcccgcgtcgaggagcgcgaggttcgagcagcgcaggcccgcggacaagaagcttgccctggggctgctgggagctggcctggtgtgctcgtgctcgcctgacgccgtcgcaccggtgggctcggcggaggtggcggcgacgaggcgccagaggaagaaggcggaagagaagagatcggcgacggagcagagtgggaagggcactgctcggaggagcaggattctcgagtggctcgacgacctctccgtttccaagtag

SEQ ID NO: 30002 - DNA, 213 bp, Zea mays
  Peptide Sequence Number=SeqID_73377
atggcgaaagatataccttgcaatatgttggacaggagactgtttgcagcagcaacctcagtcagggtgggggatgagtttggacagcagacaggttggcaagaaggggatggcctcataatccgcgctgtgtcctatgcgcctcatgcccagaatctggactacatctttttgctgaatgttgcttcaccagacatatttgggctgatttga

SEQ ID NO: 30003 - DNA, 669 bp, Zea mays
  Peptide Sequence Number=SeqID_73378
atggcgcaccggacagtccggtgcacaccggacagtccggtgcctctgccacgtcaccattgccgttggattccgaccgttggagcttctgacttgtgggcccgcctgggtgtccggtgcacaccgaacatgtactgtttgatgtccggtgcaccggaactaggtgtaagcctaattccctttcagaagctcaaccataagctccatgtggatctcaccacagctcaagcccgtgtagctgccttggaaagtcgtgaagccattgctgttgaagccctgaagcaagccaaggatgagcatgtccagaagctgatggaggcctacttggtaacccataaccaacgtagagccctgcggatccaagagcccgctccatccaacccagttcaaccaaggagagctgaagacccccaaattcttaaaggtcacccggtctctaccagaggagaaaagaaggcttgggaactcccggaaggagccatagtcttggaaggaattccagtcttccctcagactatgaataagcaagagcaccccgagtcctcccaagatcccccgccggagttgtttgagcccctcaccatgaagaagattccagcaccatcccttgaagtcaaggaagaagctgcaagcaccccgccagcactgccgccctctgaggagctataa

SEQ ID NO: 30004 - DNA, 258 bp, Zea mays
  Peptide Sequence Number=SeqID_73379
atgacgggcgtcacaggctccacgacaggcgtttcaggcgcgatggcaggcgacacaggctccacggcggtcgtaaccgccgcgatggcgggcgtgcaatcttctcaagcgattatcgcggaggcagaattcacctccccatcgggggaagcggtggctaaacggacatccgcagtcgcggcgaagcaaatcagcggtccaacagccacaggcaaggttgggaacagtcgtaactcttacccgatctcctttttctga

SEQ ID NO: 30005 - DNA, 840 bp, Zea mays
  Peptide Sequence Number=SeqID_73380
atgagattgttgatgtcgcgccggcgcggcgccggcggcgggctgtgcatcaggaagaaggcccgcggattcatgtgcgggtgcggcggcaccaaggccatctccatctccgacggctccgacaagtcaccaacggccacgccgcagaccgccgcgtccaccactccccttaccggcatgtcggtcaccaccaccaccaccaccacgaccaagccgacgagaggaggaggaggaggagggtacaggccggcggcggcaccgtcaaccacggaggctccctccctgttctcgtcctcgtccttgtacgcggacaccaccgacgacggccccagcagcatggagagcacgcccagcctgtcggcgctcctgcgccagctcggcgagctggagcgcagcgtccgcttcctgcactccgcgggggccggagcggaggaggaggccgacgccggcaagctgcagggcagcggcgggcggcggcagcgtcgggccgtgggcgagggcgggtccgggcgggtggaggagagcgtggcggtggtgaaggagtcggcgaacccgctgggcgacttccggcggtccatgctgcagatgatcgtggagaaggagatcgtggacggcgcggggctccgggagctgctgcaccggttcctgtccctgaactcgccgcagcaccaccacctcatcctccgcgccttcgccgagatctgggaggaggtcttcgccgggcacgagcgcacgccggacgacgacttcctcgtctcccaccaccaccaccgcaacaagaagcatcacctggcaacgcgtggtggtgtggtgcttgagtcgtcgggtctgctttcttga

SEQ ID NO: 30006 - DNA, 1119 bp, Zea mays
  Peptide Sequence Number=SeqID_73381
atgctgctccggctgaagatcgtcgtcggcgtccactcggtggtgctcccggttcctgttccaggcggctatggccatggcgcctgctacgcggcagtagagccctgctggcgccgcagccggaggccagcgctagcggcggcgggtggcctcgtcgcgaggcggccgaggcagagcgccacggtggtgatggcgctgaaggaggagccggagggcagcagccgccgcggcttcgccggcggcggtccgagctgggaccccgggctggagatccaagtccccttcgagcaaagaccggtgaacgagtactctgctctcaaggatagcgccctctactcgtgggcggagctgagcccagggtccttcttcctccgcctcggcggcctgtgcctcgtgaccttcactgtgctcgcggctccaattgccgccgcaagcttcaatccaggaaaggatccactcaagttcgtgctagcagctgggatcgggacgctgcttctggtgtcactggcggttctcaggatatacctggggtggagctacgttggtgatcgcctgctgtcagcggtggtaccgtacgaagaaaccggatggtacgacggccagatgtgggtgaagccaccagaggtgttggcccgtgacaggctcctgggatcttacaaggtactaacgcaaattcttttggcaccccgcccccaaacaaagcacacttcatttgtggtgaagccggtggtcaacctgctgaagcagacgctggtgggcaccggcgcgctgctcgtgggcgccgtgtcgctcttcgcgttcgccgcgccggtcgaggacttcctccacgccctgagccagcctccctcctccgccaccgcctcgtccaagccgagcttgaggtgcgcggccgtcacgtactcacgtgtgcccacggtccacggcgaacatatgctgcaagcaaagctctttgcatggaaggaggagctgctgcggctaccagtcgaggtgatgcaggacgacgacctcgctgcggccgcggccgaggccgccgacggccggcccgtctactgcagggaccgctactaccgggccctcgccggcggtcagtactgcaggtgggacgacctgctcaactga

SEQ ID NO: 30007 - DNA, 480 bp, Zea mays
  Peptide Sequence Number=SeqID_73382
atggcgacgccgacgcccatgcccggaagcgaggggacgctcgtggcggtgatgccgcggtccccgtccccgacgccggcggaggcggggacatcggcgaccgagacgcccgtgctgatattcctttacttccacaaggcgatccgcgcggagctcgaggcgctgcacggcgtcgccgtgctcctggccaccgagcgcaccggcgatgtcgcggcgctcgccgagcgctgccgctttttcttcagtatctacaaacaccactgcgaccgagacctccgtcctctgtttttgtgtttctggccattttcccctgtcacttcctgttgggcggggggccttgacccgcggtcaccgttgcggctccactctacctcatacatacccttccctcccttacctagttcccgccgccgccacccaagcaggcacaaccgaggaggagcaggacccaacaagcccgccgggctggaggggcgctag

SEQ ID NO: 30008 - DNA, 195 bp, Zea mays
  Peptide Sequence Number=SeqID_73383
atgccgaggtcatctttgagccttacgtccttgcaccgtgttgttgcttcgctgctcaccgacgtcatgtccaaattccgcatcaactccctgctctgcgacgaacgtgatattaaagaagaagttgcagatgaagatatgatgctgaactccatggatgctagtctagtgatacccccggtcatcttcctgtag

SEQ ID NO: 30009 - DNA, 609 bp, Zea mays
  Peptide Sequence Number=SeqID_73384
atgcatccatttgaggttgctaaccgctgtgttatcgacggaacacagtttttgtcggggaccataattaggggtaccctcaagactcctaattctcagctgcctcgggcaagagcagccgaccccggaggatctacgtctcgcccgaggcccccctccagcgacgaacatacttccggctcgcccgaggatctccactctgaaggacgacgtcatcatcacgcccgggccatcgccgccagggtctcctccaagaatccggctcgagcaggcggctcggctggtcaccccgaggcctcggccagctgtcccccgaagacatcagcccggctcgaggcctcggcagatcaactccggcgtcgggccctgctaacggacgacccggccaggctccgaccgaccaagtcttcttttcgagccaactctgcctctgtccgtgctgacaccgctacccctgacttcggctcgtcgaagagcggccgaggggttcctttaactaagcaagagaaacctcggacagcaaggccgaccgagccgagagactcttacgcctccgggatacggatacctcactcgtcacctttgcacgaggcgactcacgcttggtga

SEQ ID NO: 30010 - DNA, 1356 bp, Zea mays
  Peptide Sequence Number=SeqID_73385
atggtgctatcggccgagatccgctttggccaccagatcccctatcccactacgacactgactcctacgaggaggaggaagaagaggaagaggaagacgaggaggagttcgagggggtggagggcggaggagatggatgaggcgacagtttcgtctccgctgatgctgccggcaacgaaggccaggggaggagtgtccgtggtcgagatggtgatgggggcgcttcggaggtcgctcatgctgtgcagcagcagcgccagcgccggcgtgcgcgagccggagcaggaggaggaatgggtgactcccccgggtggtatgcaaataggggggccaacagatgtgcggcacgcctcacacgtcaccttcgaccgcttcattggcttcctcgacctccccgctgacctcgagcccgacgtgcctcgccccgtgccgagcgcaagtttcctgcacgggatccggcggcggccctggggcaaatgggcggccgagatcagagaccccagcaagggcgttcgcgtctggctcggcacttacagcaccgccgaggaggcggccagggcgtacgacgccgaggctcgcaggatacgcgggaagaaagccaaggtcaatttccgggacgaagcggcggcagcaggtgctcagaagccaaccgcaaccgcaactactccaactgcttgtgccagcgcagcgaggctaggtcctccaccgccgaagttccgtgctgacgaggttttcgggaacatgaatggtggcaacaacgatctgttcatgattatgttcacgttcagtgacagtagtagtaaggtcgttcgtgtggagccaggtgagggcgccgccggtttcctccccgcagtggaagtgttggacgacgagcctctgttgcccggcagtaagaggtctgcggctaacatgatgctgctctccgaccagagcagcgactcgtatggctcttgtgacttggggtgggactgggacgatgacaccatgacctcagactacgcctcagtctttgctcctgctgctcccagtaacgttgtgccagcatggtacacgcaaggtggaccggtgtcgaagagaacgaggagcagctacggctatggtgtggccatgctccagcagggagatggcgcgcaggccatgccgggcggctttgaccctgagacgaactaccagtaccagccgttgccttatgtcgtcgagagcagcccgtcggacggcgtgtcgacgcacgacatggattgccttcaaatgatgcgggctggtgatgttccacaggatggggcgagcagtggtggtggtggtggcggtgatatctggagccttgacgagctgctcatggccgctgtcgcttactga

SEQ ID NO: 30011 - DNA, 243 bp, Zea mays
  Peptide Sequence Number=SeqID_73386
atgatcccaagtccaacccacgccgtgcagcgcagggggcagctggcagctgcccagccgagtagccaccggccgccgcctgaggccgtagcggtagcgaccgaccccaactcgccagcaagctcgaagctcctcagcgcaggaaccaggaggcagcagccatcagcgcccatgcctggtggctggatagtgtctgtgtatctcatatccaagcacacgccaacaggaatccttatcacatag

SEQ ID NO: 30012 - DNA, 870 bp, Zea mays
  Peptide Sequence Number=SeqID_73387
atgtccattttcccatattcaagaacccagctgcgcttgatggaccccgtggattggttggacttcgtcacagggtcctggacagagaaaaataaagccagcaaggatgtaagagctgataggtgctgtgcagctgataggttggcaaagagaggactagaccatccagagagagttggtggttttatttatgacggcaatgaagttgatttagatgcttcaaaggatgcagacttctcgatggaaccatgctcaaaatcaaagaagaaatctttgaaaaagactgtaaaacccagggatgaagtggttgctgtaaatggacgaaacagcacagggaatgttaaagcatcattgtcctccaatgaacaaaacaaatctcttcctcttatcacggcaaaacagtatgcctgtcgtgctgcacatttgtcttcccttgtagtttcatggtctccagttgtgtcattaagtgatagaacttcttgtttattgaggcattggtgcattcttgctgttggctctaaatctggaaatatttctttttggaaactatataagccagaatattacacaatagatgctggtgtggttaccagtgatccgatgctcatcggggttttgcatgctcatgaatcatgggtcaatgccataacttggcaagttctttctgcgggctcttcaaaatcctcgttgcttttagctactggatgctcagatggaagtgttaagatatggttagggaatattgaagggttaaatcaatgtgcaattggagaagaagtgccatttgtgttagttgctgaggttgccgctaatttatcagctccagtgtcgtcaatctcattgggcatacctgcccggtctcaacatgag

SEQ ID NO: 30013 - DNA, 780 bp, Zea mays
  Peptide Sequence Number=SeqID_73388
atggcgggggagacggtgctggtcaccggcgccagcggcttcatcggctcgaccctcgtccgcctcctcctcggccgcggctacaacgtccacgccggcgtcctcaaccccgatgacggggcggagacggagcacctgctcgccatggccgctggcgctggcgctggcgagggccgcctccgcatcttccgtggcgacctccttgacgacgccgcgcggggctgctcgggcgtcttccacctcgcgtcgccctgcaccgtcgaccccgtcagcgacccccaggtttggtaccctgtttccaagacgctggcagagaaggcagcgtggaggtttgcagaggagaacgggctggacgtggttgtggttaatccaatgtctgtcctgggccagataatcccaccgaccatcaattctagcatgtccgtccttctacgcctccttcaaggctgcacagaggagtacaaggatatctggatgggggtagtccacgtggaagacgtcgccttggcccatctcctggtgttcgagaacccatcagcttccgggaggcacatctgcgccgagtccatcagtcacctgagtgacttcgcggccaaactcgccgagctctaccccaacaacaaagtgcccaagttccccaaggacacccagcctgggctggtaagagcggaggcgggagtggcgtcgaagaagctcgtcgagctagggctgcagttcagccctctggagaagatcatcagggatgccgtggagagcctcaagaccaaaggttgtaactag

SEQ ID NO: 30014 - DNA, 1236 bp, Zea mays
  Peptide Sequence Number=SeqID_73389
atgccgaacctagaagagttgcagctgctgatggactacgaaggttactgccttgaggccgtgtccggtttcttcaagctcatcccacttccagtccttcaacggctctttgtgcgtctccatattgatcacaagcgggagggagaaggcagctgcggttgctcagcttcttcctggataagtcccctgtcctccagcagctggtgcattggagaaggcgtcgagcgaggcaagcattaccgtgtgccggcccaaggaagacgataccccgaaccatccacacacgaggttcatcctggaaaaccttttgatggtgatgatgcagagcatatgcaatggatttattcagagattggcaatgatgcttctcaatttgttggtccacttgtattgaacctgttgataaagtgcattgatcctagaacatactgtgcgattatgcgtatcttagcgcacctttattatgttctttgcaccaatatactttgttttttccttttccggtgtgatggtgagatcgacgtggagctaaagcacgtgagggatgctgtggcgaagaaaggccaggcactacacgaggagcaggacatggtcaagaaggtcgccctcgccacgctcgacatcctcagcgtcggtgctagccgtagtggactctcctcctcccgtgcgaccgcggcagccagccacggcctggccctagcaactgtagcaagcagcagtccccgctcggctgccccggcacctagccccagtaactgtaggcagcggcagcgcggtcgccccagtgccctccgctctcccaaccgccctccaagacaagtgaagttagatcaagtttgttattgtactaggtggatcaagaacaataacttctgggcatgtagtgctggagtttatcttgaaacttcttgcaattatttacatatgtctatgtttgtctgcttacttaagtctctagcaaaatcaataaggcacttttgtcctgagggtgctttgttgctcctttgtcctgactgctttagtagtccctcagtcaatccggttccacaagttaaccggaaatcttcatgggtgatagctgtgtcagattcttccacgcatagggcaagtaatgcaagtgatagctgtgtcagtttacccccattttcttgggcatcacttgtctcaaatgaagtccattggaggttcgcaatttatgttccgtggcatcgcacgggcacctacctagttagttaa

SEQ ID NO: 30015 - DNA, 321 bp, Zea mays
  Peptide Sequence Number=SeqID_73390
atgcggaggccagggtccacgatcaggtggtccaatagtgtcaggttgaagtcccccaagctgatcttcaggatcctcaaagaggaagacgtcggcgcgcgcgcctgcctgaagctgaggccggtgagcgtgctgatgcagctcatcacctgtggctcgctctcggtgaaggatcacgggaacgctggggtcgttcagatgtgcaagccgaggttcccgaaccttaggttgctcccctcgccgctgatctcgcgcaccatgatgatgggcgagctcgactgtctctcagaaaaccccaagttgatggggataaagctgtag

SEQ ID NO: 30016 - DNA, 267 bp, Zea mays
  Peptide Sequence Number=SeqID_73391
atgtcccatggtacagtagacctgtggggatcagatcgacagctcggctcaccgccgatgacatccgtcgtgatccgtgccgaccagcgtcaagattcacgcccggagaacgaagaagagagtgaagtgactgaagagaagacaccaccaccttcggagtctcaggccgggaattgtttctactttgatatctgtggatctgagcctgattcacctgtgaacgaaggcaagccccggtgcatgcaacccctttccttgtgtttttaa

SEQ ID NO: 30017 - DNA, 462 bp, Zea mays
  Peptide Sequence Number=SeqID_73392
atgaacgcgctctcccgcgaagggtgtcggcacttcgaggtcttcaaccaggccgatgaagattttgagcgagatatctataaggttgaagaccccgtagtgaaggaatccgccggggccatctacgaccggatgtggggtccgcacggtcgcgaggtggtcagggagcgggccgagacggcgagggctcaggcggcgcgtggcgagtgggtggacgacttcggggcgttgaacagcgcgctgcctgacccggagccgaccccggcggaggccgtgtctggggtcgccctggagccaaccccggaggctgcggaagacgcaccggaagcccccgcatccgctgcggccggcgaagacctgcccccaaaggtggccgaaggcgcgcctgatgcccccgcagctgctgccccgagtgctgaaggttcaagattttgggcctgcgcacgcaaccgctactactaa

SEQ ID NO: 30018 - DNA, 2210 bp, Zea mays
  Peptide Sequence Number=SeqID_73393
atggcgcctcctgtcgacgtgatcggtccgtggtgccctaggttgggcgatgtagaggctcttctgaggtcgaggtcgagtttgtcttccgaggtcgaggtcgagtccgagcccctgggtcgggcgaggcagagaccgtcggctgaggccagggctcagtccgagccctggggtcgggcgaagcggagttcgtcgtcttccggggctgagcccgagtccgagccctgggtcgggcggagcggagttcgtcgtcttctggggctgagcctgagtcctagccctggggtcgggcgaagcggagttcgtcgtctccccggggctgaacccgagtccgagccctggggtcgggcgaagcggagttcgtcgtcttccggggctgagcccgagtccgagccctggggtcgggcgaagcggagttcgtcgtcttccggggctgagcccgagtccgagccctggggtcgggcgaagcggagtttcctatggcgcctgaggccgggcctggctgctatcagcctcactctgtcgagtggcacagcagtcggagcggcgcagtcggcgctgtcctcttgtcagaccggtcagtggagcggcgaagccacctttgcattaaatgctcctacgatttggtcggttggcgtggcgatttggcctaggttgcttcttggcgaagactgggcctcgggcgagccgaagctttatgctgatgggggttaccagctgagaattaggagccttgagggtacccctaattatggtccccgacagcagggcaggcgacgcctttggcgggcgaagcgggcgtcgtttcacctccaccatgatgaccgcgtcaaaaaagggaccgtgaaaggggatattgcgaaagggatccttctccgcgaaggaagcgagccccgagccctcctactgatcaggggttcgaaggctggcccctcggaagggttcgacagccacccgagagcacttgggctgagggatgactctgggtacgtccgttacatggccgaggctcgggctgcgctcccgaggtcaaggcctcgtctaccaagggacgcgatctcgcctcgcccgagcctagcctcgggcgagaacagtagtcccggacgaattcacgcctcgcccgagggcctcctcaagcaacgggcgcaccctcgcctcgcccgaagcccagctcgggcaggcttcgttgtgaagcaaccttggccaaatcgtctcaccaaccgaccgtatcgcaggcgcattcaatgcaaggatcgcctgacaccttatcctgacacacgtgcctcagacggcaaggtcgaaccaagttcagcctcaagcgcaacaggaagctctgcctcgcccgaccttaggcctcggcctcagaaggaggtctccgcctcgcccgaccctagggctcggcctcaacctcggcctcggaaggaggtctccgcctcgcccgaccccagggctcggcctcaacctcggcctcagaaggtggtctccgcctcgcccgatcccagggctcagcctcaacctcggcctcgggaggaatcgcgtcctcgcccgacctcggcctcggcctcaggggaagggaacaagaccggcgtcccatctgggctcgccccggtaacaagtaatgatggctccccacgtgcgcccatgacgatggtggttctcagccccctacggaagcaaggagatggaccccccggggtcgagagaaaggtcggtcccctcgcaaaaaagtgcggcaaagcctccaagcgagtaccaacattccctttgaggctcggaggctactatcgggtaccgtatataggggtacccccaacactcctaaacacggctggcttcgttgtgaagcaaccttggccaaatcgcctcaccaaccgactgtaccgcagtcacttcgccctttcactgaccgacctgacaggaaaacagtgccgctcccccgctccgactgttgtgccacccgccagggtgaggctgacaatagccaagttcagcctcaagctcaacaggaggtctccgcctcgcccgaccccaatgctcggcctcaacctcggcctcggaaggaggtctccgcctcgcccgaccccagggctcgacctcaacctcggcctcggaaggtggtctccgcctcgcccgaccccagggctcggcctcaacctcggcctcgggaggaatcgcgtcctcgcccgaccccggcctcggcctcaggggaa

SEQ ID NO: 30019 - DNA, 1245 bp, Zea mays
  Peptide Sequence Number=SeqID_73394
atggattcagagtcaccgcttgacccctacgacgtcaacatcaccagaggcgggccgccctccatcgatggccactccgcctccctcaccccgttcgtccacgacgtcgccgcccagatctgttaccaggaagtcgagtcacacctcactgcatcagacgacggcgacagatcggacatccgcgaggccgacgttagggcccccgcgcccgacgaccggctgttggtgtcgctcgatggcatctgccaggaggggagctgcctcatctccaccgactcggacgcggctacagacgtgcggatccgtcagatcaagggcgataccggcgctcgggcaccccgcgtcatcgcgttggagtcctatgccgtcgccgccgatgtgaacactgactccccgttgtgtcaaatcgaagaagatgatcctgcatccctcccctctctggagtcgccatggtcccagtacactcgccgcgacggatccggccacccgaacgcctacggcgccgtcgacatcctcgtccccgtcaagtgcgtgctccatgaacccccacacagtggctacgacagctccctcgacgacgacccgaagtcccccgtcacctacttcgacgcgccactcaaccgagctatcggttgcgttggtcatgcactggtagcgacagctgcactccgcaacagtgttgtgggcatagcagggcatgggctactggcttgggtggtggctgccgggtcaaaactggccacctgctcgaacacgaccactaccacttcaacttctgtggagcctctccttccctcacaccacgacggaggaagaagcagtgacagcgtctggacaggtatgcaaagcaccgagctagacggagagttcagccccgcatccgcctttgaccaattccactgtgttcccaccaagaagactgacatgctgctcagctactaccttccaaagccactagcagtttctgaagaagagaaggccgtgcaggagaagttcaaagaaatggtgaacgaatgcatcgacctcttggtttgcattcccgcggaaaaaaggcgcccactgttcttggtgttcagtgagctgtacctgaggtggtctgctgagtggggttgtgccaagtggtggatggcgctgcagatcattgagaagctcgagatcgtgcgcaagatggtgtcgagcgcttgcgacggcacccctcttggcagcgagacggtgttcgccaggaagaatcaaggacgtggatga

SEQ ID NO: 30020 - DNA, 882 bp, Zea mays
  Peptide Sequence Number=SeqID_73395
atgccagagcattgtggggatggtgcggggcccggttccgacggtcggtgcgggcgggacgccgtacacgccgcccacggtgtcagaggaggtggccctgccgtcgtgggccgcaggcgaggcgaggagctgttccaccgtggcaatctgagcagcgatagcgtcggcggcctcacgctcgcgctcccacacgagggtcacgtcccgcagacgtgcctgtcgcgccgcgtgctccgcgcgggcagcggtgagggcggcgacagtgtatcccgggtgggcaaccggtggaggaggcggctggtcgacgataggatgtggatcgacgaccaacggagggggggggtcggtgggggagggtccttcggaccgttaactcccaccggaaccgcacccgccacagcagcaagggcggaggcagcgctcgcggcgtttgacccagtaaagctaaagaaacttcgcccaagtttcaaggagaattgtggtaccgttacagctggaaatgcttctagtataagtgatggagctgctgcattagctttggtgagtgggcagaaggctcaagagcttggcctgcaagtccttgcaaggatcaaaggatatgctgatgcagctcaagctcctgagctttttacaaccactccagcacttgccataccaaaggctatcacaaatgctggattagagtcatcccatgttgatttctatgagattaatgaagccttttcggctgttgcacttgcaaatcaaaagctccttggaattccttcagaaaagactaatgttcatggtggagctgtatctttaggacatcctcttgggtgcagtggtgctcgcattttggtcgtcctcgagctgcaacttaacgatgacgctaacgtctaa

SEQ ID NO: 30021 - DNA, 717 bp, Zea mays
  Peptide Sequence Number=SeqID_73396
atgtcaggccctccacccaccaccacctcgcctccatcgtcctctacgccaccaccagtcgcctcaacccctgccctcgcgtcaccggccagggctgaccctcaccctataagtcgtagcccaggcggttgccgatctcggtcgttccgtggcggccatcaccgccttcctctccaccaattttccaccgccagggtacacgtcccaaaccacccttccgtcgccgcaacatgcattgccgacgccaccggcatcggtcccgtccccccttccaggctcgattcgcccacccaacgctgctgcggcaccatgcctgcctattcatctgttgcccatgccgccatagccttcccctattccatcatacgccatggctatggggggaccccagtacacgatgccttcgccgcaaacacagattgtgacatcaggcgcagtcatccctcagagatgcctgtccctttacctcatctccatgccaccatcaccatcgccaattcaattgtatgccctctcatcaacgatggagccgaaattcacgatggcaacgtctccttcaccaaccctgttgttcaccgccccatgcctatgccgcaacagcagcactgcgatgacgtcttctacgggggcgtggatggcatccgggcatcgatgtcgcaggaggtgcgccggcagatgctcgaggcagccctggtggcggtcgaccccggcacatag

SEQ ID NO: 30022 - DNA, 444 bp, Zea mays
  Peptide Sequence Number=SeqID_73397
atgctggtagactacaacaacggcccgacgcaacagggtatcaagagcgtcgtggaagtgacacccacgagcggcgtcacgagtgatgggtctagagacccatccctccggctccggctcctccgagagctccgtgccgtggctcgaactgccaccggcgtcgtcatcgtttccatctccgtcaaggtctcctccagcagccgggatgccctgaggtggtgcagagggcatctcttggctaaggtgcaggggaaggcggtctctcagactccacctcccgctgaggcgagggggaagagtcctgctgctcctgctcctgctcctagcgttggcgctcctgctcctcgtgcaggtgacgatacagtctctccaagtgactggactgacctggcaccgtgcgacgcagtggacgctccgctaagcgagaaggcaaaaatgggatga

SEQ ID NO: 30023 - DNA, 188 bp, Zea mays
  Peptide Sequence Number=SeqID_73398
atgactttcctttaccagactccgatatcccttaagttctcggagttccgtgaaggaaaaaacgaagaagagagtgaagtgactgaagagaagacatcaccaccttcggagtctcaggccgagaattgtttctactttgatatctgtggatctgagcctgattcacctgtgaacgaaggcaagccccg

SEQ ID NO: 30024 - DNA, 273 bp, Zea mays
  Peptide Sequence Number=SeqID_73399
atggctacgggaggtgcgcacaaagggagagatgtaaaagagaggaaggaaaaggtggagggtaggataataggaaatggagtgggtaatttggcttgcatgttcacgcgacaggggaagaagggtaccaaccaggatgccatggttgtttgggaggacaattcaaaggatggtttagcgatggagcaagcaacatctccatcagggatggaggcagcagtagggcgggcgctcgagccccctcctgttcctgagaccatggagtcccactga

SEQ ID NO: 30025 - DNA, 252 bp, Zea mays
  Peptide Sequence Number=SeqID_73400
atgattaaaaatagtaggacatatgcaatagtgataagaaaaattcagtggacccttgactacttttgtaccactgtaaaaatagtaaccaccctagaatatcagaattgcaacctcgctgatggagagtatgtgctcatccccgagcaaggagttgcccaagaggaagtccaggagccagctccagagcttgccaccgaggacctccttgcagccccagcttttgaaggcaagccccggttttatgcataa

SEQ ID NO: 30026 - DNA, 285 bp, Zea mays
  Peptide Sequence Number=SeqID_73401
atggcggctcgggttagccggtccacgtttaccgacgggcgtgcacgagtggcagacgggagcagacctcaccggcgttgtagagctcaattaaaccggtcagcaagctatgggaaggtgttggggagccgctggcgtctggcgagcttagctgggcatgggcgtgggcgtgactacggtgagctggccacggtagcccgtcttcgaaggaggaggcaggtcgcgaggaggtcgccggagctacgagctggctcaggaaagctaggcgcggtgcggagggggtga

SEQ ID NO: 30027 - DNA, 318 bp, Zea mays
  Peptide Sequence Number=SeqID_73402
atggcatccagaatatgtcagaaatcagcgacgcctgtttttgggcctaaaggctttctacgtcctagggttgctcgaccatccccttggccactgactgagtcaaggatgactccaattcaagtgggggatgatgataaatacatcactcccatacaaacaatggatggactgacaacacgagcaagtgcacgaaagttgaatcaccagcttacgcttggtgccatggatgttttgatgattagaaactttggagatgaccatgaagaacttgggaaaggccaaggtgtcaaggagaaacaacaagggcgtccataa

SEQ ID NO: 30028 - DNA, 786 bp, Zea mays
  Peptide Sequence Number=SeqID_73403
atggggaccgcgggtcagtcagccgcggggacagacatagcagttggcgtgaccgaaggcggattggcggtgattacgtcagcaaacacacggaggcggcgtgccattcgccaatcaagctttggccccacctgcagcacccgaccccaccacgtggatggctccgaggctgccacgtggccagagaagatgatatactccaaagtatcaacagtgggtccggacccccatgggaaagtgctagacccctgtatatacaaatccaggactccgggtatggtccaggacctccacgtgggcaagccgaacctctcggatgggatccggacccctctgtatggggtcctggccgcccacagtgggatcccgggactctgggatagagaatacctaggccttaatcaagtacaagcaggggtccagagccgacacgtgtccagaccttatcatgtatgttttcgctccccgcccaggcggagacccgatgctgccacgtggcctactacacgtgatgtaagccaatgggcggagcctgacgtaaggcctctgggccgcgcgacctttgcatttattgcggataaggcgcgccgcctgtccattccactagcagacggcgaccagaccatcccacaggcggcttgcatgtccattccattggcagacgacacggcgggtgcgttccgccacccggccagagaatttcctctccaacaggctccaacacgatacacggcccaacagcccaacagatggtgtcgcagcaccaaaacagaatctgagcgttga

SEQ ID NO: 30029 - DNA, 207 bp, Zea mays
  Peptide Sequence Number=SeqID_73404
atgagcagtcttggtcaatctatccacaataacccaaatggaatcatggtgcctggaggtattgggcaatcctacgataaagtccatgcaaatgtcttcccatttccaagatgggtgcatggagaacttggaaaggtgagcttcatccagtatcttcgttctgagctcagggtccttgggaacaaccaatcaatctccaaaccatag

SEQ ID NO: 30030 - DNA, 216 bp, Zea mays
  Peptide Sequence Number=SeqID_73405
atgaagtacaatggatcaagcagtctcattagctgcgagaagcagacgattcaaatcgagtttttatccttgcaagtgaccgcacttgtacccaccataaccggaatgggagaccacgtctcaggtcgcgtgaggggatatgtctgcgggcaggttcacttaggtactaggcttaccaatttaccatatttctcggatttaataacattatgctaa

SEQ ID NO: 30031 - DNA, 762 bp, Zea mays
  Peptide Sequence Number=SeqID_73406
atggatccgaagatgacagaggtgacccagatgttcgcccgcttcaaggcggcctacacccgcaacgacctcgacgcctgcgtcaccctcctctcacagctcaaggtccatctcaccaaattccccagccttccgccctcatttgagcagacacctaaagccgtggaggagctcaaacttgcaagtaagatggccttgggcctcatggggacatttatgagcatgctgttgtttttgagtgtgaaacttgaggaccaagatgcatttgaacgtgatttctgtcagctaaagccttattacatggatacatgtggcataattcccccctcaccagaggagtacccaattttgggactcaatcttctgaggctgttggttcagaatagaattgctgagttccatactgagctggagcttttacctgtcaaggcacttgagcacccttgcatcaagcatgctgtagagcttgagcaatccttcatggagggtgcctacaaccgagtgttaagcgctcggcaagctgtgccacatgagacctatgtttacttcatggaccttctcgccaagacagttagagatgagatcgctgggtgcagcgaaaaggggtatgattccctatctgagcacccggaatgggagcttaagaacggtgccgtcttcttccagaaggcaaaggagtcacagccctacaaggagatcccatccttgcagctcatcaaccagacgctcagctatgcgagggagctggagcgtattgtatga

SEQ ID NO: 30032 - DNA, 348 bp, Zea mays
  Peptide Sequence Number=SeqID_73407
atgaaggagaaaagcacagaggagttgttaccgacagttagggccacaaagatgcttgttcactttgtgcagcagctaggccctccggcaaaccttcctagttgcccaacagaagtagagcactattgggggccttcgtcctccgaaggtcctcaaaaacgtaatttaacaatatttcccaagtatgatttatggacagatatcttaggattcatggtaaaagcagacatgatgaggagcttgatcgtgacgaaggttgtcgtcgctctgactctgtgcggaagggagctttggctaaatcgcagaaagttgttccccttatgggaaaaggctgttcagtcctcatag

SEQ ID NO: 30033 - DNA, 521 bp, Zea mays
  Peptide Sequence Number=SeqID_73408
atgaacgtcgacgagggggagtggttcggcgggcatgtaacgacgaggtttggacggggttcgtgcacgtctccggcgagcagaggaacgggcgcagtcgtcggtggacggcgaggtacaaactccagcgaggctccacggactccggtgacgacggtgatgaactccggcgagcaagagagtgagagaagcgtgagagagagggaattcggggaggagagaggaagggagttcgaccatatttatagagagaggagagggtcggtcggcgtcatcattgctgccattgatggcgttcatcactgggagagggcgtgggcagggctgagcgcgcgctggggcttcgtggcgcggcgcggcatcggatcgcggctcggtgcttcggtcctgcgcgcggtcgaggcggccgggcgcgcgggatcggccggctggagtcgcacgcggggcctgggcggatggcgctgggttcgcggccgggatcgcgaccgggatcgcgtcctagcggcgcttgggttcctgga

SEQ ID NO: 30034 - DNA, 156 bp, Zea mays
  Peptide Sequence Number=SeqID_73409
atgacgaagacaaaaacaatatcgaattacatttgtaccttcggcttggcagaagggctattcgaggtaccttttcataacaagcttggggaaggtgtttctcggacgttcgacacacctctcgattatagtttttgcggtctaagctcgtcatga

SEQ ID NO: 30035 - DNA, 936 bp, Zea mays
  Peptide Sequence Number=SeqID_73410
atggcggccaacgcggccaaaggagggccggcagtaatgacggtggcagacgcgcgggagcagcgggcacgtcgacagccaagctcacgtcccatccgggggcagcgagagagccccctctcatggtgtgaagacaacgcgcccgtgatccgttcctcgagcggctcgcgcacgcccaacggctgccccgccaactactcgccccgtcgcattaactccgcggctggacaggtggcgcttctggcaagagcaacgggcgacgcttcgccttcgccgaaacaaccgcaccaaaaaaggctggcccccgaagggttcacagtcgccccagacgccgagcgagggatgaccagggctcaccggagacaccatgttcggtgcccatcgaggaggctcgggggctgctctcgcaaacccggctccggccgaaccgttgacagcgtcaacataccagcccgagaacttgggccccgaccgtacacccgggctacggccagctcgcatgagggaacaaccagaccagccgaagcattacgcaaggcattaagacctcgaaggagtgaaaccactcctccgaggcctcgggggctacacccggtgggtgcgctcgcgcgcacccaccggaaccaaatgcaaccgagaaaggctggtccccttgcaaaaaagtgcgacgaaagcctccaagcgagtgctaacactcccttcgaggctcgagggctactgtcggggaccataattaggggtaccctcaagacgcctaattctcagctggtaaccgccatcagcataaagctgcagaggcctgatggggctcggactcgggctaagccccggaagacggcgaactccgctccgcccgacctagggctcggactcgggctaagccccggaagacggcgaactccgctccgcccgacccagggctcggactcgggctaa

SEQ ID NO: 30036 - DNA, 756 bp, Zea mays
  Peptide Sequence Number=SeqID_73411
atgcagcccggccgcacccctccaccggcggtcacccaagacggtgacctccggcttgatggtgggggaaagcgagccgggctgcggcctctgcccctacctcggcctcaaggattttcgtcgtccaggccaagatggaggatgaggcgagtcggggggctgcctccgtgggggtcggttgccctcttcttccccgggcgtctgggggagaacgacatcctccagcttcacggagacttcctccagccatgccgggagaggcgggccgccgtcactcagccagggcgcagcaccacatccttcgtccggatgacggtagccccggctgcttcgtcgctcggggcgagggtggttatcgctgtcgccggattgggtggcggcgggccacctgtcggcccgcgatcgttccgcgggctccccaatcttgtggggttgttcgtgcccatggggacgggaccggagttccgtttgagacggcacttcgaatgccggtcgggctggcaccctcgggagatggtcggccgaggccccagaggcgaccggccgagccgcctgctcgggtcggattcccgaaggagtcccaggcagcgattgcccgagcgtggtgatgacgtcgtccttcggagcggagaacctcggaccgcgtcgccgcccgaggctaggtcgggcctcgccggaggtgtcgtcgatgccgagggtgttgctgccctcttccagcgtcaagacccgagcctgcagggtcaaagtgtcttgtag

SEQ ID NO: 30037 - DNA, 459 bp, Zea mays
  Peptide Sequence Number=SeqID_73412
atggctttgttcagccaaagtctgcttagtctgggagcaccggactgtccggtggtgcaccggactgtccggtggtgcaccggacagtgtccggtgcgccaggctggctcgagcaaactggccgctctcgggaattcaccggcgacgtacgactataattcaccggactgtccggtgtgcaccggactgtccggtgctctcaggtatgtgccgccggtcattgacgcctacctcggcgccaagatctatggcgccgagagcttatggaaatttaggaagggtcctttgaccggaactgccttcgacccgctgcctttgccaagtggtgttccagtgcctatgtgtttttgtggtgatccttgtaaggttgataagtctgaggatcatgacacctatcgacagaggtattggatgtgtgctaactttgcttttaaccaactattgttcaacgtcggatga

SEQ ID NO: 30038 - DNA, 789 bp, Zea mays
  Peptide Sequence Number=SeqID_73413
atggcaggctccatggtggaccgcgccaccagcgacatgctcatcagcccggactgggctaagaacatggaaatctgtgacatctgcaatcgcgaccccgggatcatcattcccccttggaaccgattcttggcaatgccaggcggcaacgttggaggcacagtgtggctttgcagcatgctcttggcaccagtgaaagtatactaccattctggcagacttcggcttaacccgaacctgtacgagagcgggaaagtgtgtctgagccttctgaacacctggtggggcaaggggtgcgagaagtggggcaagtcgagctccaccatgctgcaggttctggtctccatccagggcctcgtgctgaatgataggccatacttcaatgagccaggatacaagaactcggctgaaacgacaggtggtgagaggtgttccttggcttacaatcagacggccttcgtcagatcatgcaagacgatgctgtattcactccggaagcctccaatgcattttgagacccttgtgttgtggcacttccacgagcatgagcgtgccatcctcgacgcttgcagggcttacatgtctgggacagtcgttgggtcgtctgctgggactgggagcaaccgcagatacgtccatgacaagtgctttgcagaattccacaagtcgctgatgctctacactgaacatctcagggctgagtttgctgcaaacagaagacgagtgatggagctggaaacagaagacgagatcgtgcctagcatagcagctagcgtgaaatcgtgttga

SEQ ID NO: 30039 - DNA, 612 bp, Zea mays
  Peptide Sequence Number=SeqID_73414
atgacgcctgggcgtaaaactacagcaaaatcaaccaaaccaacagaagtgccactaacagaatatgagaaattgagagctgagaatttgatgaggaataaccaaaagttgcaaagacttggtgtcactacactagcgtcaatacttaaccatacttctgcaaagagcaaggttgacactcgtgaaaaatctggatctttctatgaggtccaggaaggtgcacttgaggcaaccatagatccaaatggaaaaaggaatagaagtatgggcagagaactggataggataagtagaggtttatgcactaacatccccatacacattgctgaaggaaagatacggccagaagcacctatgcaagctgccaaacttgcatcagagggcgggattatacttaggcagcaaatgtcgatcctccggcattggaaagagtacaagaaggataagtcaattgttacaaactatatcggcaaagttgctgcccaattcaccatggacaccaacaataatgcaatcaaagccgcatgtgccgatttgctcaagggtggacaacgacagatgaggtaccagctgaaaaaaaatatttcaatgggataccagcaaatcaagtga

SEQ ID NO: 30040 - DNA, 1278 bp, Zea mays
  Peptide Sequence Number=SeqID_73415
atgggcctgtgcaatgtagcatcgagatccagtgcgctgatgtccacgtccacatcggatcttccctcccccaatgccatcttctgtgatataaaagttgaatatgacgtagaacaaaagcttttcagttctgatgagagagctgtatatgaagaagccctgaagcatatcactcaggaaacgaaggaggaatatctgcccaaaggtgttatgtcagttttactgcttaagcatcagaaaatagcattggcgtggatgctttcgaaagagaattgttcacattgtccaggtggaattttggcagatgatcagggtgttgggaagacaatttcaacgattgcccttatacagaaggagatggttaagcagtctaggttcatgactgctggttcatacagtacaaagtttgtcccaaacagtgattatgacaatggcagtgatgttgtgattagcatggacaagaaagaaccgaaagatgaacccttgaatgagctagatggttctgcacgattgcatgtcgccagcagtcttaagctctgtgatagtaagccaaacactgctactgataaagctgaacctaagaagaaggccagagtgaggtactctgcatcaaacttgaggttgaagactagaccagctgcaggaacagtggtcgtctgccctgctagtgttcttaagcagtgggctaatgagctctttgtgaaggttatggaagacaataaattgtcagtcttggtttatcatggaagttcaaggactatagatcctaatgagttggcaacatatgatgttgttgtcaccacgtatatgactgtggcaaacgaagtacctaaagaaaattctaatgatgagcgaaagaaatgtgaaatggacggaatatgtccagaaatttccatcggcagcaaaaggaaaaagcagagcaagccaaagaagaaaaacaaacctagcaattcagaaggtggcccacttgccatggtactatggttcagagttgtgcttgatgaagctcaaacaataaaaaattaccggactaaagtgtctagagcttgttgtggactgagggcacaaaggagatggtgcttatcaggaacacctatacaaaacaaaattgatgatctgtatagctatttctgtttcttgaagtatgaaccttactcaaaatttagtaatttcaaatatatgatcaagcaccaaattactagagattcagttcgtggctataagaaacttcaagctatcttgaagataattgtactgcgacgcacaaaaggtaagtag

SEQ ID NO: 30041 - DNA, 1458 bp, Zea mays
  Peptide Sequence Number=SeqID_73416
atggtcgcctttcaagggggtcaccctccttttaaaggcgactctccctacctgcgtccccagccgtcgtgggctgagtcttctccaacacgctccaaggtcctccccctacggcgcgggggctgggtcccacacgtcttgcaaaccggcccagagcagaagaagccaaaccgccgcgcgcggtgcatgcaaccgcccagcggatacgggcattcctccactttcgcccagaccagcgggcgaaagggcgggcagccatgcaggcggcatgcaaccacgccaagtgggcgcgcccctccgacttccaacgcacctagcatggggccccacgcccacgcgtcatgcaaccggcgcgccggtcgctacgtgcaagcaactgcaccgccactcgcaccactgccacgcctcctcgactgcggaaccagtaccacgactcgaggcaaccctgcgtacgacctagcagtgccagccaggcgcgacggtcaatacggccaaaaatgggccggcagtaatggcggtggcaggcgggcgggagcagcggtcacgggaagcgagcgacgcttcgccttcgccatgatgaccgcgtcaaaaaagggaccgggaaagggggataccccgaaaaggatccttctccgtgaaggaaacaggctccgagcctccctactgatcagaggttcaaaggctggcccctcggaggggtttaacagccgcctcagagcgcgtgggctccacacccactactggtcagaggttcgaaggccggcccctcggaagggttcaacggccgcctcaggctactcgggctccgcgcccactactgatcagggcgacgaacatacttctggctcgcccgaggcccagtcttcgccaagaagcaaccctggccaaatcgccatgccaaccgaccaaatcgcgggggcatttaatgcaaagggctcggactcgggctcagccccggaagacggcgaactccgctccgcccgacctagggctcggactcgggctcagccccggaagacggcgaactccgctccgcccgacccagggctcggactcgggctcagccccggaagacggcgaactccgctccgcccgacccagggctcggacttgggctcagccccggaagacggcaaactccgatccgcccgacctcagggcttggactcgggcacagccccggaagacggcaaactccgctccgcccgaccccagggctcagactcagccctggcctcagccgacggtctctgcctcgcccgacccagggactcggactcgacctcggccacggaagacagactcgacctcgacctcggaggagcctccacatcacccaacctagggtgcggaccgaccatgtcaacaggaggcgccatcattaccctaccccaagctgactcaggctacggggaacaagaccggcgtcccatctggctcgctccgtcagacaagtaa

SEQ ID NO: 30042 - DNA, 2883 bp, Zea mays
  Peptide Sequence Number=SeqID_73417
atgacttcgtacggcggacagccatcggtcgaagtctttgcgaagtattattgtttgcactggcagaagaggatgattggagatgaagttgctcagtttgggtcctgcacgtttacaccgaagaccggcaagaccacgatgcaggtagtcgagttggttccttgcgcccgcaacaagtggggcaactggaatgagttttggttttacgttgctgagggtaccgttgaaaaccatgagggactccccgtgtctgagatgtgttctcatttttactcagcgtacccgccctttgaggtggcggaggaggatgcggacgaaggggcccttcggtgcgccgccggcctgagcagtgggcgcgatttggttgaagaatttgtggcgtacggggtatggcccttggcgcatggctgggcgttgggcgaagtgtgccctcgccagatgcctttccatggtggaagggtggtgcgaagtcccgccttcgtgctgaacctgcaaagccgcgatccggccgcctttgtgcatgaggcggaggatggggcggtgcggctcgttggtcgttacgtgccgaggacagagggccagcgcagctgggatatccgcgggtcgaatgaccgtttgaacagggtttttgaattgaatcaattgccgtatgacggctatcctggtcaagacgatgtggaccgccgtgggaagaaaccggtggtggagactagagacgaccctgcgtcggcggccgccccatcctctaaaaagaggaaattaggtactgctatgggaggacttggggtttccgatggttttgctagagagttgatgaggacatgcgcggccccggggggaaggatgtcttcgcccgagctccgggagtcttcggctcggatgctgagggttaccgggggttgttggcctaggaatgttcctatcccccgcgcggccggcgaagacttttttacatctcgcatggtttgtgaatggagtgtttttccttacgggcggaatattgctgctgttgtgtcagcagtgatggacaaggatcgtcagggagctgcacaaaagcgccaggcggttgtcaggcttcatgaagccaggccgaagaggcagtggggggctgcgaaggctgcggcccctagcggaggcaagccgccgctggcggcgaagtcgggcgtccctgcatctagcaaggcgccggaggcagcggcaggcgccggaggatccaaatcgacgaaggctgtgccgccgtccggcagggtgtcggaggtcgcgaaggcggcccgagagttgccatcgtcgggcaagcacgtcgccgacttcgccaccgatattagtgtggaggactatcttggtgggtcggacgagggccagcttgctattgttgcgcctgccgcggcgaccatggcggctgccgtagtgccgaaggcgaagggcgatgctcttagtgccggaggcgagatgtcggcactggcggccgtcagggatgaggcgggcgctgcgtcctgccggctgaaggaggtggctgacttcgccaaccgcacggcgtcggggggccctcacgggcagttgtgtctgtcgaagtcgagagacttcggacgcaacatgcggacgccgtccgtgaaaaatcggccgccgacagtggaggccaatctggcgcgggcgaagggcaatcttgccagggagcacgccgagcagctgcaggagcggctcatcgccctagagagccgcgtggagagggccgaggccgcgacgcgcgcggaggccgagcggacgcgcaaacagcttatggactcgtaccataagctgggcgcgcggaccggtgacttcgaagtgccggaccgagagtccggacttcgctgcctggagtgggtacaggaggagttgcaggcgctccccactatcgtggaggggttcatgtcgtatgcctccctggtcaccagcgagggggcgatgaacgcgctctcccgcgaagggtgccggcacttcgaggtcttcaaccaggctgatgaagactttgagcgagatatctacaaggttgaagaccccgtagtgaaggaatccgtcggtgccgtctatgaccggatgtggggtccacacggttgcgaggtggtcagggagcggaccgagacggcgagggctcaagtaacgtttggcgtttgtttggcgtttgctggatgtgggctatgtgtgggagccgaccccggcggaggccgtgtccggggccgccctggagccgccccggagaccgcagaaggcgcaccggatacctccgcatccgctgcggccggcggagacctgcccccagagaccgccgaaggcgcgcctgatgcccccgcagccgctacgccgagtgctgaagatcctgcgacggtggcggcggaggcaacggcggaggcaacggtggaggcttcgcaggttcaagattttgggcctgcgcacgcaaccgccactactaaatttttggcggcttcgaccgtggatggtggtaatgaatgtgatgggtctgcatctgagttttctgattttgctgactctgggagctcggttgagtggactgaggagtcgtcggaggaggacttggactactttgcggccttggatgtggctgcggtggaggcttcaccgcacgccgcggacacagaagatgtgcctggtcctagcgccgggcgccggcggcgaagggcggttgcgaagcgtagagttagtggggcggagggaggtcagcttcgtgtgagcagggctggccggcaggaactgttgtctttgccggccgccgtgagtacaggtgaaggggaactgcgaagtctttttgcgggcttgtatgatgaggttgtgtgccctcgtttgtctatgcctgctgttggggacttgttctcaaatgctttgaattaa

SEQ ID NO: 30043 - DNA, 369 bp, Zea mays
  Peptide Sequence Number=SeqID_73418
atgccgggggaggctgctgacgtggctgcggccccgagcccgcctgacttgtcatcggcgccggcatcgactcccgctggggccgtcgctgattcacccgcggagccgcccgtcactgccgacgtcgggatggttgaggcgccgccgcccgtggtcatccccgacctccccgttctcgaccacgaggagagggtggtcgtcgttgccgaggttggggatcggaggcctgccaccttagccgaggagaggcccagtacgtcgacggcggtggtccccgatgcatcggctgcagggggacccgacgcctcggtggaggggcgtgcagaatcgtggcccgtcttggggagcagcggccttatccccacgtag

SEQ ID NO: 30044 - DNA, 1521 bp, Zea mays
  Peptide Sequence Number=SeqID_73419
atggagattttcctctctgcagtcctaggcgagctcgcctctagatccataaatctactcatcagcagaaggtcggccaggccaacggcgctggatgtgggagacagcctgcaaagcgctctcctccgagcgcaggtcatcgttgatgaggctatgggacggcacatcgcaaaccaagccatgctccagcagctagacatgctgagagacgccatgcaccgggcctgctacgtcctcgacacctccaggtgccagtcccacgacgaggaggacgccgaagatcaggttgtgaatcattctctgtcgctgcaaaaactaacttctcttaaaggaataagctttgcttccaatagaaagacgccgccgcttctggaacagctgcaagagtcgcttcagaacttgagctctatgatccttgacgcgagagagctagtggtgttcttcagaagctaccctcctcgcctttactctcagccctacagcatgcatctcctgctaggtaactgcatgtttggcttccagatggaaactgagctcgtcatcaacttcctactgcacgcggaaccacctcctggttctgaagaactagacgtcctaccgatcattggccctagcaaagttggcaaaacaacccttgttgctcatgtctgtaggaaccagagagtgcgcgaccatttctcgggaatcctgttgctgcacgatcacgattttgcggacgacggcgacgacgacatctcaacgacgttcggacagcgatgtgcaacgaagcttcaacttcgcatgccagattcaaacaaggatgggagactgctagtcgtcgtcgacttggttggtgaccttggcgaagctgcatggaatgtgctgtactccacgtgtaaacagcgcagcatggcaagcagaagcaagatcatcctcacaagccggtcagacaagatcgtcaagttcggaacaaggccagctctgcgtctcagctacgtgtccagcgaagcgttctggtatttcttcaagactatcacatttggcagcacggatcccaaggtgcacccaaggctcctgcaccttgccatggacatagccaagatgctggacaggtctctcatcggagcaaacatcaccgcttgtttgctgagggagaacttcgacgtccactactggtccaaagttcggaccttcttgagaggcctcgtccagaagcacatctccaaattcggtgttcatccagctcatcttttagagcaagacagacctctgcaggtcgggagaatggctacaactttggaagacctcgtgttcttctatgagtgccaacggtcatcgcaagaggaggttccggaaatgagattccaagatgtgatgtatggaaatgttaaggcggttgggaaattcaaggccttgggatggaggtctcaaataccgccctattacagttatgttattagttgccagattattgggcaagaaacagctagagctaccaaaaggaaacgttcagtaagaaacagaaccaacagttttgcataa

SEQ ID NO: 30045 - DNA, 480 bp, Zea mays
  Peptide Sequence Number=SeqID_73420
atggtcgttggaagtgtgctgtcgcatggcgcaccagacagtccggtgcgccactggacactgtccggtgcgccagccacgtcagcggaccgttggggttcaaccgttggagctctgacttatggggcctctgggctgtccggtgctgcaccggacaggtcctgtagactgtccgggcaagcgacacctccagcaggagaagcgggcacccgtctcaccgccatcatgatgaccgcgtcaaaaaagggaccgggaaaggggatatttcgaaaaaggatccttctcagcgaaggaaacgggccccgagccctcctactgatcaggggtttgaaggttgcgccctttggggttctgcaaccgccccagagcactcgggctccgagccctttattgatcaggggttcgaaggatgacccctcggaagggttcgacagccgccccagagcatgcagagtcagggatgaccacgaatcaagctga

SEQ ID NO: 30046 - DNA, 885 bp, Zea mays
  Peptide Sequence Number=SeqID_73421
atgtcgaggtgcttcccctacccgccaccggggtacgtgcggaacccagtggccgtggccgagccggagtcgaccgctaagctcctgaaagaaaaggaaaaggccgaaaagaagaaagagaaaaggagtgacaggaaagatcccaagcagtgtgagacgtccaaacactcaaagcacagccataagaagagaaagcttgaagatgtcatcaaagctgagcagggtcccaaaagagtacccaaagaatcagttgagcagttggagaagagtggactctcagaagagcatggagctccttcttttgtacatacgatacgggactctcctgagagctcacaggacagcggcaagagacgaaaggttgtcctgtccagtcctagccaacctaagaatggattttattcatcccaacttgattttacaggaaacattcttcgcttcaagattaaaagtagtcaagatccccaatcagctgttctggagaaaccaagggttcttgagcaaccattggtccaacaaatgggatcaggttcatccctgtctggcaagcaaaattcaagccatcataagatgaatgtgagatctacctctggtcagcggagggtcaatggtgactcccaagcagtacaaaaatgtttgattacagaatccccggcaaagaccatgcatagacttgtcccccagcctgcagctaaggacacacatcctgttgatccccagtcagctgttaaggtgccagttggaagatcgggcctacctctgaagttttcgggaagtgtggacccttcgcctgctagagttatgagaagatttgatcctccacctgttaagatgatgtcacagagagttcaccatccagcttccatggtgtcgcagaaagtttga

SEQ ID NO: 30047 - DNA, 336 bp, Zea mays
  Peptide Sequence Number=SeqID_73422
atgtcgcgtgcgttcgacgactactatatcaaggattgtggcgtcatcttagcgccggaggggatcgccgcgaaggtctggacttacatccgggccgtcgagcgctccgggctcgtgggctcggatgagtcggagtactcctcggatgaggaggactcgtccgaggaggacggtggcggcgatggcgaaggcgacgacgacgacgacgacggaggcgatggcggcgacgacggcggcaggggcagcaggggcggcaacggcggcagcaggggcggcagcagcaggggcagcagcggcggcggcagcagcaagggcagcaacaaggccagtggctaa

SEQ ID NO: 30048 - DNA, 615 bp, Zea mays
  Peptide Sequence Number=SeqID_73423
atgggtcagcgcgagatggaacacaagggggagaacagtaaggggaaccgcggctcgtgttgtcctgcgcccagggcggatgcgcttgcacgtggtcggtccgagcccaaggtcgggcgaggcggtgactcctccgaggtcgaggctgagtccaagccctggggtcgggcgaggcggagaccgtcgtccgaggtcgaggttgagtccaagccctggggtcgggcgaggcggagaccgtcgtccgaggtcgaggttgagtccgagccctggggtcgggcaaggcgaagaccgtcgtctgaggtcaaggttgagtccgagccctggggtcgggcgaggcggagaccgtcgtccgaggtcgtggttgagtccgagccctggggtcgggcgaggcagagacctacgtccgaggtcgaggttgagtccgagccctggggtcgggcgaggcagagattcctatggcgcctgaggccggacttggtggctgtcagcctcaccctggcgggtggcacagcagtcggagcagcgcaggcggcgctgttttcctgtcaggtcagccagtggaggggcgaagtgactgcggtcacttcggccttgtcgactgaggagtgcgcgtaa

SEQ ID NO: 30049 - DNA, 486 bp, Zea mays
  Peptide Sequence Number=SeqID_73424
atgaacatacaccggcactcaaggtgccattacaaacggaatctccgcctcgctcgaccccagggctcgaactcaacctcgacctcggacgacggtctccgcctcacccgaccccagggctcgaactcaacctcgacctcagacgacggtctccgcctcgcccgaccccaggctcggactcaacctcgacctcggacgacggtctccgcctcgcccgacccagggctcggactcaacctcgacctcggacgacggtctccgcctcgctcgaccccagggctcggactcaacctcgacctcggacgacggtctccgcctcgcccgaccccagggctcggactcaacctcgacctcggacgacggtctccgcctcgctcgaccccagggctcggactcagcctcgacctcggaggagtcaccacctcgcccgaccttgggctcggaccgaccacgctacagggggggccatcattaccctacccctag

SEQ ID NO: 30050 - DNA, 450 bp, Zea mays
  Peptide Sequence Number=SeqID_73425
atgaacgtaaatggaaatttgcagaatggaattaagattcagatgggtcaaattaagacgatagaaatcaaggaggccgcggaaaaagggagaaatcagaagagcaagaccgtggagaagaaaaggaacataaatcacagattcatgggtatcctctgtcggaacagtgaccccgtggcaaatccgccaagaacagagctccctcgggggaagaaccccgatggacacgagatggagaagcggatgaactcgaggcctttctcttgggcgccatctcaactctactggcgaatagagcgagagctgaattgcagagaggatctggaggcaggaaagcaagaactagggcacggaaagcagaggcggctgaaagcacagtatatgcgggatattcccgagtcagataccgtctccaaaagcgcccagtcagcacccggcgtttacttctaa

SEQ ID NO: 30051 - DNA, 435 bp, Zea mays
  Peptide Sequence Number=SeqID_73426
atgggcaagaacaacaaacgcaagcgcgagccgactcctccatcagaggactttggcgactcggaatactcagaggaggagttctcctctgagtccaaggggtctccagctcccgtctctcccccagcgtcgtccgatgactcggacgactctcaggggatttccgcggaggtctggtcttatatccgggccgtcgagcgctccgggctcgagggctcggatgagtcggagtactcctcggacgaggaggactcgcccgaggaggacggcgaaggtgacgacgatgacgacaacgacgacggaggcgacgccgacgacgacggtgacggcggcggcaggggcggcaacggcggcagcaggggcggtgacggcggcagcagcaggggcagcggcggcagcggtagcagcaagggcagcaacaaggccagtggctag

SEQ ID NO: 30052 - DNA, 111 bp, Zea mays
  Peptide Sequence Number=SeqID_73427
atggggtccgggcacagtacttgctctgtcgaggctggttacagaggtaaagaagaaggcgtcgaggcggatctccaggagttccaggactttgacgagtttgaggattag

SEQ ID NO: 30053 - DNA, 279 bp, Zea mays
  Peptide Sequence Number=SeqID_73428
atggatgagtccgtaaggaatgtgtttactagcctcctgggactagtaattgtttcacatttgagtcccaaagaatcgggacgcttcagcatacaacaactcgagacccaactagaagaagagaggagggaacatcatgagatggaggcgaggatgatggcggagcgggaggctcgcctggcagatcatcagaggatggcggagatgttccagtacatgcagagcctttggcgccgcacagggcttcgctccgccacctccattgttccctgcagttga

SEQ ID NO: 30054 - DNA, 282 bp, Zea mays
  Peptide Sequence Number=SeqID_73429
atgcaccttaatccggctgggagctccgcctcgcccgaccccaagcctcggccacagcctcggcctcgggagaaggacttcacctcgcccgacctcaacctcggcctcggaggagtcgtcaccttgcccgaccccgggcctcggcctcagcctcggccttgggagaaggactccgcctcgcccgacctcaacctcggcctcggaggtgtcgccgcctcgcccgacctcgggctcgtatcagctacgctactgggcatccatcattaccctacccttagctag

SEQ ID NO: 30055 - DNA, 567 bp, Zea mays
  Peptide Sequence Number=SeqID_73430
atgaccaccagccttgtggtggagagaagcgagccgggctgtggcctccccctgcccttagcttcaaggatgttcatcatccgtgctggggaggagggcgagccgagttggggtcccgccttccgcatgggctggaggcccgcttcttcctccagcgttcgggggagaagggcgttcgccagccttgcggaggaggtgaacttcgggtatgcgggaccggccgactgtaggtgccgccggccgccgcgtgcctggttccccagcttggatggcctcaacgtcgcctccgatgctgcctcctgccgtttggttggggcgtggttgtccatccaccgcacgagcgacggtcgcgccgtgcgcagtgaggacgggagcgaggacctcttcacgcatgctgggtggccaccattcgccggtacggcactggtgcgcaggtggccgctgtcgtcggtgctgaggtggtcgccgccgctggtgaggctccccactgcagaggtggttgcctccgctggcaagaccgaagatgggggcgaggaccttttcacagcggcgtacgtgctgaggtga

SEQ ID NO: 30056 - DNA, 672 bp, Zea mays
  Peptide Sequence Number=SeqID_73431
atgagaattaaaaataaatttgatgagtccaaacatgatggttcattttgtgcttctacttcctttggtccttgtgaaactaaccctttgaaggaagaagaagaaagtggacgttggagaccaaacgatgaatccacctctccaaaaggtttgtcttcccatttcgattcccacatatgttgtgtggctaatgaaaatgatagcgaaagcacaaataaggatgaggaggatgaaagaagcttcatgcaactctacgctcatctaagcctagaagataaggcagtcatgctcaaacttctaaaaagagcgagagagcaaagcgaagctcgtcaaatgctagaagatattctctccataaaaatgctaagctttgacgagttgactaaagaacatgaggagctaaagtgctctcatgttgatttggtccaaagcaaaacctcctttgagctagaatttctaggaacaaaagatgatacatgtcaagagctcaaagaagaaaatgagaggctaaagatgagcttgacacaactaaaagggaagtgcactgctcaaccttctcaagataaccgtgatcacatggtgaagaagattgatacgggaacaaccgtggcatgcactaaatcccttgaagaaaatgtcaagaacttgaggattgccaagagaaaggaataa

SEQ ID NO: 30057 - DNA, 681 bp, Zea mays
  Peptide Sequence Number=SeqID_73432
atgaccgccatcgcagcaaaatcatcccaagggcctccctacactgaccactcccctactgcccttgcccctttcggaaccacatatagcactagcaagtactacctagaaagttcagtggtaaacaagtcacttatcactcctgtaaatcctacaagtacctggggcccacttatatttatctttgctgtttctgcaaccaaagaggcatgggatgactacaacagtgggtgctctcaatactattttggagaaacagaagctctacaaccaagtaggttacgtttggtggttttatcgtacatctcctataattgtcctttctactctgaagcgaaactgaactggtgctgtggatatttcgtaggtacacctttgatcctaaattggttgtcacattatccaactgatgtgaaaaactatattaggcctggttgtgttattctaactatttaccttcaatgcatgcatcattcctccaacctcaaggcgcctaccctcacctacacgatgctcactcctccgccatcaatcacacatagcaggaaggtggccgaggatctctgccacaccctcctcatccgatgccgctgctctgtttctcagtcccccgggtgggccgccatcagcggtgcagagcgtttgaagttcgacgataaggcagtcaagcagcctgaataa

SEQ ID NO: 30058 - DNA, 183 bp, Zea mays
  Peptide Sequence Number=SeqID_73433
atggaaactgaggcgggagcaaaggagctaatcgcgggatcacgtaggtatttatatggaaaccgaaaggtttgttgcaagcgtggcttcgagaagtccctcatgaaaatgttgtcccacttgccagagatacgcagtagcatagttcacacgcccacaatccgtggaaagaagcttggatga

SEQ ID NO: 30059 - DNA, 531 bp, Zea mays
  Peptide Sequence Number=SeqID_73434
atggccagggcacggcccactagcgcaggtctggccatggcggccctggcagtgtggctgcccggcgcgggcgcgttccctggcagcgcgggcgcgtcccccggtggcctaggcgcggccctctacggcgcacggccccctgcgcgggcaagcagtcagccagcacgggcacgcgacggcctcaacggtggcatggtccctgcgttgcggcaacccccgcgtggcccggcgcggacgtggcacgcggccacgacaaaccctacccagcgcaggcacgcggccttggcactccaaccaggcggagcaccggtgcgggctcagccccagtgctcgaaccggcggcgcggtagcgtggcccctgcgcgggcgcagcggccaccggtgaaggtccttgccatagtcacaaaggagataagaacagcactgcgtgctgataacgtattgaatttcagtggtaatgagacacagagaatggagagaatgacagccagcgtttgtattccagagatcattacacttatatacaagtga

SEQ ID NO: 30060 - DNA, 267 bp, Zea mays
  Peptide Sequence Number=SeqID_73435
atgtcgctcgcttcgcctgccaactatgttgctggctctgccaaggagttaatgcgacgggacgggcgattcgtgggtcgtctgttgcgcgtgcgcaggccgttcgaggaacggggcacgagcgcgtcgttcttacgccatgggagagggctctcccgctgcttcaggaaaagatggatgatcaccagcctggtggtggggagaggcaagccgggctgcgacctccgccccgcccttagcttcaaggatctttgtcatccgagctga

SEQ ID NO: 30061 - DNA, 297 bp, Zea mays
  Peptide Sequence Number=SeqID_73436
atgaccgcgtcaaaaaagggaccgggaaagggggataccccgaaaaggatccttccccgtgaaggaaccaggccccgagcctccctactgatcagaggttcgaaggctggcccccctgaagggtttgacagccgcctcagatcgcgtgggccctacacccactactggtcagaggttcgaaggccggcccctcgaaaggtgtcggggaccataattaggggtaccctcaaggctcctaattctcagctggtaacccccatcagcatgaagctgcaaaggcctgatgggtgcgattaa

SEQ ID NO: 30062 - DNA, 810 bp, Zea mays
  Peptide Sequence Number=SeqID_73437
atggcgccccgcatgctctgtgacgacggcggctctccgctcccttacggaagcaagaggacggccctcttagagaaggttggccgcgcgaggacgaggacgagaacaggcgctcgcctggagccgcttgctccctctcccgcgtggacgcttgtaaccccctactgcaagcgcacccgacctgggcgcgagacgaacacgaaggccgcgggattcccacctctctcacgccggtctccggccgcctcgctctccccccttcgtgctcgccctcgcgctcgacccatctgggctggggcacgtggcgacattcactcgtcggcccagggacccccccggtctcggaacgccgacaaaagggttccacggccgcctcaggctactcgggctccgcgcccattactgatcaggggttcgaaggctggcccccgaagggttcacaaccgcctcagacgccgagcgagggatgaccatgggtacgttcgatacataaccaaggctcaggctgcgctcccgagctcaccggagacaccatgttcgacgcccatcgagggcaacatggcgctttcccccctcctccttgcggaaaggcgacgcaggggcatatgtaaaaaagccgagtctgtccctgatcgccctctcgccctgtgcagaggctcgggggctgctctcgcaaacccggctccggccgaaccgttgacagcgtcaacataccagcccgagaacttgggacccgaccgtacacccgggctacggccagctcgcatgagggaacgaccagaccagctgaagcgttacgcgaggcattaa

SEQ ID NO: 30063 - DNA, 888 bp, Zea mays
  Peptide Sequence Number=SeqID_73438
atgaattttcttaattttgctctcgggataaccggtagggtacaaaatgtaaccctcgttatcctgaggcatgggagccttgcccttaacaaagttagacaagttcttaggggagcattaagtttgacattgtctcccctttggaagctgtcggcgttccgagaccggggggtccctgagccgacgagtgaatgtcgccgcgtgccccagcccagatcggtcgagcgcgagggcgagctcgaaggggggagagcgaggcggccggagaccggcgtgagagaggtgggaatcccgcggccttcatgttcgtcccgtgcccaggtcgggtgcaaggagaggatccaggtgtacaatgggggggtgatgataacgcctcctattgacgtggctggtctacgccctaggttgggcgatgtggaagctcctccgaagccgaggtcgagtctgccttccgtggccgaggtcgggtccgagccccaggttcgggtgaggcggagatcgccggctggtgccggggcggagtccgaaccctggggtcgggcgaagcggagttcgtcgtcttctggggccgagcccaagtccgagccctgggtcgggcgaggcggagatcgtcgtcttctgggacttagcccgagtccgagccctgggtcgggcgaggcggaggtcgtcgtcttccgggacttagcccgagtccgagccctgggtcgggcggagttcgccgtcttccgggacttagcccgagtccgagccctgggtcgggcggagttcgccgtcttccgggacttagcccgagtccgagccctgggtcgggtggagttcgccgtcttccgggtcttagcccgagtccgagccctgggtcgggcggagttcgccgtcttctgggactga

SEQ ID NO: 30064 - DNA, 594 bp, Zea mays
  Peptide Sequence Number=SeqID_73439
atgatggtcacccgggaccgagaaagggggataccccgaaaaggatccttccccgagaaggaaccaggctccgagccccctactgatcagagaatcccaccagagggaggcatcgagccctcggaccccgtcgccaggggactgggtctggcagatcacccgcagaggctcgggggctgctctcgcaaacccggctccggccgaaccgttgacagcgtcaacataccagcccgagaacttgggacccgaccgtacacctgggctatggccagttcgcatgagggaacgaccagaccagtcgaagcactacgtgaggcagtaagacctcgaaggagtgaaaccactcctccgaggcctcgggggctacacccggcgggtgcgctcgcgcgcacccaccggaacaaaatgcaaccgagaaaggctggtccccttgcaaaaaggtgcgacgaaagcctccaagcgagtgcaaacactcccttcgaggctcgggggctactgtcggggaccataattaggggtaccctcaaggctcctaattctcagctggtaacccccatcagcatgaagctgcaaaggcctgatgggtgcgattaa

SEQ ID NO: 30065 - DNA, 447 bp, Zea mays
  Peptide Sequence Number=SeqID_73440
atgactttttaccctctccgttcaaaaagaataaaactgacatctgtgaaggagaagtcccttgggctcctcacccagaattttgtcaagctcttcttcaccatggagttccatgcttgtgttaaatgccttttctatccaaatagaacacacaatggacacacgattagtggtcttctctatccctactactctataagaccaccaccgcgggctgttcaaagcgcagctggaggcgccctgcatgacgtgcttctaggtcgggcggtcatgggcgacggtgccgacgaagaggaagcgcacaacaggttccaccgtggtcgcgaccgtcgtcaagtggaaggtgggcgacctcatgcttaccaagatgaagagcttcctggcctggccggctatggcgagtgtgtcgtctcaatagctcctccttctctactcgctgatctttga

SEQ ID NO: 30066 - DNA, 843 bp, Zea mays
  Peptide Sequence Number=SeqID_73441
atggccgtgatgggttcaacatccggaaaagatgtacctctgccgggcttgctgaccgaggaccctttaactggtcacatgcctcgtcatggtaacgcccaacagatcctttacgagggtgctggcgtcatcagtccgcttggggctgacacgttgcaaggaagtgacacccgccgtcgtctcaggtgcgaggacaatgcccgacatgtcccccgggggagtgccagcgtcgtcgactcactctggtgcgacagccgacaaggtgccgcctcctgcgtggccatggttgccccgtctccgcctcctccggcgaggagggtggcggggacgatcggagtgctcctcttccgccgcagggagatgctgtcgccgagctcgccgccaccgggcgagtcgaagactgtcgttgtcgttgtgccgcgaggggaggagtaccatgtcatagctgccgtcaagggacatgaactcgagactcccgaagcggagcaccgtcccgggctgaagaggttgctgaagactccccatctggaactcaacgggaaggcgttcgttaacacgcagcaagcccctacctggcgcgccaactgtcggcgttttggacctggggggtccctggaccgacgagtgaaattgtcgctgcgtgcccctgcccagatgggttggcgcgcgatggaacacaagaggtgggacaagccttgtattatcctgcaccagggtgctgctcgtagtaggggttacaagcacgtcgcgagagggaaagagagagagagggagcccattcgttcgctccttcccccgcgcgaacccccctccaggatggccctggtcctcccttttatttga

SEQ ID NO: 30067 - DNA, 621 bp, Zea mays
  Peptide Sequence Number=SeqID_73442
atgggttcgccactgcggctgaccacgccgatgcagatcgctgcggaggacagcgacagtggtagttcctcctcgtttgtgccgccagcccgagactacacccaggacctgcccgacgagatcctcgcactcgtcttcgcatcgctctcgcccaccgaccgcaacgcctgctccctcacctgctcgacgccaccacgcaccaccgcctctccctcgacgcccgtgccgcgctggtgtcaggcgaagactaacaacaagtcacgatcaaccaccgagttcggcctcgggcgcaacaggaagctccgcctcgcccgacctcaggctccggcctcgggaggaggactccgcctcgcccgacccccggactcaacctcgacctcggtctcaggaggaatcatgtcctcgcccgaccccgacctcggcctcaagagaagtctccgcctcgcccgaccttgggctcggaccaaccgcgccaacaggggatacatcattaccctatccctagccagctcaggctacaaggaacgagaccggtgtcccatctggcttaccccggcgacgggtaatgatggtgccccgcgtgcaaccatgacgctggtggctctcagccccttactgtag

SEQ ID NO: 30068 - DNA, 375 bp, Zea mays
  Peptide Sequence Number=SeqID_73443
atggcggcgcaccggactgtccggtgcgcccatcgccagcagccttctccaatgactacaatttggttggtggctataaataccaccccaaccggctacttcaaggtttcgcctatccacccccctttaggcgactttcaggtggcacctactccagtgattgatactcaggccgaggataccacttttcaccagttcgagactcagggcgcaacagtccctgatgatgatgatgatgactttggggttccacctcctcctctgcctcctcgcactcatgatcatgaggttgtgagttccagtggtgctgcccctgctgcccctcctgccattgaccctgctcttgcagcgatcctccagactcttactcggtag

SEQ ID NO: 30069 - DNA, 396 bp, Zea mays
  Peptide Sequence Number=SeqID_73444
atggccgcgaatctgtccaccctcaccggcgcaaggatcgccattgtggcggaggccgagaacgggaagatgtccagcttcagcgccccgtcgttgggtccaatcgtggattctttcctctcagaggaggatgaggcgggcggtgcggcggcgcgcgcaccgccgcagggtcccgacgaccgcgaaaaggacgcgatggccaggctgcagcgcgagctggcggagctagaggaaaagaaggccgcgcaggagcagcgggccgcggactccctggcgcgcgtcaaggcgatcagggatgggtcgaggatgggcaagcttattgtctgcagcaaggatgctgctccgacacatccagttgtcgcagcgctcttcttcgatggtgcctcgtctacctaa

SEQ ID NO: 30070 - DNA, 435 bp, Zea mays
  Peptide Sequence Number=SeqID_73445
atgaccaactccaagatactagatatacatgattttgtaaaaaaggtttcagctggtctactgacggctagctgtggccgtgggcgccatgaccggtcttgcttcagaggtcagtcagtcctatactcctatacggggctcattgctcattgcttcagaggtcagtctgagcggttattaccatatggtgtggcagtgacaccactactggttctaaattcatataatctctgttatagcatttacagaccttgttggtcgaaaggctatatcaggccttgtcaacgtgagatattggtactgattggtctgcaattaaccatcccaattattcttagaagatctatcgcatattttttgtgtaacaataaaaatgtatcagctttcgagcttttgaaaccaagcaagatcactgagtttctgactcaagcatga

SEQ ID NO: 30071 - DNA, 369 bp, Zea mays
  Peptide Sequence Number=SeqID_73446
atggcggaagagcgccaacccccacgaggttgcgctcctccagcaacagcaagaagaaggcaagatcggcagtgccatcgtgcaggaaacaaagagcgcgagctccccggcagcaagatcgccgagggggaaggtaccctacccatgtattcgctcgagtctcctcttcattttaacccgattcgcgcgatgattgagcgctgggacgccagttcggtctacgccggtggcagcgctgctgcggatggcgcgcgcgcctccgcacgtggttcgggtattttgctgctcggcctcggtcggggaagaaagccgtttgccgtcggatcaacgattgggcggtttggattaaatctgggggtagccaaatag

SEQ ID NO: 30072 - DNA, 78 bp, Zea mays
  Peptide Sequence Number=SeqID_73447
atggcgcaacgggaagcgaggggaaaagaggtcgatatttatacacaggccggaggaccaggtatgctctttttatga

SEQ ID NO: 30073 - DNA, 279 bp, Zea mays
  Peptide Sequence Number=SeqID_73448
atggcgcaacgggaagcgaggggaaaagaggtcggtatttatacacaggccggaggaccagttgcgattggattcgccgccatgtttgcgtcggagccggagatcgtgtgcagggtttgttacgccagcagggaaagagctgaccacctgggcccgccaatcagcggcagaacggggagagcgcgtaatccagtggatatcgacaggtggcccctggatgtcggcgcaaggcattgctgggctgcgcggggtgatttctctggtgggccgaattcgtga

SEQ ID NO: 30074 - DNA, 1476 bp, Zea mays
  Peptide Sequence Number=SeqID_73449
atggtgtcggagaggcagcaggcggcggggaaggtggccgccttcaacctcacggaggccgggttcggcgacgggtcggacctgctggacgacgacgggcgcgagaggcgcacggggaccctggtgacggcgagcgcgcacatcatcacggcggtgatcgggtcgggcgtgctgtcgctggcgtgggcgatcgcgcagctggggtgggtgatcggccccgtggtgctgctggccttctccgccatcacctggttctgctccagcctactcgccgactgctaccgcgcgccgccgggccccggccagggcaagcggaactacacctacggacaggccgtcaggtcatacctgggggagtccaagtaccggctgtgctcgctggcgcagtacgtgaacctggtgggcgtcaccatcggctacaccatcaccacggccatcagcatgggggcgatcaagcgttccaactgcttccacagcaggggccacggcgccgactgcgaggcgtccaacaccaccaacatgatcatcttcgcgggcatccagatcctgctgtcgcagctccccaacttccacaagctctggtggctctccatcgtcgccgccgtcatgtccctcgcctactcctccatcggactcggcctctccatcgcaaagatcgcaggcaagctcatgcatggcagctactgtggggtgcacgttaagacgtcgctgactggtgccgccgtgggggtggacgtcaccgcggccgagaaggtctggaagacgttccagtcgctgggggacatcgccttcgcctacacctactccaacgtgctgatcgagatccaggacacgctgcggtcgagcccgccggagaacgtggtgatgaagaaggcgtccttcatcggcgtgtccaccaccaccgcgttctacatgctgtgcggcgtgctgggctacgcggcgttcggcagcgacgcgccgggcaacttcctcacgggcttcggcttctacgaccccttctggctcatcgacgtcggcaacgtctgcatcgccgtgcacctggtcggcgcctaccaggtcttctgccagcccatctaccagttcgtggaggcctgggcgcggggccgctggcccgactgcgccttcctccacgccgagctcgccgtcgtcgccggctcctccttcacggccagcccgttccgcctcgtgtggcgcaccgcctacgtcgtgctcaccgcgctcgtcgccacggtcttcccattcttcaacgacttcctggggctcatcggcgccgtctccttctggccgctcaccgtctacttccccatccagatgtacatggcgcaggccaagacgcgccgcttctcgccggcgtggacgtggatgaacgtgctcagctacgcttgcctcttcgtctcgctgctcgccgccgcgggctcagtgcaggggctcgtcaaggatctcaagggatacaagccattgttcaaggtctcctaa

SEQ ID NO: 30075 - DNA, 734 bp, Zea mays
  Peptide Sequence Number=SeqID_73450
atggcggaacggagggaaaacggcacggaggcgcaaggcgacgggcggcatggcttgttcggcctttgcgtctgggctgaaaacgagggaactccccgaagtcctgggagggggtatgcccctcaggtctcctcggccgagccccgcaccccctcgcggcctagccgtggccggtcggcaccctaccgcgcccagctccggctggcgctgttggctgcctggccggccgtgcggctacgctggcgcatgagttgtcttggacccgtgactgcttggaggacccccgctgccgtgcggccgactcccggcgcccgtgtcccatcactcgtgcgggcatcctgtgcctgctgcgttgagaagtgcttgcgtgctgctacccgtcccacgggaagccgtgctcgatacacgttgccttcgtcgagctcaccccccggggtgcggctcgtcggctcgagagcgcccgcggcgtttgcctcgtgccgccgtcggcctatggccggcggcaccgaggacacctcgctggcgcttttggtctcggatgtggctcacgctgaaggccggagacgcgttggcgtcacgcgcccaagaatcggtccgcccgaacgaacgacgtccagcccggcacgacgcctccgcgcggaggccggcgctggcccgtctgcgaggacgtgctacctggttgatcctgccagtagtcatatgcttgtctcaaagattaagccatgcatgtgcaa

SEQ ID NO: 30076 - DNA, 792 bp, Zea mays
  Peptide Sequence Number=SeqID_73451
atccgaagtcagaccccagaaggtctcccagttaaggggagacatagagacaacccaatttacctcgcacagattttcccagcgcagcaacacacgaccctcccttcgcggtccgtgcagtccgactcgggcgccgtcggcccgcgcaactggctggcgaagctgtggtccgagcgcgagcgcgagcgcgcggggaaggagcgcaaggggtggtcggtgacggtgcacgacctgtcggggtcgccggtggcgctggcgtcgatggtgacgccgttcgtggcgtccccggggacggaccgcgtgggccgctccaacccgggcggctggctcatcctccgccgccgcgtggacgggacctggacgccgtggggccgcctcgagtgctggcgcgatcgcggcggcagcgccggggacgcccagctgggctaccgcttcgagctggtgcccgaccacaacagcaacgtcacgggctcgggcgtgtgcgtggccgagtccggcgtcccggcggcccgcggcgggcggttcgccatcgacctgaccacggccggatcccccgggcggggcagcggcgagttgagccgccacgcgctctggcccccgggcggcttcgtgatgtcggccgccgtgcagggggagggccggcgcggcaggccctccgtggagatcggcgtggcgcacgtcgggtgcgccgaggacgccgccgcgttcgtcgctctggcggccgccgtcgacctcagcatggacgcgtgccgactcttctcctgcaagctgcgccgggagctgtcggcgtga

SEQ ID NO: 30077 - DNA, 1128 bp, Zea mays
  Peptide Sequence Number=SeqID_73452
atggccgggatcggtgaggctgctggaaccaaggagagagagcatatatatccaccgatcatgatgaagggtggcagcaagaaggaagtggccggtgcggcggcggtggtggccatactgctggttctgcagctgatggcagctccaccgacggccatggccgcccgctcgccgcgcggagccgtgccggatggctccctcgccacgacgcccaagtctgccaaccgatcaacccgcctctatcacgaacggcgccatgacgagcacgacgtgcgcaccgttcgggagcgagaagaccgggcacgatcacacgcgcaaagcgcgcttttacgcaggcgtctaacccggcgatcaggacaagcccctgactcagccgcttattacaactatactgaaatgaaactgcaccccagaacaatcccgctccttcttctccgacgcctcctgggtctccctgacctagacaggagcgtgaagataccaccggcagttaaggcgtgcatcctcgacgatgctgtggcacgcgacatcggcgtggggcaaccgctcagtaatggcagaagttctctgctccgaagccgagtcggcggcgagaggttcctgtgggcttgttgcagtggtagtagcagcactactgctggtacctctggcatcatactcacatggcacattgccacatgcatcctcgaggtgaggcatccataccagtgtggcggcggcggctgccaagaacagctgaaccgtcacaagatcgctgccactcacctctcacgctactgcgcgtacctgatggcctggtatccggacctgctccctgaccatgaggagtggagcaccgccctgtatgagacggtgaaggacgacgctaggcgtgccctcgcagggtgcagcgccggctgtgctgcggtactgggaccagaggccgagtatgtgagcaggccagtgatccagtcgctgagcgtctactccaggcacgaggggctcaggaaaggcgtcgtgcttggaaagcagctggtggagctgatggaaggcgaggaaactgcgtggatggtgctggcggaattctggtcggagatgatcctgtacgtcgctgcctcggacattgcattgcacggggtggtgagctga

SEQ ID NO: 30078 - DNA, 732 bp, Zea mays
  Peptide Sequence Number=SeqID_73453
atggagaaagaagaaaataaaagaaaaagaaaaaggaatactatacctggatgggccaacaacctgaattcggcccacctaacaaatctaacccgcgcggcccatctggccggactcccgcacgcgcgcgcccttgcgctcactggcaggtgggccatggttggcggcgctcaccgttgggtggaccgagtcgctgaccggctgggcctccttgtcagcgttctcttcccgaacgcaacggagtcgcgcgagattgccgccgcgcggcgcggagcgtggcgaagacccttccctcctcccaggtcggaacttcggaagttaaataggagctcccgtgacccgttctcccctcatctgccgtcatcgcacgagcgccttccccagaaacccccgccgccattgttcagaccgcggaagaaccgtgtggagatctctgggacacagggagcaaccagacagcggggaattcctcgccggaagcacttctccgccgcgggccgcactgctccagaggtggattatgtcaagacgccattgaagcttgagggcctgactgaggcgagccgcatctcacttcgtggccaggcccaattgaaacgctgctgccaccgcggctctcgcctctctctagagttcactcgcctctcgcctctccagtcaggctgcgcgacgcaggccgggtgggcgcggagccccagcagcgcgtcggcgtcgaccagcgccgtgtcatag

SEQ ID NO: 30079 - DNA, 789 bp, Zea mays
  Peptide Sequence Number=SeqID_73454
atggtcggtcaggtgtccgactcgctccagatcgctctgctacagtcgctcgtagggatgctggcgagtaggtcacatcttcgtctcgaccaaagggaggcgtgggagcattccgccagtgatcttctggtggcgagaaccatgcaagggaaatttgacacaatcgaggggaacttcatcgtggtgcagagccgcctggaggagctggagaagggggtcgagctggaggagttgagcgaaggctattgcgacgcttggagttattcgaacttcgctggcatggtgaaggccactaagccttttgcccagaagctatgtgttgtctcgcccaaacgacgtagtggctcggtgccaggcatgctaggcggcctagcgtatggttgctacctcttcgtccccgcgatcggcggcaggagttcatgcaacttcctctaccccgtcttctactcttcttcctgtggtggtttgaagccggccatgcaaggagcccggggtgcagttggtgacggcggccggggatgcggctcctggcgcgattctcccaagggtcgtttccccagcatggtgcggcggccggtgctggcgctgcccggggccatggcgtgtggtgttcgtcctcaacgtgtcgatgatgaagctgcagatcagttctgggcgagttccagggtgccaatcaaagctttgaccccgggctacggcgggtatggtgccggggatgacctcggttcccggcacaatacggcggaagggctggccggcttgggatgtggtactggcaggtcgcggtaa

SEQ ID NO: 30080 - DNA, 546 bp, Zea mays
  Peptide Sequence Number=SeqID_73455
atggacaagatgttggagcatttgggagataaaatctccgctattattaagtcccccaactacgaaatcatcattgtggaaggtcgctacaattatggagccttcgaccgcctcatcaccaattaccataaaaggaatgacaaacacaatgccgccaagcataagtacatcttcaacaaggacacgggcatgcatgagtacacctttggtaagcacaagtttaggtggaggttcaacaacgagacgttaaagtataactacctcaaaaagtctaatactcaagagcacgcctttctctccacccttagacacctcaacaatgactatggtgatgactatacttcttcaagcaatgatgagtctaagtgcaagatcgaggagaagttgaatgagctatgcttctttgttgattctgtcaatgaaggattctacaccatggcacatggtgatgaggtgggaagtggcaacagtgatgataatagcaatgattctagatcaaaggctacagatgaggctttctcacatgctcgagatctgattctttag

SEQ ID NO: 30081 - DNA, 312 bp, Zea mays
  Peptide Sequence Number=SeqID_73456
atggctgctgcggccaagtacaccgtccgccgtcgcttgggaacagatgcacgaggaagatcggccgccgtcgctcgggagaggagaccgttgctcgggatatggatgcggccaccttcgatcgggggaggatttggaggaggagacaacgcctgcacatttggaggaggggtctctgacctgaaaaagtacaggatgtgttacaggataccgctgcagctttacttttaccgtcaaacccgtattatacaggtccaggatggtttacaagacaccgttgcaatcagtctcagttttgcgtttgttccttga

SEQ ID NO: 30082 - DNA, 939 bp, Zea mays
  Peptide Sequence Number=SeqID_73457
atggcaagagtagtgtgtacccttcgtggtaagaggctggaaggtggtgtatctgtgctctcggttgggttgtccaaggtccgttggacaaggacaactgtaggtgggcctaatgacttgggaggtttcgtcacatctggtatcggagcgaaacccatctcttcagatattatgaagcatttcaaacagaattttcaatacttatccaagaaaatttctttcatccttaccttgccactttctggaaatactcttcttgtaagactaggtaatggagtgcaatatataggaggttggggatcaacgaaggttgattccgtaattatgcatgcatcatggttaaaaattatgctaataaattttcccccttatggagatatgtcgcgtacgaggaaaaccgcgcgcaagtccactagacctattggtgtgcctcataatcagttggctccaagacatgaagggagcagcagcggcaacaacgatccaatcggagatttagaagcccaagtagaacaacttcggacggagttatgtcaccgaaacaggatgtgggcagaagatggtcagcgtataaatgagttggcagctgacgtcagacgcttgcaagacgagctttctaaacgagatctggcggttgactgggccgtcaactcacgttcaatagcttgggaccgtgaagccaaagctcgtgctcgtgtgaccgagcttagtgcagcccttgacaacttgcaggtgtactgcaatactctacatgaggaagtgcatgtactgtattcgtcactgcacccggacgtgcctgccgaccctgttgcaatgggattcggaccatcagggacaacaggtgtctctccaggtgactggactgacctgacatcgtgcgacgcaggggatgctccgctagtcgagaaggcaaaaaggggatcacagacttatgtgtag

SEQ ID NO: 30083 - DNA, 540 bp, Zea mays
  Peptide Sequence Number=SeqID_73458
atgaactttgaagttaaaaaggtgaaaaaaggtatcgctaccaaggagaaagaccgcctccaaggcattggtgatgagctgcaaagctcaagggaagaatgcttctccaaggccacccaatgttctgagagattgaataacatatttgctttagttggggccagttttccattgtccttagacggtgtaagaaaaccttcggttgaagcatccaactggggcatgagattcttcagtgacgtgtggaatgttggaagagaagagctggctctcgaagtagctaaaaagaatagggagaaggtggaaagggctatgcaaaaagctgtggctataagaaaagcccaaaggataaaagagctcaaagcattatttcccttaggatataacgatcttcggacgaaggtcatgaaggacgtaccttcatcatcatggtacctgtctataaaccatacttggaagacattgttaaattatgtttttgaggatcttcggaggacgaaggccgccaacagtagcccctcgcagtatcaatttgtttaa

SEQ ID NO: 30084 - DNA, 246 bp, Zea mays
  Peptide Sequence Number=SeqID_73459
atgcaacagagaagatttgcctcagctaaacatgagatgcgacagaaaatagtgtcgaggatgccttctagatccgcaatgcaagagagggatccaaagaagaaaaacctccctagtgttgaagatggtcagggtgctgaagatgatagccatggagtcatcgtgaatcaacatcgcaccccctacatggcgcaacaactatcagcgtttttgacccgactatgcaccgcggggttccccacgtga

SEQ ID NO: 30085 - DNA, 498 bp, Zea mays
  Peptide Sequence Number=SeqID_73460
atggggaaggggcagggacctctagttacgacgagcggcgcgatgggcggaaacacacgcaaacaagcgagcagcgaagtggagcttgtgagagcgagcttggggatggagagtgtagttggggacgaccatgaacttggcgtagcacggtctccccagcaccgcgtggtaggttcctcggaacccgaccacctcgaacgtgagggttttctttcggaagttggatggagttccgaagcagacgggcagatcgagttgtccaaggggcaggacgcgcttccccgggatgatcccgtgaaagggcgccgcaccggcctggatcatggacggatcgatctccaagagcccgagggtctcggtgtagatgatgttgaggctgcttcctccgtccatgaggaccttggtgagcctgacgttgccgatgacggcatcgacaacgagcgggtacttttcccgggctcggcacgcagtcggggtggtcgccttggtcgaaggtga

SEQ ID NO: 30086 - DNA, 468 bp, Zea mays
  Peptide Sequence Number=SeqID_73461
atgaccctgtatgtgtcgggtaccgtaattaggggtacccccaacactcctaaacacggctgtcggcagggtcgaagtgaccgcagtcacttctcccttccactgaccgacctgacaggaaaacagcgccgcctgccccgctccgactgttgtgccacccgccagggtgaggctgacaacagccaagttcagccgcaggcgcaacaggaagctccgcctcgcccgaccttgggcctcggcctcggaagatggtctccgcctcgcccgaccccagggctcggcctcaacctcggcctcggaagatggtctccgcctcgcccgaccccagggctcggcctcaacctcggcctcggaggaatcgcgtcctcgcccgaccccggcctcggcctcaggaggagtctccgcctcgcccgaccttgggctcggaccgaccgcgccacggaggatacatcattaccctacccctag

SEQ ID NO: 30087 - DNA, 522 bp, Zea mays
  Peptide Sequence Number=SeqID_73462
atgactctgggtacgtccgttacatggccgaggctcgggctacgctcccgaggtaccctaggacatttccgagaccagcaggagcgattttgtaatggaatcccaccagagggacgcatcgagccctcggaccctatcgaacgggtccgggtccggcaaatcacctgcagtcggcagggtcgaagtgaccgcagtcacttcgcccttccactgaccgacctgacaagaaaacagcgccgcctgccccgctccgactgttgtgccacccgccagggtgaggctgacaactaccaagttcagcctcaggcgcaacaggaagctccgtcttgcccgaccttgggcctcagccttggaagatggtctccgcctcgcccgaccctagggctcggcctcaacctcggcctcggaggaattgcgtcctcgcccgaccccggcctcagcctcaggaggagtctccgcctcgcccgaccttgggctcggaccgactgcgccacagaggatacatcattaccctacccctag

SEQ ID NO: 30088 - DNA, 1356 bp, Zea mays
  Peptide Sequence Number=SeqID_73463
atgatgaccaccagttcggtggtggggagaagcaagccgggctgcggcctctgccccgccctcagcttcaaggatcttcatcatccttgctgcggcggagggcgagctgagccggggcctgcctccgcgtgggccagcgacgcgcttcttcctccggcatccggggaggaagacatcctccagctctgcggaggaggcatcctccagccatgcgggggaaggcgaactgctgctgcctggccagggtgcagcattccgtcctccgcccgggcgactgtggccggctgcaccggggggtcgcacaacacgtcgtacgccgcgagggcggtactcgtgttctgggacggtcccgttctcgttctcgtggcgagaacgggagtgaggacctgccggtgcgctttggagcggccgtcgcttgctggtgcggtgttggtgggcaggtggccgctgtcgtcggtgctgaggtggtggttgccgctggagaggcttcccaccgcagcggtggctgctttcgccggcgagaccgtcagcgccacctgcgctccgggcctccggctctttggctttaatggctggttctcgtcccccgcgaggggacgtgaaggcctttcagcagcagcgttttccctaaggccgtcgctgcagctgtcttgccgcctgagacggaggtcgttgtcactactgcagtggttggcggcgagccacttggagtttgttatcccgcagggcctctggtgtggatgttgttcacacccgcgggagtggaaccggagttccgtttgtaatggcaccctgagtgccggtgtgacgagtgaggtatccgtatcccagaggcgtaggagtccctcggcttggtcggccttgccactcaaggcctctctttctcagtttgagaaccttcggccgctctgcgatgagctagagctggaggctgcggtgtcggcgtggacagaggcggagtcggctcaaaaagaggcttcgtcggcccaggagcaggtggtttcccgggccgaggaggtgcagcagcggcggctgaggcttggccaggtcatctgtgagcgggaccaaccccggagttatgctgccgagaccgtgagccgggctgaggtccttgggggacagctggctgtggctacggagcgaccagccgaggtgtctgctcgggttgggaccctggaggagacccttgctgcgatggcccaagcgcggtgctggcgtcctccttcgaggtggagatccttccgcccgtgtcgccttccgaggccgggccagattccgccgaaggtggaaacgatgccgagggtgctgctgctccctctgtcgatgtctgatcctacaggaacaatttgtctgtag

SEQ ID NO: 30089 - DNA, 126 bp, Zea mays
  Peptide Sequence Number=SeqID_73464
atgtgggaccagacccgtgtcctcaccggatgcgaatggtggccagggcgctctgaaattctcgccaatgccaaggacagcagccacaacctccgattcgcggtagaccctgggcagcaaaactaa

SEQ ID NO: 30090 - DNA, 960 bp, Zea mays
  Peptide Sequence Number=SeqID_73465
atgggagctcctttgattagagatactatgattacagatgatgatgaggttaattttgtttttaatggtgatgattatgattatggtttctgcactgtgatgatgtccaactatccacttggagaggttgcaccaccgtctgcacaaggagcaggagcgtcaacgccaggagctggaacagcagggctcttcctcctcacatcagcgggaggtagagtctgcgaggcgttgctcccctgtgccccgctggaggcatcccctgcaccaccactaggcaccctggccgctggagtagctgctggaggagaccctaacaacggagacgatgacggtagcagcttgagccacaacaccgacctcttagaggagcaagagccgaagggatgggtcgcccaacccatcactcgtgatgtcgctcgcgggtgtcacttccacgatgcgctcgataccttgctgcgccgggcacttgactggcaaacttggtccatcgagtatcactatgtggatggtcttcgaggtgcggaggtcagctcagagcattattctatctctgagggggactcagccgaggcggccatgcaggatgtcacacgacgtgcgctttctcagtactacttgttgctcggtggggtggccgattgtcttgacttgaagtattacatccgccgtccatatggcagcactggaggtgtggttgtctcacctattggtgaggacaatcctaggttgagcagcacagtcaacctatccgccatgctaaacacggagctggaccatgctttagacgagctgagtagggcttgtgatgagattgcccagttgcaggctgagcgctcggagcatcgtcacttggatgatggctctcccgcccccgtcgggactcagcacccttaccgcttgcctcggcgtggacaccatgtctacggcaaccccgactgcaggaccaggataaatttataa

SEQ ID NO: 30091 - DNA, 558 bp, Zea mays
  Peptide Sequence Number=SeqID_73466
atggtttaccttcgaaaaacaggtgtgacacttggcaaggctttgtatgacaagaaaggcaaagccaaacaaatccaacctcctcaggataacaccactgcaggagtgaacaagcccgtggagggagaaactatgatttttaggctatgccacaaggaaggccacacgtcctaccaatgcaaggcgaagaccggggataagcaaaaggcagcaaacaaaatctccaacacctacatcaacaaggtggataaaaaggccgctacaccatatttgatcaagaagaaaaagaatggaaaggtgatagcaatcaaggccaacaagcaagccaacaaaggaaaaggggtcaaacgcatctgggtgccaaaagaaattatttcaaccatgaaaagaacaagaaggtttggatcccaagagcgaagtgggaagtccgaaggacttcgaggaatttggagagttggcaaaattgggatgtatatcatgggttgcatcatattggatcaagtttattgccaagtggttagtcaatactttggacccaaattccccacctatgactaa

SEQ ID NO: 30092 - DNA, 339 bp, Zea mays
  Peptide Sequence Number=SeqID_73467
atgactaggaagaagcgcaaggagatggaagatcaaaagcgcaagatcggtgggcctcaacctgggagcaatagtcacccccgtttctcaggtaatccacctcagcagttcaagcagagtgtcacagaacctcccaaggtattaggcccacctaaagatgtccttgtcctgaggaccttagacggtcatgcagaaacagcagaactcaaccgtttcatcacctacaacaacatgggtttgaaaaccctgagtacggagtgtactttcgcaagtcttacccgtcaaaggaaaaagactctcaaggatatgttggcttttgggcagaaaagcttactatga

SEQ ID NO: 30093 - DNA, 807 bp, Zea mays
  Peptide Sequence Number=SeqID_73468
atgaggatcaagctcaagatgatgaaaatgaagatcaagaggatgagccacctcaagaggaggacaatgatcaaggaggagatgaagctaataaagacaaggaagatgatcagggtcaaagactgccacacccaagagtccaccaagcaattcaaagagatcaccccggtagatgatgcactaagagattcggattgggtgttggcaatgcaagaggagctcaacaacttcacgaggaatgagatggctagacttagacacactgcacgaaagtcagtcatccccttcttaccctcccgccttgctgagcgtccgcttcgccgtcctgtggccggacagtccagccacttggagagactacaccaccgcctgcgtgaggagcaggaacgtcgacgacaggagcagcagagctcttccttctcgctccaccaggagatagagtctgtgaggagctgctctcctgtgcttcctctggagccgccccctgcaccaccactgggcgtcccagcttctggagtagctgctggaggagacccagacgacggagatggcgacgacagctcgagccacgacaccgacttctctgctaaccttgagccggaaggatgggttgctcgacccatcactcgcgacgctgctcgcgggtgtcacttccacgatgcgctcgacaccctgctacatcgggcatttgaccgacatacttggtccgtcgagtatcgctgtgtggtctaccagcatagtcgcggggtctacccggaccgctgggaggcaacttgcttggtgcgctgcccggagaacagtctctag

SEQ ID NO: 30094 - DNA, 720 bp, Zea mays
  Peptide Sequence Number=SeqID_73469
atggcccacatgttagatatccattgggtaacgggtatggatactggatattcatacccgcgaaaaaatatccgcggataccttattatatccataaccatacccgcggatatcaaattccaccatacccatatccaatggataattattcgcggttatttacccatacccgtacccattgccatccctagtcatgggtcagtccaccgcaagagaaggcgcgacggtcgatatggccaaaagtgggccggcagtaatggcggcgggaccgggaaaggggatactccgaaagggatccttctccgcgaaggaagcgggccccgagccctcctactgatcagaggttcgaaggctggcccctcggaagggttcgacagccgcctcagagcacttgggttccgcgcccactactggtcagaggttcgaaggctggcccctcagaagggttcgacagccgtctcaggccactcgggctccgcgcccactactgatcaggggttcgtaggctggcccccgaagggttcgacaaccgcctcagagcacgcagagcgagggatgactctgggctcgggggctgctctcgcaaaatcggctccggccaaaccgttgacagcgtcaacataccagcccgagaactcggaacctgactatgcacccgggctacggccagttcgcatgagggaacaaccagaccggccgaggcatcacgaaaagcgctaa

SEQ ID NO: 30095 - DNA, 576 bp, Zea mays
  Peptide Sequence Number=SeqID_73470
atgaaggaccgccgtggcagctcctccgtcggcggcggcgagcgcttcgccgtcttccccttctccatgggctgcatgtcgcagtccgccgtgtccgtcgccgaccccggcgacaagaaggcgcagggggacccgtcctccactgccgccgccacggtggctcgggagcagtcagcagcaggagcaggttcatcggaagaaggcgccggcgaggccatgacgaaggagaaggccgtggcgtcgtcggcggcggcggcgacggctacggcgccgggtctcgtggcggccggggtgtcgaggctgatgaaggggatccggagcctgtcgcagatgttcgcgggggaggacggcggcgaagatgaggacgacgaggaggaggagcgggagatggtgatcgggtaccccacggacgtgcagcacgtggggcacatcggctgggacggccacaacagcaaggcgggcgccgccgccgcggccatggctggcatggtgaacgccttctccctgccctcctccctctccctccgccacctcgacatggccatggaccgcgccgtcgcgcacgcctccgcctga

SEQ ID NO: 30096 - DNA, 669 bp, Zea mays
  Peptide Sequence Number=SeqID_73471
atggcagcttccccgaccctgtccaccagcgcctctacacacgacggctctggcatcgtggttcgtgctcgactggctgactccggcatcgaacagccgcaaccccacatcgttggcaccatccgttcggcggatgtgtggatccatggcctccaagtttggatccagttgaacattccccagatctggtgtcctctcgccggggcgtggtgcgacatacaacacgaagaagggaggcgacgacactggatcttcgaagccgaaaggtggtggctcctggagcacggcacgctgcctcaaacggacgtgctggccgacgctctcgctggcaagctcgacaatagtggctgcagcctctccgagctcaagaggaaggtgaggagtttgcagagccagtacgccaaagcggtcaagaaaggtgcgccaccgagcaaggatcaggatcgccgtctcttcgacctctgcaagaacgtctggccttctgttagcaataccaaggcgtcagctaacggtggtgctgggagggagcctgacgagatgtgtgagctgtacccataccttgtggaggaggtgagggcgcttcagaggccacacccgggcttgttcaagcgggagtttgggatgatcgacgacagcaaggcctgtgcactggatgagaggactacgtga

SEQ ID NO: 30097 - DNA, 495 bp, Zea mays
  Peptide Sequence Number=SeqID_73472
atgcaagtttttcatttggttaactgttctaaatcagtgttggactgcagtcaggttagctcattggggacaactaatgtttgcttcctaatgtcaaataatagagtcgtcaatccaatagatggcgttattgtttccaaaaagcagatgccaccaagaaagacatggaagatgaacgaaagcttgttcccatgtgaactttcaaaagaaaacttatcatccgtcaaggatacagttgaaatggttgtcaaagaatggggagagaaatcattaactgaattggaagcagaagagcggctgtcctattcatgtgagaaggttattgctgatgatgacagtcatgttgacttgaaaattcagagctatttaagtgagatactgaaatgccaagtgatacccaagagtcatcaggcccagaggaaagtgtactggattccattcaacttgtatatcacttttttgggttttacaagtggcctgatttggagaaaatag

SEQ ID NO: 30098 - DNA, 528 bp, Zea mays
  Peptide Sequence Number=SeqID_73473
atggttggtgcaaaaggtgacgaggaaccggttgcacttcaagctgttgagttctggagcgctatctgtgatgaagagatttcactccaagatgaacatgagggatctgaggatggcaactctgctatacacttccgctttattgaaaaggccctccctttacttgttccgttgctgctagaaactttgttgaagcaagaggaagatcaagatcaagatgataatgcttggaatatttctctgagtggtgggacatgccctggactcatttctagaactgttggtgatgcagttgtccctcttgtgatgccatttgtcgagaccaacatcacaaagcctgattggcattgtcgtggggcagctagctttgcatttggttctatccttgaaggcccttatgttgggaaacttgctccactggtccaggctggtcttgatttcttgctcaacacgatgaatgatgcaaatagccagaccttgctgagaccacccatttcaggcttcgtgcttctgcttatgaagcactga

SEQ ID NO: 30099 - DNA, 343 bp, Zea mays
  Peptide Sequence Number=SeqID_73474
gagcagtgggcgacgcttcgccttcgccgtaataactgccacaaaaaaggctccgagcctccttactgatcaggggttcgaaggctggccccccgaagggttcaacagccgcctcagatcacgtgggccctacacccactactggttagagctcaccggagacaccatgttcggcgcccatcgaggaggctcgggggctgctctcgcaaacccggctccggccaaaccgttgacagcgtcaacataccagcccgagaacttgggccccgaccgtacacccgggctacggccagttcgcatgagggaacaaccagaccagccgaagcattacgcgaggcattaa

SEQ ID NO: 30100 - DNA, 372 bp, Zea mays
  Peptide Sequence Number=SeqID_73475
atggcgcttcctgttgacgtggctggcctgcgccctaggttgggcgacgtggaggctcctccgaagccgaggtcgagtctgtcttccatggccgaggccgagtccgagcccctgggtcgggcgaggcggaggtcgttcggtagaggccagggcggagtccgagccctggggtcgggcgaagcggacccgagtccgagccctgggtcgagtggagcggagttcgccgtcttccgggacttagcccgagtccgagccctgggtcgggcggagcttcctaaggccggtcagtggagcggtgaagtgacggcggtcacttcggctctgccggggggcgcgcgtcaggataaaggtgtcaggtcacctttgcattaa

SEQ ID NO: 30101 - DNA, 2382 bp, Zea mays
  Peptide Sequence Number=SeqID_73476
atgtctcgctgcttcccgtttccgccaccacgatatgagaagaccgtgcgccccgacgcccagctagcctcgcagcagcagcagcttgacaaggagaaacacaaagagaagaaacataagaaggacaagaaggacaaagatagaaaggaaggtaaagaaaagaaggataaagacaggagtagggataagcacaaagataagaaagatcgtaaagaaaaacacaaagacgagaaaaaagacaagagcaaagataaaaacagggagtcaggcgaaggaattcaaagaaatgacgaggctctccatggtcagaaggttggagagagcagcagggggtctgaagaaattaaggatcttaaattcagggaggagttggtcagaggagtacaggatgagaaaggggcagcgagtcaaactattgaaaattatgctgtttcaaatgatcgaaatcgcaaaggcttcattgcttcacctgcaatggagactgaaaggtccgcgcataataaagtgcatattcagtctggtaatgcttcaaggaaaactgagggatttatacaacagagcatcaatgccaatcgacaaaagaatgggacatcagtacaacattctgaaagcttcaccacttctgctcgaagaactgctggtggctttccaccagcacctacaacggaggataaattcaaagctgcaaggctttcatccagtaatgaagctgcacccagaaaagagggggttggacagcgaatcagtaacattagcatatcgcttcaaaagagaactgagaacacaaacaaagatgtcgcgaagaaagaagttggcacctcctctccattgcctccaaatcctgctaatgctatgcataagggaaatggcaaggttggtaggccaatggacaacacacaaggatccatgcagagatttggcagcccatcaacatcaagtgcaacatgggggatggatagaggagcacctaggtcatccatcccaagcccgagcattacaatacggagaccgaatggcatggtacgaccagctgaaaatctttctgtctctgctaagaaacctgatgcaggaggcctttcacctgctatgggtaaggaaaaggaacaaggtggaaggttgctgcaagctaatatttcaactgatcagaaactggcagctgaaagtcgttctgcctctgctaagaaacctgatgcaggaggcctttcacctgctatgggtaaggaaaaggaacaaggtggaagattgctgcaagctaatatttcaactgatcagaaactggcagctgaaagtcgttctgtctctgctaagaaacctgatgcaggaggcctttcacctgctatgggtaaggaaaaggaacagggtggaaggttgctgcaaggtaatatttcaactgatcagaaactgggagctgaaaaccgttctgtctctgctaagaaacctgatgcaggaggcctttcacctgctatgggcaaggaaaaggaacaaggtggaaggttgctgcaggctaatatttcaactgatcagaaactggttatgtcaaagcctccagctgtggagaaagctgcagatgggagagctgaaaggatggagaaggtcagagatggggcaccagatattgccaagaaagaggacaaaaagagtgatcggcatgagaaaaagaaaaggaaagagaaagataaacacaaagagaagaaaaaggagaaagaggcaaagaaggagaaaagggaacataaccacaaagagcataataaaacaagagaaaacagtataagttatcccatagatagtcttaacttgaagcactcggtccctcctttagccccaccagttgatgatggaaaatctgttgtgcctgatgagaacctgaagaagcgaaagaaccatgaaacgaatggttacttacaaaacaaccttgatatgcggcctacaaagttgccgagaccagcactccccagcaatcgtgtggagaatggtacagcatctcatgtagccgcgccactctcttctgtgaagcaggaagccataaatattgaaaaggctgaaaggctccacaaggaagagaaggtcaatggcaaccaacagggtcagcagcgaggtccagtcgatccggtggctgcttatgagaatggcacaagctctaggaagccacctcaccccgactgcaagtatcttagccagatatacagcattcctgaagcacctcaaatgatggaattgcctgggcaggaaggtgaggactggctgttcgacaaaggcggcacccagccaaggaagccggccagttcagcgcctgaggctgatggagtcccccaagtgtgggctcaggctctgaaaattgaccatgctgatgtcattgctctgccatacgtgatacccttttag

SEQ ID NO: 30102 - DNA, 291 bp, Zea mays
  Peptide Sequence Number=SeqID_73477
atggccgcggatttctggagtggggtgcaagcgattctcattctcattctcttcgccctgcagctgcaaaaggatggaggcttcgacatctgctacagcctgggcccgtgggccgttataacatcaatgcatattgatcaaaattgtgcagcgataacacctaaccaactccattacagatcccagcctcctggcagccaacactgtttgttcgactttccacgcagcacgcccacggcaaagggagtggtgcatgaagctatctatctatgccacacaagctacttgtaa

SEQ ID NO: 30103 - DNA, 261 bp, Zea mays
  Peptide Sequence Number=SeqID_73478
atggctatggcttggtctgtaaggcaagtcaaggctccgtccactcaagggacacaatctcgcctcgcccgagcccagcctcgggcaaagacagccgacccaggaggattcacgtctcgcccgagggtctcctcaagcaacggacgcaccttcgactcgcccgaggcccagctcgggcaggcttcgcggagaagcaaccttggccagatcgccacgccaaccaaccgtatcgcaggagcatttaatgcaaggatcgtctga

SEQ ID NO: 30104 - DNA, 279 bp, Zea mays
  Peptide Sequence Number=SeqID_73479
atggagagtcatgatctccgggcagaatgggaatcacggcttgtgggtggttatgagattgatggttctggttatgattatggtgctggggcaaccgacgaggaagggcagcttgaggaatcaggagcagcattcacgtcagcccttatatcttcaggaacaaccacgcaaggtctcctcatcaagattcgccccgcccgaatggccttatccatggctctgtcacgctgggctctcagagtaatggaagtttctttagcaaccttggcagccaactga

SEQ ID NO: 30105 - DNA, 462 bp, Zea mays
  Peptide Sequence Number=SeqID_73480
atgggcaagaacaacaagcgcaagcgtgagccgactcctccatcagaggacttcggtgattcagagtactcagaggaggagttctcctctgagtccgaggggtctccggctcccatccctctgcgtgagtcgtctgacgattcagacgactcccaggggcttgcggcggaggtctggacttacatccgggccatcgagcgctccgggctcgagggctcggatgagtcggagtactcctcggacgaggaggactcgtccgagggcggtggcggcgatggcgacgacgacgacgacgacgacgacgacgacggaggcggtggcggcaatgacggtgacgacggtgacgacggcgatgacggtgacggcggcggcagcggcagcagcaaggatggcgacggcggcagcagcaggggcagcaacaggggcggcagcggcagaggcagcaacagggccagtggctag

SEQ ID NO: 30106 - DNA, 219 bp, Zea mays
  Peptide Sequence Number=SeqID_73481
atgtcgaccgagacacgccacctagatcagatcgaactcctcagtgttaggcggctcctcttcgaccacctgttcttctcctgtggggggtgtgagacagcaagaatcattaaaattaataagaacatggctgggaaagtaagtgatcaagggcacaacttgcctgcaatgagctcctgctcagctacttcaacgaatcaagctgattcatcaggataa

SEQ ID NO: 30107 - DNA, 459 bp, Zea mays
  Peptide Sequence Number=SeqID_73482
atggaaaataggtttcgaacaataagagagctgggatccaaggggaaaagaagcaacccactggtgcttgaagagtttatgtgggaaaatgaatgggttgaagaaaataatgaagctgatggtgatagcagcatatggcatgttgtggatgaggcattaggggcaactcatgctctccaaggcagaaatttgccaagattagctgctgcaggtgctgcttcaagttctcggcctcaacgaacctatgttaggacaaggaagcgttcaagaaatgcagcaacacaagatattggagaagatgatagtgatgctcaagaagatagtaatgctacaacagatgcagaagaacaacaagaacaaccactagaagcaactagagatatagaccaagatgaatctgaatctggaggagggaaagctgctgctaatgctttttgcttggacgctgatctgctctag

SEQ ID NO: 30108 - DNA, 450 bp, Zea mays
  Peptide Sequence Number=SeqID_73483
atgtatcttcatacccaaaaccacataaagcaccagcaagtactacctaaaaagttcagtggtaaacaaggggttctggactgggcacaatatttcttaaaagatcagggcttaaatcacaatttccctaagactcagtattcccacagtatggactgcagccgctggcgatcgatccaacggcaaggcgcttatcttcttcctcagtccgagctgggcgacgctttgccccatccgcggcggcgccctgaccgagccccggaccaccgacgccccgatgaccactggtgcacggaacccaattacggtgacggcccgagcactgaccgatccacattcgtataccaaagaaacgaaaacagtgataactcaggaaaagcactcaccgacgacaagcctgctatggcgccgaccacagcataccgtcttcgcggcgtggcggtgtcatag

SEQ ID NO: 30109 - DNA, 726 bp, Zea mays
  Peptide Sequence Number=SeqID_73484
atggcgaactcgacggatgtgcccttaccagatatggctgcccacgacgatggtggccttgcgacggtgataattactgccagtgactcgcagcaagggggagcagaaataaagctggaactcagcgttggcaaaaccaggacagacgaggaagtcagaagcaacgcattgacaggtccaagactggcttttggagatgcagtcgtggaggattctggaagcaggacgagctcaggtgcaaaatattatgttggaaaatgcgggcatggaggagagaaggactcgagtatgaactgtaactttagaagtagaaagcctctaccaaaggtttactttgatggccacattcccttcgctgctgattacctttcaccccggccggaaacacgctcccaagaacaactagaagaagtagatagggatagtagtagctcccggatgcaggcaggaccatccaggaacagagtaaaactagaaggaagcacgtcagtgacagcactgagcattccaaatcctcaacgtctaagaacattgccatcgaagcaccccaggaattcaaacgcaggctccaaaaaagaactgagggatacagtagttcacagaaccttacgtaagattaatgaggattggaaggagaaaatgctagaggccagtgatgaagttctaaaatttcttaacaaggattaccatggctctccccataagaggggacatgttcacaactga

SEQ ID NO: 30110 - DNA, 207 bp, Zea mays
  Peptide Sequence Number=SeqID_73485
atggaccgtccgaccctgtgcgcggaccgtccggtgcgacacaaggaaggcatcactcctgcgctcaggtcgcagaccgtccgcgccgccgtagagggcaccgccaggcgatcagaaacagtacagagcttgagattagcaattcccaatgtccgagggacatatccatacaaaacctcaaaaggagaacgatccaatgaagagtga

SEQ ID NO: 30111 - DNA, 300 bp, Zea mays
  Peptide Sequence Number=SeqID_73486
atgtcgtctaccccaacgacaatgctgaaagggaaatgtgcccttgggccatttctaagtattttggtgattgagtgccaacacaagtggtcatgtgttaatctatgtcaaatgatggacaaagtgaaaatcaacataaaggagaaatcaatttgggaaagagatggctttgttcagccaaagacagttcagtctgggagcaccggactgtccggtggtgcactggacagtgtccggtgcgccgggctggctctggcgaactggctgctctcgggtttcgtcggcggcgtacggttataa

SEQ ID NO: 30112 - DNA, 477 bp, Zea mays
  Peptide Sequence Number=SeqID_73487
atggggaagcatgtcccatcactcctcatgctcctcctcagccgaggtagggtcccactcgactgtccaacccggtggcaagatggacggccaagtcactccagcaaccatgtcctccagagaacctgtaaaaattatgccacaagtaaggctgagtatactaatactcagctagacatacccagttacaatggatcaagcagtctcattagctgcgagaagcagacgattcgaatcgagtttttatccttgcaaggtatccgcacgttaatccttattccaatttcatctcatggatcacgcatccccatggatccgtgtccacagaccaatcatcaatatgatataaagtgggttactagttgtcactgtaatctttcctataaatttgaggtggatactgattcagatactacttgtgcaaaattatcaaagataagttttaaaagggcactttacactatagctatgatttaa

SEQ ID NO: 30113 - DNA, 630 bp, Zea mays
  Peptide Sequence Number=SeqID_73488
atgacaaccgtccccatcgattccccgttcgcgttcaggcctcaccgccttggcatacaatgctccactgaccccggctgccgccgtgcagtgaccgcacttgcggggatgctcatcggcggtgaggagaccggcctggtcacggcgagagagttcaatccgatgggtcagggaggtccacaggatgccagagaagacatgagcgcaaggaattgggcggagactcactggatagcttggtccacacgcgacggcggaagaccgaagcctggtgaggtcgatctcgggcctccggtgaagtccggccaggtccgagggcttggcaagcttcacgggctactggcggagctagccgaagcactggttcgcccagaggatggctggagtgggctagccacgatggccgaagctctggcggcaatggcgagcggaattgagctcgccggagctaagggaaagtggctggccggtgagggtgagtgcaggccgaagtggggcgcgccccggggaggctttataggcacggcgcggatgtgttcaagggaatttggcacgactttgatatttggatctcctggctttgagtttcgaaaaacagagaacacagatgatctttgggaagaggtctga

SEQ ID NO: 30114 - DNA, 462 bp, Zea mays
  Peptide Sequence Number=SeqID_73489
atgacaaccgtccccatcgattccccgttcgcgtccaggcctcaccgccttggcatacaatgctccactgaccccggctgccgccgtgcagtgaccgcacttgtacccaccatagctagcatgggagacccagtctcaggtcgcatgagggataaagtccgcgccggcttcaatcaggcggggatgctcgtcggcggcgaggagaccggcctggtcatcacggcgagagagttcaatcagatgggtcagggaggtccaagggatgccagagaagacatgagcgcaaggaattgggtggagactcactggatagctcggtccacacgcggcggcggaagaccgaagtccggtgaggtcgatctcgggcctccggtgaagtccggccgggtccgagggcttggcaagcttcacgggctactggcggagctagccgaagcactggctcgcccagaggatggctag

SEQ ID NO: 30115 - DNA, 882 bp, Zea mays
  Peptide Sequence Number=SeqID_73490
atgctccaaggccctcccctgcggcgcgggggctgggtcccgcatgtcatgcaaaccggctcagagcagaagaagccaaagcgccgcgcgtggtgcacacaaccgcccagcggttacaagcgaccccccacttttgcccagaccaacgggcagaaggagtgggcagccatgcaggcgacatgcaaccgcgccaagtggacacgcttctccgactcccaacgcgccagtatggaggcccaggcccacgcgtcacgcaaccggcgcgccggatgctgcatgcaggcaactgcaccgccacttgcgccaccgtcgcgcctcttcggttgcggaaccaatgccgcgactcgaggcgacccagcggcgccagcctggcgcgacggtcaatgcggccgaaagagaagcgggcgacgcttcgccttcgccgtaataaccgcgccaaaaaagggaccgggaaagggggataccccgaaaaggatccttccctgtgaaggaaccgggctccgagccccccctactgatcagaggttcgaagactggccctccgaggggttcaacagtcgcctcagatcgcgtgggccctacacccactactggtcagaggctggcccccgaagggttcacagtcgcctcagacgccgagcaagggatgaccaggggtacgttcgatacataaccaaggctcgggctgcgctcccgagctcaccagagacaccatgttcggtgcccatcgagggtaacatggcgcactcccccccctcctccttgcggaaaggcgacgtaggggcgtatgaaaaaaagccgagtatgtccctgatcgccctctcgccctgtgcggaggctcgggggctgctctcgcaaacccggctccagccgaaccgttga

SEQ ID NO: 30116 - DNA, 294 bp, Zea mays
  Peptide Sequence Number=SeqID_73491
atgatgctggtagactacacaacagtactcgatggaccaagtgtgtcagtcgaaggcccgacgcagcaaggtgtcaagagcgtcgtggaaatgacacccgcaagcggcgtcacgagtgatgggtctagcaatccatcccttcggctccggctcctccgagagatccatgtcgtggctcaaactgccactggcgtcgtcgccgtctctgtcagggtctcctccagcagtcgggatgccctatggtggtgcaggggggcatctctggctgaggtgcaggggaaggctgccccctag

SEQ ID NO: 30117 - DNA, 579 bp, Zea mays
  Peptide Sequence Number=SeqID_73492
atggcccagacacgtgttggctccggaccccacctggtcttgattaaggtccgggtactctttgtcccagaatcctgggaccctgccagaccgacgcccaaggaacatgactcgtgggcccggacccctgtgttagaggctgggccgttggttttggcggaggtgaagaggcacactaccggggaggtggcccgttcctcacgcggcggttcgccttctcgcatggcggttcaccttcttcacacacggagaccgacgcccaaggagtatgactcacgggcccgggcccccgtgtcaaaggctggggcgctgcttttggtggagatgaagaggcacgacggttccctcctcgcgtggcagtttgccttcttcacacacggagaccgacgcccaaggagtatgactcgtgggcccgggcccccgtgtcagaggctgggccgccatggtgcgcgccaggcgaaatttcctgcgatcgggagaatcctccttaaaaatggattcccccgagtgcagcagtcatgctcatcactcgctgcgccctttcgccctcgagttctctgcgctcttctaccgccgtag

SEQ ID NO: 30118 - DNA, 240 bp, Zea mays
  Peptide Sequence Number=SeqID_73493
atggctggagggggctggccacggtggccgaagctctggcggcaaaggcgggcggaattaagctcgccggagctatgggaaagtggctggccggtgagggtgagtgcggggcgaagagagagatatggagccaggaaatctggtctgtctccctacccaaacccgaggcaaatcccaggttttgtcatgtctagggctcgcgtcccaatgccatcttctggcacacgacagaggggttag

SEQ ID NO: 30119 - DNA, 198 bp, Zea mays
  Peptide Sequence Number=SeqID_73494
atggatagtgatgatgaaggcttccaacgagtggaagttgaacaaatcatccaccacaatgctcaagtcacaatggtggtcctctcatcattgaaccaagaggagtacgacaagattgacgatgaacaggagattggatcaacgaaccagaagcgtgacgacgacgttctcgccgagccggtcatggcgatgttctag

SEQ ID NO: 30120 - DNA, 504 bp, Zea mays
  Peptide Sequence Number=SeqID_73495
atggtggggagaagcgaaccaggctgcgatcttggtcccgccctcagcttcaaggatcttcatcatccttgctggggcggaggccaggctgagccggagctctacctcccgcgcgggttcgtgggtcagcttctccctcagtattcaagggagagggcgctcactggcctagcgggaggggtagacttcgacaacgaggggccgatcggcggcgcacgtcgtcagcttcagcgcgctaggctcgccggcttggctcccagtgccccctcccgtcgcaagggcggttgtcgcgccgcgtgcaccggaggaccgcccaagacgtcgcgcgctgctagggcggcgttcgtgttctggggctatcctgcctttgctccggtacggcgcctccgcgcggaggtggcggcggctggagaagtccccatcgccgacaggatcaccgccaccatccgtgcttcgggcctccggctctttgtacttgtcctcgcccctcgagcggagtcgtga

SEQ ID NO: 30121 - DNA, 1096 bp, Zea mays
  Peptide Sequence Number=SeqID_73496
atgggccagtcagccgcgggagaaggcgcgacggtcgatgcggccaaaaatgggccggcagtaatggcggtggcaggcgggaagaagcagcggtcacatcgtcagccaagctcacgtcacctcgtggaacagcgagagaaccctctctcacggcgtgaagacgacgcgcccgtgttccgttccttgaacggctcgcgcacgcgcaacggctgcctcgtgaaccactcgccccgtcgcattaactccgcggcgggacaggcgggaccgggaaagggggatacctcgaaagggatccttctccgcgaaggaaacgggccccgagcccccctactgatcagaggttcgaaggctggcccctcggaggggttcaacagccgcctcagagcgctcgggctccgcgcccactactggtcagaggttcgagggccggcccctcggaagggttcaacggccgcctcaggccactcgggctccgcgcccactactgatcaggggttcgtaggctggcccacgaaggggctcggactcgggctcagccccggaagacgacgaactctgcatcgcccgaccccagggctcggactcgggctcagccacggaagacgacaaactccgcatcgcccgaccccagggctcggactcgggctcagccccggaagacgacgaactccgcatcgcccgaccccagggctcggactcgggctcagcccggaagacgacgaactccacatcgcccgaccccagggctcggactcgggctcagccccggaagacgacggactccgcttcacccgaccccagggctcggactcgggctcagccccggaagacgacgaactccgcttcgcccgaccccagggctcggactcagccctggcctcagccgacggtctccgcctcgcccgacccaggggctcggactcgacctcggcctcggaagacagactcgacctcgacctcgaaggagcctccacctcgcccaacccagggctcggaccgaccacgtcacaggaggcgccatcattaccctaccccaagctgactcaggctacggggaacaagaccggcgtcccatctggctcgctccgccaaacaa

SEQ ID NO: 30122 - DNA, 246 bp, Zea mays
  Peptide Sequence Number=SeqID_73497
atggttcgtgctgatcgcacgagggacaatggacaaggcccacgaaagaatgaccttacgaattattgggcccttgggcctttcgtgaggctttttacttctttagtggacccaggggatatctatcccccacaagcccccgatctttgggttgatttagaggtaatcaactcaaagatccaaggattctggacttcattgggtgcaccagaggtgcacccaatgggtgtagcccccgacctttga

SEQ ID NO: 30123 - DNA, 387 bp, Zea mays
  Peptide Sequence Number=SeqID_73498
atgaccaatatcatcaagatggaggtcatcgaaggagaactggggttgttcgctatgaagaggagagagagcccacaagacatgtacaacaggctcaagactctgatgaaccaatgggattcatactgctcctcctccgactacgtctgcttcaagtgtggtaataatgatgaccaagaacaagataagaagattgataatgatgaattaaatgataagatagtgagattgagtgaatgtcatgcttcttcatccactcttgagtatgtttccatttgcaataaatgtaaggatattggtgttgatgtttgtattgcaaatgtagatattattgctgatttgaatgataaaatggcaatattaaatgctcaagttaaaaattcatga

SEQ ID NO: 30124 - DNA, 1092 bp, Zea mays
  Peptide Sequence Number=SeqID_73499
atggcactcatcatgcaggagagtagtagccatgatttgctccaagctcacgacgagctcttgcaccattccctgtgcttcgccaaatcgctcgcgctcgccgtggcgctggacctccgcatccccgacgcgatccaccaccacggcgccggcggcgccacccttctccagatcctcgccgagactgcgctccacccaagcaagcttcgcgcccttcgccgcctcatgcgcgtgctcaccgtcacgggcatcttcagcgtcgagcaaccaccagcaggtggtggtgataattcaaccgtccacacgtcggacgacgaagctgtcgtcgtctacaggttgacggcagcctcccgcttcctcgtcagcgacgaggtgagcacggcgaccttggctccctttgtgagtctggcgctccagcctatcgctgcctgtccgcacgccctgggtatctccgcgtggttccggcaggagcagcacgagccgtccccgtatggcctggcgttccggcagaccccaacgatctgggaacatgctgacgacgtaaacgccttgctgaacaaaggcatggccgcggacagccgcttcctcatgccaattgtgctgagggagtgcggcgagacgtttcgtgggatcgactcgttggttgacgtcggtggtggccatggtggcgccgccgccgccatcgccgccgccttcccccacctcaagtgcagcgtgcttgacctcccgcacgttgtcgccggtgctccgtctgatggcaacgtgcacttcgtcgcaggcaatatgtttgagagtattccacctgcaaccgctgttttcctcaagaaaactctacatgactggggtgacgatgagtgtgtcaagatattgaagaattgcaagcaagccatatctccacgggatgcaggtgggaagtcaaacataaagcatcaagagacacaagttatgtttgatttgtatatgatggcggttaacggagttgagcgtgatgagcaagagtggaagaagatcttcattgaagctggattcaaagactacaaaattctacccgtcatcggtgacgtatcagtcatcatcgaggtctatccttga

SEQ ID NO: 30125 - DNA, 363 bp, Zea mays
  Peptide Sequence Number=SeqID_73500
atgcaagagttgatggtgcagcagaatgagattctgcgtcagttggctcagcgtcagccgccacctcagcactatggtggtggtgatcaccatcagcgtctcctagcagcagccacttatcaggagttcctcagcactcagccgccgctgttcactcgggcagaggatccacttgatgctgatgtatggctcaggtatgctggataccatgcagacacttatgagaagaagagggacaggttcaggaggggcctcagtactaagctccgcgaccgtctcaacatagtcagggcaaacacctacaatgagttagtcaacatggccatttcccaggaggactgcatcaccgcccatcaagcataa

SEQ ID NO: 30126 - DNA, 906 bp, Zea mays
  Peptide Sequence Number=SeqID_73501
atggccatccctgatggacatcccgaccgcctccccatcgtcctcgcccatcccatccgcctcctcctcaccattcatgtcatcgcaccacctcctctccatccccaccgcctccccatcatcgccgcccatcccctattgtccgaccgtcctcagccatccccaccgcctctccatcgtctattcaccgccgctagagcctccccgcaccctggcccctcgtcgggagccggttacacgacgcctccccagtacatggtgcagctgttcgagaagcaccgggatactatcgaggccattgctctccaagggctgacaaccttctgtggttttcaccccttggagctatctactcatcccattggcttgttccctgctgaaaaggaggacgacccaatgtggaaagaccgagtggagcatgccaaggatatatgggctctttacccagggcagactgctcacttgatggtgcgatgcatggatgctctgtatcgtctgcaagtgatgcgaggagaggcaatgtctcatctaatggcattgttggaggctaccaagatcaccttggataacagagaggaacttgtggtagaactgcacactgagagggtggaaaaggacctgcaggtggaacagatgaccaacgagatccaggagcttgaggagctagtgggaacgagggagaacaccattgaggttctcaaagatcagctaatcaacactcaacagcaacttgcggaagctaaccaacatttggatatgcaccaccaggagatccaggacatggaggccaacgaggatgtcgacatcgagggaggagaggagccggagcgtgcatccagcttggacactgctggctcagggagaccaccttcccccgagtcgagtgttgcctcgtttgctcactag

SEQ ID NO: 30127 - DNA, 676 bp, Zea mays
  Peptide Sequence Number=SeqID_73502
atgttgatggcttaccggaatgtggatgggcctggagggcggctgaatccgatacagctgtgcaggggacaacccaacgcgacgcggggctgtgccaaatgcgtcggggactcgacgttgaggacggacctcgcgacggggagaacgcaggggcggcacaaccgcctcctcgattccggggcccttgccggagacgaaaaacaaggccacggcctgtttgcggcggagaaggcgagggcgtgcgacggagaaggcgggtctctgcggggtaaaccagtaaagcgtgcgcgccggtcagagcacctggtcggtgtctggtcggggctctctctaactattggaagccccgaccagcaaccgaccagctactgcctcctcggcgcccctcggccagctaaaggtacctcctcggcgcgctcctttgccgccacaggcgccgccgcgcgcctccatgcctccgccccagcgcctgccgcggctggagcaggaggcgccgtgccgttctcgatccaggcgcccaacgagaagatagggatgtactcgccggccttctatgccgcctgcaccgccggaggaatcgccagctgcggcctcacccacatggccgtcacaccgctcgacctcgtcaaatgcaacatgcaggtgagcgggcagcggcctagatctgtgtcccccg

SEQ ID NO: 30128 - DNA, 198 bp, Zea mays
  Peptide Sequence Number=SeqID_73503
atgacgaatggcccctctcagggggggcgtgagcttgtgcctccctcgggcgtcttgccgcagccgaagcaccaggtcgcccacctggaggtctcggggccggacccctcgggcgtggtagcgtcgcggggactgctggccctcgtcctcggggagccgtattccaggtcagtgggcaagacggcctcggccccgtag

SEQ ID NO: 30129 - DNA, 420 bp, Zea mays
  Peptide Sequence Number=SeqID_73504
atgagcgatcctgctgaccgaacaagccttagcgctcaaaagactttctgccgaaacggtttttcgggttttctcggctacgtcgataatgaatcccgtggacgagcaagagtacacgtacgaacaaccccccacattggagggcctgcgggacaacagaacgccaacaggtggctcaccgccgcccgctccggcagcagtgacgacgagctccgctccgagcggccgaacagcagcagcgatgacctcagggcggatgctgctgccataaggccctcgcccacgtccccactcgaggggcgaggacaagcagaaggtcgtagagttgaaggtcagtccgcgggtggtgccaactacctcgtcggcggagaaacctcttccggctgcctcggtgggaggtggcatcggaagcaacgctga

SEQ ID NO: 30130 - DNA, 1221 bp, Zea mays
  Peptide Sequence Number=SeqID_73505
atggttgccatccaagggggtcaccctccttttaaaggcgactctccccacttgcgtcctcagtcgtcgcggactgagtcttctccaacacgctccaaggtcctccccctacgacacgggggctgggtcccatgcgtcatgcaagctggcccaggacagaaggagccaaaaccgccgcgcgcggagcgcacaactgcccagcggttacaagcactcctccactttcgcccagaccagcgggtgaaagggcggaccaccatgcaggcggcatgcaaccgtaccaggggggcgcaccctttcgacttcaacgcgtccagcatggaggcccaggcccacacgtcatgcgggcggaagcagcagtcaagtcgtcagcaagcccacgccccctcctgggacaacgagagaaccctctcccacggcgtgaagacgacgcgcccatgttccgttcctcgaatggctcgcgcacgcacaacggctgccccacgaaccactcgccccgtcgcattacctctgcggcaggacaggcggcacctttggcaggcgaagcaggcgacgcttcacctccgccataatgaccgcgtcaaaaaagggaccgggaaaggggatactccgaaagggatccttctccgcgaaggaagtgggcctcgagcccccctactgatcagaggttcgaaggctggcccctcggaagggttcaacagccgcctcaaagcactcgggctccacgcccactactaccgcctcagagcacgcagagcgagggatgaccctgggtacgttcgatacataaccaaggctcgggctatgctcccgaggctcgggggctgctctcgcaaacccagctccggccaaaccgttgacagcgtcaacataccagcccgagaacttgggactcgactatgcacccaggctacacccaggccaaaccgtatcggctcggactcacccacgactcagaagacgacggactccgcctcgcccgaccccagggctcggacagagcctgggcctcggaagacggtctccgcctcgcccgaccccagggctcagacacagcctcggcctcggaagacggtctccgcctcgcccgacccaggggtcggactcagcctcgacctcggaaaacggactcgacctcgacctcggaggagcctccgcctcgcccgacctagggctcggaccgatcgcgtcacaggggggccatcattaccctacccctag

SEQ ID NO: 30131 - DNA, 1758 bp, Zea mays
  Peptide Sequence Number=SeqID_73506
atgaagaacgtagaccgaccaccttccaatccaaaacgcatcataatccagtctactcaggagtgcttcagcgttgacataccccgtgctccggcggggactgttagacccgagacaaggcgtgctgctgatgaggatgatgactttatgccatcatccaagaagcgtaacttggacgacagccctgggaaagttttgaagaaggtagtcactaagcggcggaaagcagtgcccccaccccgacagcagaagctgaacgtcagatgcaacccccaagatgtgttagtaagcatacaaatattaaatgacagacagcaacaagcaattgcacgtaggggattttctagtattcttgatatgagactggatgcactcggcagcagatcacacttagcttggctgatggaaaagctcgaccccaatgacatgacaattcgagctggccctggaaaggagctgaaaataacaaaggatacggtgcacctaattttgggtttaccgaatgctgggggaggaactgcattgggcatcgatgaagctgttgttgccaacaatttgagagctgaacttgggctatcgaaagaagattttggggttacagctctacaagatcgtttgaggaaaggttctgacgatgatttaagcatcagatgctttttcttgatattgttcaataggttgttgttccctactgccagctggggaataacgaaccatgaggttcttttaaccgagcagatggatcgtttccaccagattgactggtgtcagcttattttcaatgatttatgccaagctgccaagaagtggcataacaggagcgttacgaacgtttctacaaccatctatggatgttccatcgttattcttcataagaccaggaccaatgcttttgatgttcctcgtcctgacccatctggacagcactcaattcacatcgaactcccgctcatcagggatttgatatcaagcaagcttaatcagcttccatcccgccaccgcatgggtttcatagagaagctgtcacattttgatgcggaggttggtaaggcgtgttcagttattaaacagaatcttcagcagattgttgagaaacaattcaatctatctgatgtttttggcgagttaattgatgaggtcctccgtgccgaggcgggtgacaacgaagatgcttatgatgtgcagaaaaccacatcaaaatcagatgatcatcttccccagacagctgaaagttgtcccgatgaagctgatattgatctactggttcatacaaatataacgaaacagaacaaaacacctacaacctcagtgggtaaacatggtgacggtggcaagaacatgccgaccaatacaaacgtcactcctaaagcaacaccacacatggatcctgacgcgccgatatttgatgcgacaccgcaaatcaagtgtttcatccaatgtgttattgatgatgcaaaaaatcagcacacttccatgagttcgaacagtttggttcttgatgttaatgttgggtcaatactcaactttgaggaacaggaacgacacagtcgcaatcctcaaccttttgatgaatctgtactccacacacttctagacaattcattgcctgagacagatgagttggaccaatacaaagcgatcatggtccccatgggcaacaccagtgagatacggtctcttgcgctgcattacatcacattccacccgaagaacaaagcattaccgctgctccaagacatccaaagattcaaggtctaa

SEQ ID NO: 30132 - DNA, 879 bp, Zea mays
  Peptide Sequence Number=SeqID_73507
atgcgcgccgcggggggcagcaacctcgcgctgccagggagtcgtgccttgcgccgccggggccgaggccgttgcgcccaggccgaggacggagtaaccgcaccgtcgttgtcgatgcgcgcccgtgctggccgagggctccctgcgcctgaccgcgccagagggtcgtggccgcccgcactgaccggggtagcccatgaccggtgctcccaccaccggagacgcccgagccggccgcacgcctgccccgccaggggctgcgcccgcgcgccgtctaggggccgcgcccgcaagccgggaggccgtgcccgcgagccgggaggccgcacgctcgcctctgcggctaaggccgcgcccgcgagccggaaggccgcgcgctcgtctcaacgactaaggtcgcgcccgcgccttttggttgggggctgcgcgctgctaggggcctgctcgcccgagccgccggatgccgtgccccgagccgccgtggtcggatcccacgcctgcgtgccggggtgtcatgctcatgcgccgtcggggccaaggacgcccgcttggtcgggcccgtgcgtgccggggtgccaccagcgcacgccgccgaggggccgcgtcgtcggggccatgaagcccccgcggccaggccgtcgcgccgcttgggggagcgccattgccgcgccgccatggctcgcaccggggcccggaagaggccaagcgccgacgggaccgggtcgccataccgtggctggggctggccgtgcccaggccgcccacgcgccaccggaggccgcccgaggccgagcgccgtcgggacaggaccaccgtgtcaaggctggggacagccgcgccaggccgccggagcatggcagccgccaccaggtgggatga

SEQ ID NO: 30133 - DNA, 573 bp, Zea mays
  Peptide Sequence Number=SeqID_73508
atggcgcttcctgttgacgtggctggcctgcgccctaggtcgggcgacgtggaggctcctccgaagccgaggtcgagtctgtcttccatggccgaggccgagcccgagcccctgggtcgggcgaggcggaggtcgttcggtagaggccagggcggagtccgagccctagggtcgggcgaagcggacccgagtccgagccctgagtcgggcggagcggagttcgccgtcttccggtccgagccctgggtcgggcggagcggagttcgccgtcttccggggcctagcccgagtccgagccctgggtcgggcggagcggagttcgccgtcttccggggcctagcccgagtccgagccctgggtcgggcggagcggagttcgccgtcttccgggcctagcccgagttcgagccctgggtcgggcggagcggagttcgccgtcttctggggcctagcccgagtccgagccctgggtcggggcggagcggagttcgccatcttccgggggcttagccccgagtccgagccctgggtcgggcggagcggagtttcctatggcgcctttggcagggcctga

SEQ ID NO: 30134 - DNA, 918 bp, Zea mays
  Peptide Sequence Number=SeqID_73509
atgcagcccggctgtacccccccgccggtggtcacccaagatggtgacctccagcttgatggtgggggaaagcgagccgggctgcggcctctccccctccctcagcctcaaggattttcatcaccaaggctggggaggggagtgtgccgagttggggtcggcccctgcgtgggcggtggcccgctccttcactcagtgatgggagggaggggcggttgtcgtccgtggcgctggcagcttcagcgtgcccggctttcggacgcgagtggcttcggggccgctcgcggcgccggcgtctgccacggcagctggaagaggttcttccgccggcgtgatagccaaggctggccacggaccgacctccaactctacggccttctgcccgtccttgccttacgagttttggcatgggcggggcctcctggcagcagcatctgccctgaggtcagtgctgccgctgttcggccccccggagcagaagtcgtcgtcgtcgccgctgctggagcaggtgacggcgcgccgctcgtcggtcttccgttgctccgcaggccttcccccatggagtggggttactcgcctgttgattatctgaaccgcttcaccaagcatgagtcaccccgtgttaaggtgacgagtgagcacgaacagaggcagagttggctcgaaaatgaaaacctggttggccggagcctaaccgggttgtccgtcggtggggccgatgccggagttgatcagccgaggccccggatcgggctggcgcccttggaagatggttggccgaggccccagggaagtccctggaccgcgtcaccgtccgaggctgggtcggacctcgctgaaggtgtcgtcgatgccgagggtgctacagcccccttccagcgtgaagacccgagcctgcaggatcagattgtcttgtag

SEQ ID NO: 30135 - DNA, 675 bp, Zea mays
  Peptide Sequence Number=SeqID_73510
atgcggaggccagggtccacgatcaggtggtccaatagtgtcaggttgaattcccccaagctgattgtcttgtcagtaggtggagttgttctgttaatccatggaggatccagtggaattggtacattcgctatacagattgccaagtacctcggaattaaggtttttgtcactgcaggtgttgatgtgattcgggataatattggaggatcatatctccagcgcaatctaaacaacttaggtgttgatggtagacttttcatcattggcttccaagggggcatagcagctgaagtgaacctgcaagctgtgcttgcacgccgtttgaccatacaagctactggactgcgcaacagaagccttgccaaaaaggcagagattgttagtgaggtggaaaagaacgtgtggcctgctgtcgctgctggcaaagtgaagccgatgatttacaagacgtttcccttatgtgaagctgctgaggctcataggttgatggaagctagcacccacatcggcaagatactgctgctcccactgcacctgtggcgtttgcgctcttactctcggaggagtcagttcaagaacatatgcaacttctgtgacagcctgcatggatgttgtactgtactagattggatcttttaccccgagaaattatcttgtcaattggatccttaa

SEQ ID NO: 30136 - DNA, 390 bp, Zea mays
  Peptide Sequence Number=SeqID_73511
atgagccgatggcggttgcgattaggcagaaccttggtgaagacgaagaaatttagaaacctaaagcaagatgctggcccctcaacattactcctcggcgatggcccgatgagcaccatcctcgaggacgatgttagaggttgtgatgatgctcgggttggcgattgtgtgcttgataaggatgaggaggaagaagaagttcccttgattcgcaagaacagccgtcgcagcaggagtagtgacatcccgatgcaggccttatcagcacttgtcagccttcaggggttgtcgatatctgattttgaccatgcattggaagagatcatccccgagaaccttttatcagagcctgctgaggttgacaattccatcattcatttagaggtctag

SEQ ID NO: 30137 - DNA, 879 bp, Zea mays
  Peptide Sequence Number=SeqID_73512
atgaagacaatgcgatcaacatcaaccaacaagatcagagtggcgcagcgaaagcgtgtgtgggtcctaacccacagcccaccccgttttaccctttttcctccccgcggcccagcagctcccccccggcccaccccgcagcgtgcggccgagcgcccccgcgaccacaacgcgccccccgccgtggcccaggtcgcgcgcgagcagccgcgcggcccattcgcgtgcctggcccaacgtcgccccctcgccttggactgccggcgtggtcggtccagcttgcgccacttccccccgcccagcctgtcggcccagcagcgcccccagtgcagcccactcagcctagcggagctgtgtgtcgcgcacgctcgcggctcgcccagccgccgcacgtcccctggctgcctgggcaattggcttcttctccaaccgtccgagcacttcgcgtctacggaagaaataccgcccatgacttcttccattcaatgcctctctccctcccctgcgctcgcagccggcgcagcggcctggcgcagttcgcccagcgcagcgcgcggcgcaggcgcgcggcctcggctcgacgcggccagcctgcgcggcggctcggcatggctcgcctgcgcgacggcccggcgctcggcgtggcatgcgcccggcgcggccagctatgcccccggtgcggctgcgtgcgcccgccacggtgcagcccacgcgctcgctgtcaccgctgttcgccacagcagcttctcgccacgagttttgtcgtcgcgctattgtcatcgccgcgcagcagggtctacgtcgctctcgtcgtcgccgagctacgcgcttgttgtcgtgctcgtgtcgcggacgtacccacatcccacgtgtgcatag

SEQ ID NO: 30138 - DNA, 300 bp, Zea mays
  Peptide Sequence Number=SeqID_73513
atggtcggcgctgtcggcgtccgctgtgatccagggcacacggagggcaccactgcgattatcggagacacgaggactctcggtatgcgaatcacgggtgagctaaccatcgcaacactgggaattcgtcgatggagttcatcactgccgccgcatcgccatcttccgtgggcggcgtacctagacatattagcatcagattgccaatcccgattaggtgaaatagggtgtccatcccgaagttgcgactcgccggagtcggtccggcgaggtctgggcggcggcaccacgggtagctga

SEQ ID NO: 30139 - DNA, 444 bp, Zea mays
  Peptide Sequence Number=SeqID_73514
atgaccttgcggtaccacaacacagacaggcgcacgtcgtgggtggatgacggaaaaggcccacgcggaagaggacggaagggactgcaagatagggcccgcacgccttccacggtgcgtgagtgtgagactgagcagctgggatgtaggtcccacccgacagcgggtgccagggcgcgagtgcatgctctggtgggtcgagcggctgaggggaaatgggctggcgggggaaagtatggagatgggccgaacaggggaagttggcccaagtctggacggtttgaacttcaaaattttaagttagatgcacaaacaaactccaacatgatgcaggttgatcttttcttctccggtcttgagctcatagattcgaggtttagtgtatattattggggttgggaaatatgcttgctaggtcaagatgagtctctaagatcatggtag

SEQ ID NO: 30140 - DNA, 300 bp, Zea mays
  Peptide Sequence Number=SeqID_73515
atggtcggcgctgtcggcgtccgctgtgatccagggcacacggagggcaccactgggattatcggagacacgaggactctcggtatgcgaatcacgggtgagctaaccatcggaacagtgggaattcgtcgacggagttcatcaccgccgctgcatcgccatcttccgtgggcggcgtacctagacatattagcatcagattgccaatcccgattaggtgaaatagggtgtccatcccgaagttgcgactcgccggagttggtccggcgaggtctgggcggcggcaccacgggtagctga

SEQ ID NO: 30141 - DNA, 2028 bp, Zea mays
  Peptide Sequence Number=SeqID_73516
atgccgcgcacgaagaatgtgtcggcgccagggggaggcgatgatgaggatcctcgtcgccccttcaggcaggtcaagggcaagacagttcacttggagcagcaggaaggccgcaagaagcggtgtatggacagagcagcccgtgcagcggcagcagcagcagcagccgctgcgcaggccgagcttggagatcagccacagactccgtcagatcagattgcataccgtgttcgtcgtctcgcctcccggcctcgctcctccactcacaccactgcttccactccaccacccactctgcctgctcccgtcacccctgttgcaccatccaccaccacagccatacccgctacctccactacaccagcttccactgctcctcctcccgctcccgcttccgcccctcctatccctccacctcgattccgggagcgcgatgagactgaggtacgacccattgctgcggatcccagactttttgaccttcagcgtgctacagcggcacaggtacgtaggttcagatacgtacccgtagagtcttggttaccgactcaaagggaccctacagcagttgacctattcagcacccgtattcaggagtccttcttcagggcacagttgtctgcacagattgctctgcgagtgcaccggcttttggatcttccaacttttctgcttgccgccggtgctgactctgaggcgcacctcacatatctgcctggccttctgacccttttgactaccagcggcaggtatgttgaggagtgggtccgagtcttctacgcgactgtatggatagacccggatcatcactggatgaagtttcgttttgagcgagaggatgtcactattactgccagtcagattcgccagcactttggatttcccgagtcgacgactcgacttcacatcctatgctacgacacctctgaccctcctcgtcgccctcacggcggtgtggctctgggtacagctcatgtcgcggctctgttccgcccgcccttctcagatgggtcgcgacgttcaccggcagatttcactacagcagccaagtacttatttgagcttatcagacggactcttctaccgaggatgggatatagggaggctaccacacatattcagctctggctccttggtgccctgctgattcagcctccccagtttcagggcacacttgaggccttacgccttgtctttgggtcctaccgtcctgcgcctgaggctcctgtgccagcttctgctccagtttttgactctcaggccgaggatgctgctcttcaacagttcgaagctcaggatgcagcagttgatgatgatgatgatgatgatgattttggggttcctcctccgcctccgcctcctatgcctccacgctcacatgaccatgaggctgggagttctagtgctacccctgctgcccctccggctattgaccctgctattgcttcgattctccagtttctcacacagcagcaggctcacctggcagccgagcagacccggttatccgagcggatgctctcgatgtttcagaccatccaggacaggcaggattcgcttcagcagcagctactccaggatcgggctgagagcagggcattcatggctcttatgctacatcattctggtgtctcagttcctccggttcagtctgctccacctcctccgcttcaggctcctgttgtgccagtgattcagtcaggaccccctgttccttctattggtccttcttcctctccgctccggccggtcaccctggctttcacgtcaccggttctcagctctgtctaccctcagccgccagtgccaccagcttctgctgttaccactcctgctgtggcagtatctgtgaccacttcagttccggcagctcctgcagcgcggcctcagtacgagtcagtaccagctccagcttctaccgcagatcctggatccgagactgactctgaccccccgccggcgttcgctctgctgcctcgaccacgaccggatgcgcccccgccgcctcctcccgcttcagatgtttag

SEQ ID NO: 30142 - DNA, 999 bp, Zea mays
  Peptide Sequence Number=SeqID_73517
atggcgtcggcgaagctgctctacattgtggtggttgacgaagacgcctcctccttccgatacacgcgctccctcctccacagcaccctccagctgatgggatgcaagcgacgccacgccttcgagccgcagggtgtaaggtgttcgatgtcatcccggggtgaccaacagggcctcggcgacacggccacctccgcccgggtgcggaggtacgaggtcgccgaagcaaccccgaccacaagttcccgtcagttccagttcgagctatacaagcgccggaccaccgtcctcctccccagggacctcttcctcgacctcgtcctcgacctcgacgccctcgccctctacaagttcgtcgcccccaaccagcgcaccgatctcatgctcgcctgcagagatgactatgcaaactatggttgtttggcgattggacgagattcaatttgtctcattgcaattgctataggtgaatgtcttgacccagtagcagttgctgaagcaaaagctaggagtaaagtaaaaaaacgctcaggcgtatcaagcaactcaaatattgattatgcgaaaagtggggctcttaccgaaaaagttgatgggaaatcaatcgggaagaagcaaatggccatcgaaggttataaagcacagagcgagatgatgggtctaatgaggaaacatccttcgataatacctttcatgatctacatatctaatgagagtaagcacacagagagcaacattagaactatccaggagtacctttgcagtagagctgacaagtacctagttcccaaggtcaacaacactaatgttgatcagagtgtggcttcgatccatgccactgtctttagctgcctccgtaggcgaggtaatggagataagttatatgatcctgaagcaaatactgttgctattataaatgaagagtacaaaaaccaatgtgtggctaattccatgagttccaaggggatgtttaaattgatccaacggcttggatcttga

SEQ ID NO: 30143 - DNA, 1305 bp, Zea mays
  Peptide Sequence Number=SeqID_73518
atgaagtctgttgatcgccggcccagtaatccaaaaagattaaccattgaatccagtcaggaggttttttcaattgacatttccagacgtacaagatccagcagctcagctcaccaagatgatattccacaaaatcaggagcagaatgagccacaaccagccccaatccatcgttttcgcagaaaggctttagcttgtcgtttaaaaagaaaacctcctgctccatccacactgtccgacgacgatttcatggatgctccatcgttgaagcgccaattcagatctgcctcaccttctccttcagaacaaatcagtgcaaagaagataaaagtaccttctcctcaagttccgagcgtgaaaagaagtccaaagtctaatatcattacaaaaaaaaactctcctaaacagaagactcctagaaaatcacagaaattgaatatccgctgtattccctatgatgttattgtatcatcttggataatgaccgatcggcagcgcgatgctgtcgctaggttgggattttctagtatatttgatttgcgaactgatgccttagagagcagatcactcattaggtggttgatggataaattggatccacatgacatgaccatacgcccaggggctggcaaggaactgaagataacaaaatatacggttcgtctgattttgggtttgccatgtgctggaggaggcaggaagtttactgattggtacggtgaagtggatgctgctgcaaaactgagacgtgatctcaatgttggtaaagaagaatttgatgttgtcaagcttcaagacaagatagtgcttggcaatgatgatgagctatcaatcagatgcttttttctgattctattcaatcgacttctttttccttctgcttcttggggcattacaaacaatgaggtactaatgactttaaacatggcccgaatggctgatattgactggtgtcaactagtttacacggatttgtgtgatgctgccacacgttggcataaaaggaacaaaacaaacatcacagcaacaatatatgggtgttcactcattgttctaatttactatcttgatcacctacatcaccctgcatctcctgataacaaatatggtactccccgcattaagttttttgataatgagaccataagagagttggctaggggtgacagacgtccccccgtaaaactggtgaaccattcggctatgcagagtttcgtagccgttcagaaacgtgttacgtcattgctccagaacggcctgtttctgccgttttcaacatatatgtgtcatgtatcaagcatttga

SEQ ID NO: 30144 - DNA, 468 bp, Zea mays
  Peptide Sequence Number=SeqID_73519
atggcattcattcttatatatatacctatatggttatatttagagaacgaagaagagagtgaagtgactgaagagaagacaccaccaccacctttggaatctcgggcaaggacttggctctacttcgacaactgcgagtctgagcctgattcacctatgaacgaaggcaagccccggcgtgctgaccgaggaccctttaactggtcacatgcctcgtcatggcatacccttgagagtcttttccttagtcgggtgaggaagcgacaaatttttgttgcttttgctccaaggtggtaccaaatgaggaaaaacaagactgaagtgcgggaggactcggtcctccacttaggatcttttgcttatagcttatcgggaggagtttgtgcctcccttggtttgtataatattactactctgcactcacttttagtctggtctgtaataaaacaactcaagcttgctttttaa

SEQ ID NO: 30145 - DNA, 1608 bp, Zea mays
  Peptide Sequence Number=SeqID_73520
atgcaagccacgctccagaaggttgagcaagggctgctgcaaatcaaggcagcagtacaacatgggcaacaccagctggcgttgtccgcacggctccggacgtcggcggctgtgggcatacaagctgctgctcgtggcttccttgcacgacagaaagtgcgggagatgcgccgacagatgctcgaggcagccttggtgacggttgacctcgacacacgtgggcgggacctcaccctgtcggacggccatcagcagtggcaccaggccgctatctccaagtgcgagcatgatacatgtccagcgggcgacggacttcaactctacagcagcggcgatagggaaggcactcacctcgtcatcaacaagggcacactatttagcgccaccacattccgctaccggtcgccacgagggcgcctccgctggttattgttgcgacctattccagactcggtctttgagcacccgttatgcggcagctcgagggttaataatcttctgcaagttgcccagaaattccaagctgttgtcagtgaaagtggatcagctgggatatcaaataatgatgcacaaaccatctgcaacatgtttgttaatgcatcacggcaactggcaaaaaatctagagcatcacaccttaaatgaacatgggctttctaaaagatatatatcggaggtggtgaatcacatgaaggacttgatcgagttcagccacaagagcaagcttggtcctaaagagagcctgaacagttattctaaaaccacggcaaagtttgagaatatgcatgattcgagacaggccatggctgccgctaaccttgccaacaaccagagcaacaccaaattgatgggggtcaaacaagagacaagcacttctgcgaacaaccagactcctggtgccggagccattggcaacaacaatctaccgattgccgcacctctaaacacctaccagaacatgctcagaagctcaggtgccagtacgatttcgctgcagcaggaggcgtcgagtgtcttcaaaggtcctacagcaatgcacaacggcatgcagctggaagcggccaggtccttcctgggacctaaccaagttcaattccagcaccacccaccgtcgtcgtcgtttcagcagcagcagcaaaacagtttccatggctttggtgtcaacccgcagtaccagcagcatgtcctcaaccagcttctgcaggaagttaagaacagtaacaaccgctcgaaagcgcagcaaccgcctctggatgcaccaccgccgaatgcgagcggcgggggtctcgcgccaggagttgctacccccaacgtcattgctgctactggggagcaggggcagcatgtcaataacagtagctctaaccataacggcacggtaaagggtgctgctggtactggccctagcaatgtcatcaacaatagcacagccagcatggcttcggccagaaacagcagcttcaagtcggtgagcagcagtccagctgctgctggcaatgccgtgagctcgaaggtcgatgactccttccatcaactggaggacctcgacgacatgatcgctaacgaactggtggagagcgggctgttcggtgcaggacacgggtggtag

SEQ ID NO: 30146 - DNA, 360 bp, Zea mays
  Peptide Sequence Number=SeqID_73521
atgtctcctcgggagctccgggctcgtactcacaggggtccggtgtccctctgcggaggtccggacccaacggtgcttcctgggatgtattatccttcctcgccatgtggtgcccttaggcctgcccatgtggtggggtcggacttccacgacggccccaagaagacgtggcattggcgcaagcggcggtgcgatttttccgcacccggtaaccggtgcgccgattgcatgacatgtggggctgggccccgtgttggaccaccggttgcagcgaagctgagggggcgcacaaccgcggggcggttgtacgcttcttgcgtggcggttcgcctttttgaccgctggttacggcgaagatga

SEQ ID NO: 30147 - DNA, 789 bp, Zea mays
  Peptide Sequence Number=SeqID_73522
atggcctgcaggcaaaccggctcacgcctgtctcggtgcggtggccggctaatcatggccaccgtggggcagtccggggccctgagaagggtcaccgtgcactacgccagctcgcccacgcgcggcgcggtggtagaggtgagcctcgacgacctcgacgacgagctgctccagtttgtgctcgccgatcttcttcccggccaggaataccatgcacagagcagcaccgctgctgcggcagcagctgcttcgtccaggaggaatccaggcacggatgacgcccagatcgcctcggacttcgagtacgccacgaagctgcagcaggagatggagggcctcagcgtcgacgacgacggcgacggtatcagctgcgtgccgtctccgtctgactctgacgacgggcacgaccatcaaaacgaagaggacgaggaggaggaggatggtaatggtggtggtgatgatgatgatgatccagacaacatgacttatgagcaaagacaggcacttgtagagtctgtggggtctgaggacagaggcttatccgacgagctcatctcctacctgcagccatggaagtacaaggcatcagggtttttctcccggaaaacaaaccatgacgactgccctatctgcctgtcaactttcaggaaccgagagactatgataacgttgccgtgcatgcatcactaccacgcagcttgcgtcaccaaatggctcagggtcaacaagctctacagaaagagaagggtggcggcggcaaaagcacttgccagcaccaatcaggcttag

SEQ ID NO: 30148 - DNA, 441 bp, Zea mays
  Peptide Sequence Number=SeqID_73523
atggtcatttctcttgttcttacaatgaataattcagaggtgcaagtgcaccagacagatagaagcatatcattgcatgacatacccaaagcaggtgtgaacgcaccggcacaaacaagcagaaagatctgctcagactggacacttccagaaggacactggtcaacgttcagaaattgccatgtgattgtggaagaaaagaacaatttcaccgggttgtccttccaaagaactaactggcaagtttcggaggaagacccagctgaaactgaaaaacgcgaggcgagttggaattcggaaaacggcaagatcgctggcaagattttactgtggattggtgaaatcaaactcggagacagtcaggccggaaagtataagagcgtaaacaatgatgtttctttgtccatccatggaattatattcaaaaaaagaagacagtga

SEQ ID NO: 30149 - DNA, 2364 bp, Zea mays
  Peptide Sequence Number=SeqID_73524
atggcatcctcccctccacctcctcgccaggaagaggaccagcaacgggaagaagggcaccaccatggcgacggaggcgacgacgaccagatcaccacaccgctcctggtggaagcggcgacgacgtcgtcgccgtcgccgtcggagggagacgatccagagaactcgccgatcgagcaggtggcgctgacggtgccggtgggcgacgacccgtcgacgccggtgctgacgttccggatgtgggtgctgggcacggcgtcgtgcgcgctgctgtcgttcctgaaccagttcttctggtaccgcaaggagccgctgaccatcacggccatctcggcgcagatcgcggtggtgccgctgggccgcctgatggcggcggcgctccccgcgcgcgccgtgctccgcggcacccgctgggagttctcgctcaacccgggccccttcagcgtcaaggagcacgtgctcgtcaccatcttcgccaactccggcgccggcaccgtctacgccatccacgtcatcaccgccgtccgcgtcttctacggcaagcacatcaccttcttcgtctccctcctcgtcgtgctcaccacccaggtgctggggttcggctgggcgggaatattccggcggtacctggtggagccggcggcgatgtggtggccgtctaacctcgtgcaggtctccctcttcagggcgctccacgagaaggagcggcgcgtgaagggaggcatgacgcggaaccagttcttcctggtggcattcgtctgcagcttcgcctactacgtcttcccgggctacctgttccagatgctcacctccctgtcgtggctctgctgggcgttcccgcgctccgtggtggcgcagcagctggggtcggggctgagcgggctgggcgtgggcgcggtggggctcgactggtccaccatctcctcctacctcggaagcccgctcgccagcccctggttcgccaccgccaacgtggccgccggcttcgtcctcatcatgtacgtcatcacgcccgccgcgtactactggctcggcctgtacggggcgcgcagcttccccatcttctccgacgggctcttcaccgccgccgggcagacgtacaacatctccagcatcgtggactccaacttccggttcgacaccgaggcatacgagcgcaacggcccgctctacctcagcaccttcttcgccgtcacctacggggtcggcttcgcgtccctcaccgccacggttgtgcacgtcttcctcttccacgggagcgagatctggcagctgagcaggtcagcgttccaagagaagaaggtggacgtgcacacgaggctgatgaggaggtacaggcaggtccccgagtggtggttcatctgcatcctcgtcgccaacgtcgccgtcaccatattcgcctgcgagtactacatcgagcagctccagctgccctggtggggcgtcctgctcgcctgcgccatcgccttcttcttcaccctcccgatagggatcatcacagcgacgacgaaccagctaggtgaggtcatcaattggagtatgcacgcacgcacgcacgcagactccaggcctgaacatcatcaccgaatacatcatggggtacctgtacccgggccgtcccgtcgccaacatgtgcttcaaggtgtacggctacatcagcatgacgcaggcgctggccttcctgcaagacttcaagctgggccactacatgaagatcccgccgaggaccatgttcatggcgcaggtggtggggacgctgatcgcggcgctcgtgtacatcgggacggcgtggtggctcatggacagcgtcccccaacatctgcagcacggagctgctccccgccgacagcccctggacgtgccccatggaccacgtgttctacgacgcgtccgtcatctgggggcctcatcggcccgcgcaggatcttcggcgacctcggcacctactcggcggtcaactggttcttcctgggcggcgccgtcgcgcccctcctcgtgtggctcgcgcaccgggtgttcccgagccagagctggatcctgctcgtcaacatgcccgtgctcatcggctccaccggcatgatgccgccggccaccgccgtcaactacaccacgtggatcattgccgggttcctgtcggggtacgtggtctacaggtaccggcgtcactggtgggagcgccacaactacctgctctctggcgcgctcgacgctggcctggcgttcatggccgtgctcatctacctgtgcttgggcttggagaacgtcggcctcaactggtggggcaatgatctggacgggtgccctctcgcctcttgtcccactgccaaaggtatcgttgttgagggctgcccggtgtatacatga

SEQ ID NO: 30150 - DNA, 204 bp, Zea mays
  Peptide Sequence Number=SeqID_73525
atgatctaccgcaactggtcgctgctctcgtccacagtcgtcatttggggcggcgtcgccaccgccggcctcgccggtatcttcctcttgggcggcaaggttacagatatagctgacaggactgatggtgtcctctttgatagcggcgacgatggtgtgggtgagatagcacaggatgacgtgcaggatgcctctgtactatga

SEQ ID NO: 30151 - DNA, 474 bp, Zea mays
  Peptide Sequence Number=SeqID_73526
atggttcaaatcgtcgagcaccgcgacttgattcctgaggactttctgatggaggaagaggcagcatcatccatgccacaaagctccaaccgccctgcgactgccagggagttgttgcgcaaccccttaagttccacagcctcgtcgggggccatgaggcagtggcatgaggatgtcgaccgtctcctcggcatggcacattctggctcggccaggcccaggcctcggtcattccggcgtcaacgcgaggcgtcggtatctgtgcactcaccctcagtgaggggtgcacgaactaatgacctccggacagagctcaaccgcaggcgtgcgggtgaggatgcccgaatctgcctggagagggatgacgacctacgagcagagcacaaccgctggcgtgcgggcgaggatgctcagatctctctagagagggcgcgtgagcgccggcaaaacttcgagggtcgcaacctcgactag

SEQ ID NO: 30152 - DNA, 309 bp, Zea mays
  Peptide Sequence Number=SeqID_73527
atggacaagagcatgctcgacgacctggatggcctccccgaggaggacaagagcatgctcgacgacctggatgccctgcaacttctcctccttcgtccgccagtttgtatagagttcgctacacttacttgtgatttcattaacgaaggatcttctcgcacccgagcaggaccaccggatctgctgccgaccatcgacttccaacaaatcgtccccaagccaagccaccatcagaagattgtggacgagtacaatctcctgctcgcaagtcaacttgaaactcagagaggtggagtcaatacctgctaa

SEQ ID NO: 30153 - DNA, 186 bp, Zea mays
  Peptide Sequence Number=SeqID_73528
atgtccgccgtcgtccaggcgctggagcccctgctcggattcgacgacgacgtgcctatggcacccctgggccacgccggccccgtcgtgctattcgtagcggccgccgcgaaggagaagaaggagcgggcccccaaggaaggacatcctcggccaccggcgcaggcgaccgttgcgctaaagtag

SEQ ID NO: 30154 - DNA, 474 bp, Zea mays
  Peptide Sequence Number=SeqID_73529
atgggcaagaacaacaagcgcaagcgtgagccaactcctccatcggaggagtttggtgactcggagtactcagaggaggagttctcctctgagtcggaggggtctctggctcccgtccccctgcgtgagtcgtctgatcccaggggctcgcggcggaggtctagacgtacatccgggccatcgagcgctccgggctcgagggctcggatgagtcggagtactcctcggatgaggaggactcggacggcggcggcgaggacgaggacgacgacgacgacgacgacgacgatggcgacggtgacgatggcggcagtggcagcggcaggggcagcggcggcggcagcaaggacggtgatggcggcggcagcaggggcagcaaccggggcggcagcagcaggggcagcaccaggggtggcagcggcggcggcagcaacagggccagtggctagatgccactggttttttagatattag

SEQ ID NO: 30155 - DNA, 570 bp, Zea mays
  Peptide Sequence Number=SeqID_73530
atgacggacatgtggttacctgcgaaaggcaactggctgttgaggtcgattggaggaatcactgcagcagacgagctcgaggtcttcctcttgggtgccatctcgattctaccagcgagcagggtgggaggcgaatggcagagaggattcggaagcgggaaagcaagaactagggcacggaaagcaaaggcggctaaaagcgcagcacttatgggatattctcgagccagataccgtttcaaaaagtgcccagtcatcacccggcggttatttccaaaaccccagcgtgccacgtggtcacccggcagttatctccggaacaccggcgcgccacctcatcactcggccatcatcctcgaagtggctcgcgcggcctgctatcactcggtgttgcctccaaaacgccgatttcgtgttcagtcgctcgacattacctctaaaatgccgacgtcgccctccaatcagtcggcgctgccaccaaaacgccgatttcgtgttcagtcgctcagcattgcctctaaaatgccgacgtcgccccccagtcactcggtgttgcctctaaaacgctga

SEQ ID NO: 30156 - DNA, 495 bp, Zea mays
  Peptide Sequence Number=SeqID_73531
atgcagcccggctgcacccctccaccggcggtcacccaagatggtgaccttcggcttgatggtgggggaaagcgagccgggctgcggcctctgcccctccctcagcctcaaggattttcattaccagggctggggaggggagtgtgccgagttgaggtcggcccccgcgtgggcggcggcccgctccttcactcagtgatcggagggaagggcggtcatcgtccgtggcgctggcagctgcaccgtgcctggctctcggacgcgagtggcttcggagccgctcgcggcgctggcgtccgccacggcagcttgaagagcattcgccctgaggtcagtgctgccgctgttcggccccccggagcagaagtcgtcgtcgtcgccgctgctggagcagccgggttgtccgtcagcgggaccgacgccggagttgaccagccgaggcctcggaccgggctggcgcccttggaagatggtcagccgaggcccctggggtaa

SEQ ID NO: 30157 - DNA, 405 bp, Zea mays
  Peptide Sequence Number=SeqID_73532
atgactaccagccttgtggtggagagaagcgagccgggatgcagcctccccctgccctcagcttcaaggatggtcatcatccgcgctggggaggagggcgagccaagttggggtcctgcctttcgcatgggctggcgacccgcttcttcctacagcattcgggggagaagggcgttcaccagccttgcagaggaggcgaactttggctacgctgggtcggccggctgcaggcgccgtcagctgccgcgtgtctggttcctcggcctaggtggctttggtgccgcctccggcgctgcctcctgctgcttgggtgggtgtggctgtccgtccaccgcatgggcgacggtcgcgacgtgcgcgggtctaccacacccacgacttctctcgcgccgccggccgcactag

SEQ ID NO: 30158 - DNA, 243 bp, Zea mays
  Peptide Sequence Number=SeqID_73533
atggccatgatgggttcaacatcagaaaatatgtacctctgccagggctttgagacacctcccgcttcagttgccgcacctagagatgtatctggtcaagacgacgcattgacttcttgggtgaacaacattttcaacaccagggtccagctggaggaagttgctataactccaaccaaccaggtgaaggatatgtgtgacagtttttcaaatgtgtttggtttggaactatgtcagtgttga

SEQ ID NO: 30159 - DNA, 219 bp, Zea mays
  Peptide Sequence Number=SeqID_73534
atgtgcgatcacaggaactacaggaacaagatcaaccatcttcctcgacaatggtgcatcccccaactcaagacgatgaacatgtacctcaagaagaggggcaggatcaagggggagcacaagaagaacagggtagaagaggccttgcaggatatgaactgggtgttggccatacaggaagagctcaacaacttcaaaagaaatgaagtctggagcctg

SEQ ID NO: 30160 - DNA, 108 bp, Zea mays
  Peptide Sequence Number=SeqID_73535
atggcgtccgcgcacattttcctgctcagcaaggggcgtgacgagcgcgccgaactagtcgtggcattccatctccaacagttcaaaacatgtcttgtttttgagtaa

SEQ ID NO: 30161 - DNA, 231 bp, Zea mays
  Peptide Sequence Number=SeqID_73536
atgcactcccctcttgtcccttttggttcccctctaattcctggccctccaatcggatcaaatgatcaccacgccatcgcccctcacctgacgccggacgacggcacagtcctcgacggcgccatcgtcggtgatacctcacctggccctccggtatctaacacccgctccgatagctgctacacgttgttcgacatatggcaaagcagatgggatactcctaactggtga

SEQ ID NO: 30162 - DNA, 381 bp, Zea mays
  Peptide Sequence Number=SeqID_73537
atggcccgcgcctataaagcccccagggaccttgaccgtacctctccgcacgcgcttgacctcaccggagtccaaacccaccggcgtttgcccgtgcacggcgtgtccgcggtcgcccgatccccctgccaccgtagaccggccagcaaggcctttcccagccccgtccagccctcggagaagactgcgcacacctcggtgaagctccccgagcgaggaatcaaagtttgcttcgccggagaggccagttcacggtcgccggactccacccgaccgccggcgagcgtagaccgggtaatcctctactccattcctcgattccttgtgcacacagcctctacgtcaccccgtgaagctcactgtgccattggattgaactag

SEQ ID NO: 30163 - DNA, 711 bp, Zea mays
  Peptide Sequence Number=SeqID_73538
atggtgagggtgcactccgcgtcgtcgcaggggcttggcgccctcggcgccgccggagccagacccgtcgctcctccaccgcctgatcatcagccagcggcggcacggccacggcgcagcgagcaggcggaggtgttcaccatatggatgaagtcgctggttctcaacggcagcggctgcaccgtctacgactccgccggcagcatcgtctaccgcgtcgacaactacggcgcccgccgcgccgccgacgtctgcctcatggacgtcgctggcaacgtcgtcctacagatactcaagaagaagaagctcgggttcgggaggaggtgggagggatacaggtgcgccgatcaggagcagcagcagcaggagcggcagcggccgtggttgaaggtggtccgggcgtgggcgtggcgcgggccgtcgcgctgcacctgcgactgcgagctaggcggcctcggcctaggtggcgactcgacgtcgacgacggccgtgcgctacaggatggacgacgggaggatcgcgccggcgcgcggagccaggatcgtggacggcgccacggggctcgccgtggccgaggtgaagcggaagacgacggccgagggcgtggcgctcggcgccgacgtgctcaccctggcagtggagcctggcgtggaccggtccgtcatcatgggcctcgtgctcgtgcacggcctcatcaaccgcgccatgtga

SEQ ID NO: 30164 - DNA, 321 bp, Zea mays
  Peptide Sequence Number=SeqID_73539
atggacttaaggaagcaccaaggacttcatgcaatggacgtacagtctgccagtcagactggcagtcaggtcgccaggggtgtcagggggcggttcaaccgccctaggggggcggttcaaccggtcctggcctgtctgacccgcctgcagatctttgaggttgcttgggagtctccaaatttgtggacgaccctaagaagtttgtatcacccgctctttgagctaagatacgaagagattgccttgacctttgtggtcggcttttggaggattagggttgaaaaagacccggccctttgtgggctcctcaacggggagtag

SEQ ID NO: 30165 - DNA, 303 bp, Zea mays
  Peptide Sequence Number=SeqID_73540
atggcaggaatcggatcaaaggccctcgccgtggtcgccgtcctggcggccgtcgtcctctcggtggcctccgcggccgaggcgcccgcgcccagccccgtttccgccgccgccggcgcgtcggcgccgttcgccgcggccctcgtcgcctcctccgccgccttcctcttcgccgccatactctgctatctcgccgtgatcgtgagtgatgattccgtctggttgctactgatacactattgttccttatcggttccatttgagatatgcgttgttcttaatctggtctttctctgcgcttga

SEQ ID NO: 30166 - DNA, 822 bp, Zea mays
  Peptide Sequence Number=SeqID_73541
atgtggagccctactgatatatcctacatcttttctggatacgcacctcttagtattcgccttgttcagcatgcagtgagatctggatggcggtctattgaagaactgttgaaactattgccaggcccacatctggatttgaaaagattctatgtggtacccaaatgcatagcagaaattctaaatctcttcgattccaaaagaagactgttcctttgggctggttcagaaaggctcaccggtgggaaatgcaaagttaattcccaccaccttaacgagttcttcattctttggtccgaagttcaaaagatacagctagacccaggtgctgaggatatcatcacctggaagttcactgcagaccatcgttacacagtgaaatcggcatatatggcacgctttttgggtttgatttgggaggagattgctatatgggttgccattgaagatttgaagtcgtctagctgggagctatctcccatgctgattcattggtcggagaagttggctgtgttgccaggatgtaatagaaaagggctcagaatgttgctgatccttgttaactggataatatggcggaaaaggaacgcaaggacttttgatcgtagggttggtcatcgctctctggttttggttgtattcattggtggtgtcacatttgctgagattgctgcccttcgcttccttagtgcacaggaaggaatgggctacgactttcttgttgcaacaacaaagacaaacccaagcttgtgggttttcttgtttggctgtgagttcgtgtttggtcagcaactggacgataaggctaaccacgcttgttga

SEQ ID NO: 30167 - DNA, 384 bp, Zea mays
  Peptide Sequence Number=SeqID_73542
atggacctgaacctgaaagtagtagcttcacccagctccaactcgcatcatgggccccagcatgagttgaaggtcgtgtttgcccctgttagcaggcgcggggagggagcggacgttggtgcgggtgcgactgtcactaggagcaggcatggtctgctggggcatgcagtcgccagaagttcgatggaggaggcggagtggatcagtggtggaggcctggagcagaggcgtgcgccacacactggaggggattggctcgagcagaggcctctgcagcagccacgtgctggagcagagggccgtcggagcagagggggcacagccgcgtgctggagaagggctgcagagagtgcgcagccgcgcgctagagaagggacgacataa

SEQ ID NO: 30168 - DNA, 285 bp, Zea mays
  Peptide Sequence Number=SeqID_73543
atgactcatgaagtcatgagtcaagtttcaacctacgagacctccaagaggtgtggtcttagctccagaagacctgcacgtcgcagtttagggcaaggcaaggactatgaacatgaggatcactttggcaacaaccagaaagatgagatgtcatctacaaagaggaaaatagctgaagaactcatctcgtacatcttgggaggacttgatgaagagcataacccgatggtctctgcttcggtggcctgtgttgagcacgtcaccgtggctgaagccacctcctag

SEQ ID NO: 30169 - DNA, 204 bp, Zea mays
  Peptide Sequence Number=SeqID_73544
atgatacataagcaggaagttattgaaaacgtccttcgccttttggtgttactttctcttacaaatgccgggcttccaaagaagaattttgattacatgagctgtacagcatgcggcactgttgctactacttgtgcacctgtagcaacagcaggaagtagtagaagtgagcaggctcaaagctttatgtccattattggttaa

SEQ ID NO: 30170 - DNA, 1500 bp, Zea mays
  Peptide Sequence Number=SeqID_73545
atggcggcgcaaggggcaggaagggcggtttcctcttctctggctaagtctctcgggttgcaaaaacctaagaggcaagcaggaagcggagcaaagaactgtcaccagaccctctcccgggctccgagcctccctactgatcagaggttcgaaggctggccccttgaagggtttcaacagccgcctcagatcgcgggttcgaaggctggcccccgaagggttcacagccgcctcagatgccgagcgagggatgaccaggggtacgttcgatacataaccaaggctcgggctgcgctcccgagctcaccggagacaccatgtttggcgcccatcgagggtaacatggcgctttccccctcctccttgcggaaaggcgacgcaggggccgtcaacatatcagcccgagaacttgggccccgaccgtacacccgggctacggccagttcgcatgagggaacaaccagaccagctgaagcattacgcaaggcattaagacctcggaggagtgaaaccactcctccgaggcctcgggggctacacccggcgggtgcgctcgcgcgcacccaccggaacaaaatgcaaccgagaaaggctggtccccttgcaaaaaagtgcgacgaaagcctccaagtgagtgctaacactcccttcgaggctcgagggctactgtcggggaccataattaggggtaccctcaagactcctaattctcagctggtaacccccatcagcataaagctgcaaaggcctgatggggctcggactcgggctaagtcccggaagacggcgaactccgctccgcccgacccagggctcggactcgggctaagacccggaagacggcgaactccgctccgcccgacccagggctcggactcgggctcagccccagaagacgacgaactccgcttcgcccgaccccagggctcggactccgccctggcctctgccgaactacctccgcctcgcccgacccaggggctcggactcggcctcggccatggaagacagactcgacctcggcttcggaggagcctccacgtcgcccaacctagggcgcaggccaaccacgaggacgtcagcaaggacccaaccgctccaacagctgtccctccgccaggcttcgtcgctcctccgacggccacgacatcacaccagctgggtgccaaattctctccggctgccacatcggcatgcgatgagttcgccgcagatgactcaccggacagttcggtgaattatagctgtacgtcgtcgtcgagtcccgagagcggccttttcatgcggaccagcctgacgcaccggacactgtccggtgcaccaccggatagtccgcttgctgccgagcaacaacgggtagacgaacagaaaatgaggcgtgttgctgaatacagggaggagaaggagaagaagcttgagcgtgcacgtcgtgcagaggacgcaatggaggagaaccctgatgcttttcgcaagggcaaatggccccgttgcactgagtag

SEQ ID NO: 30171 - DNA, 225 bp, Zea mays
  Peptide Sequence Number=SeqID_73546
atgcaggataggggcatgagcacaataaaggatgtagttaaagcaagcattgtaaccggcaagggagaaaatgcaaaccaaggtcgggatagacaaaacttgcaaggtgtcaaagaagggggagcagtcaacgatgaaatagatgaggcattatccccgaacatggatggaaatgaggagacttcaaaggataggttcaatgtaagcaggaaagcaagggaatag

SEQ ID NO: 30172 - DNA, 951 bp, Zea mays
  Peptide Sequence Number=SeqID_73547
atggcgcagatccccaatcttgacaacgcgccgctcaaccttgcggccctcagggagcagtcgcagaaggacttgttcggcatcctaaaaaatataaggggaaagaagtgcttggttatagatcccaagctcgctgggactctctcattggtcgtgcagacatcgctgctaaaggagtatggcgcggaagtgcggattctctctcccgaacccctgcagacggaatgccccaaaattgtatatcttgtgcgctctcagctgaggttcatgaagttcatcgcaagtcaaatcaagaacgatgaacctaaagggctccagagggaatacttcctttactttgtacctcgccgcactgttgcttgtgagaagatcctggaggaagagaaagttcatcagaaactgacattcggagaatatcccttatatctagttccattggatgatgatgtcttgtctcttgaacttgaccattctttgcaggaatgccttattgaaggagatacaagttctatctggcatgttgctaaagcgatccataaattagagtttgcctttggagttatcccgaatgttagggccaagggtgtggcgtcaaccaaagctgcagagttgttgaatagtatgcaactagaggatccagtcaacatggatgatatggggattccagagataaacactgttattctgttagacagagaggtggacatggtaacaccaatgtgctctcagttgacgtatgaaggcttgttggatgagagcctgtgcactggctccactgtgccaccgcaaaagccagagccagagcagtggcacctagaaagcagtttcaccttggccagaagcgcttctattgtaggccatttggtgtggctctggaggctggagctgttcggtgccagagccagagctggcggggagccacaccaaaaaggggccctacttcaatattga

SEQ ID NO: 30173 - DNA, 324 bp, Zea mays
  Peptide Sequence Number=SeqID_73548
atggctcatgaatttaatttctcgatgctacaaattaataatggttcagtggaagttgatgcaagcatcattggagctcaacaagatgggaaaaaggttaaggttccactgaattcaagatctgcatttttgaagttaatatctgttgctccttcctatcaagtcgataagttgtacaaggagattcgagacctcaattttgaagttgtagttcaggttttacgtcaaaaagcaacatctattcagcaagattatgcagaagtgaaatccaccaaccattgttcaaaagcaaggatgcaaatgctgagttattgcgtgttttaa

SEQ ID NO: 30174 - DNA, 168 bp, Zea mays
  Peptide Sequence Number=SeqID_73549
atggccagggacataacatgtgtattcttgctgcaaaaactgcaggtctatacgttggtccctagccttctacgtgaagaggcaattgaggaaaaaggaacgtcggttacaatcaagctacctcaactgaagacagacacaagcaccacctacctccaagtgcactaa

SEQ ID NO: 30175 - DNA, 114 bp, Zea mays
  Peptide Sequence Number=SeqID_73550
atggcgggcggaattaagctcgccggagctaaggaaaggtggctggccggtgagggattcgagttagggatcaaggtgaacatccctgatctttggctcaaggagaaaccctag

SEQ ID NO: 30176 - DNA, 252 bp, Zea mays
  Peptide Sequence Number=SeqID_73551
atggcgggcggaattaagctcgtcggagctaaggaaaggtggctggccggtgagggagaaaccctaggtgacactggggtgtcacagccttccccccttaaaggaatctcgtcccgagattcgggccagagtcctcccggggtgaagcgaagggtgagactgataggaaaaagggtggtgattgttattattagggcaaaactgctcttcgaatgtcattctctttgcaacttcagaaggaagtccttttaa

SEQ ID NO: 30177 - DNA, 303 bp, Zea mays
  Peptide Sequence Number=SeqID_73552
atgtactacgcgtgcgggtactgcaaaaacggctcttcctgccgcttcttccacggcgtgcccgaggacgacgctgcggagcgagagatggccgtcatgcgcgccaaggccttggccgccgcgccgccgacgcagcagcagcagctcatggcgtccgcgtaccccttctcgccgtcgcctaagggaggcgtcagcctcagcttcctgatccagcagcaccagcagcagcaaagcgagacccaaagggcggcggcggcgggcatgctgctcggcggcaaggacatctgttcggaatttcgatga

SEQ ID NO: 30178 - DNA, 657 bp, Zea mays
  Peptide Sequence Number=SeqID_73553
atgggacctctatcccacaattatcttctcagagcagcgcacctcagtaatcctcttatggtggatatcagggttggtgttatcattagaaaagccggggaaactattaggtatatccaacttcaatcaggagcaaagattcaagtcacaagagaccatgaagctgaacttggtgcactaacaaggcaagttgagctttctggcaaacctgagcagataagcaaagctgaacagttgatcaaagaagttctggcagaggccgatgttgggtcatccggtgctggatctggaggccagaaatacaatgcaacacagcaaggtgctgagacgttccagatgaaaattgctaataacaaggtatacaccttgttctatttggacaagggtgggactgattattgggaaggtggtgagactataaagtccatgcagaccaattctggagcccgtattcagtcttcaatcagtgatagtggtctttctcaggatgctaagcaatgcagaaacctgaagttcctccataccgaagggtgcttgtccatcactaaggcgtctctaagagcccttgtgcagtatgccaagagactcgagtctcttactctgggaagctaccctcaaattgagcaacatgccatcttttccttactgatgaactaa

SEQ ID NO: 30179 - DNA, 1206 bp, Zea mays
  Peptide Sequence Number=SeqID_73554
atggatccgttcaacaataacgatgttcgacctccattaagagaattgtctagcaacacccttgaagatgattgtccagatgtggctataggcgacggaagcatcattgattgtactataccgtgtggtatcactctaggtggatgtgatgatgcgagacaacgtaagagggaaagagaaagaacacgatacgccatgatgagtgctgaaaataaaaatgaattgaagaggcgtcgtcagtcaagcaaaaatgaaaatgttgtgcaccatgagcgttcaaaagacgaaaattataacaaatgtgccccaataactaaggatgttgacatggacaaaatgacacagtctcctagaagacaacgacatgagcatcatgtgtcgtctggcgaaagacagagcctgatatcttgtcaaaaccagaaatttcaatctgccattagaagaaactttgctactgcaactagggatcacggaatggaaggcgaaagtacaagcccatgtccagtcactgctccacatagtgacataatgactgaaggagcagacgttgggatgcaacgacagataaccccgaatgtcaccaccaatgatgccgatgaaggtgtgctctttgtagagaatcatgacgaggatgtactttttgaagatgatgacgaagaagatggatacctattcgctgggcaagatggtgaatctattgaggatatcgagattgatgaaacccaagatgcctttactgtcaaccctgacgtacctgacttgtacgacaaggtgtatagtaacatacctgaagaaacacatttgctgagcactgttgctgactgcgattactgcaaagcgaagaagtttcagtatgaaccacctggattttgttgtcgtaatggacagattgatctagccccgttcgagacaccaccccaacttaggaggctgtgggagtgctcagatgctgatgcgaggcacttccgtgataacattcgattttttaacggccatttctcattcacttctctatattgttgccttgatagtatgactacaaacatggattgtggtatctacacgtttcgtgcacatggcatgatgtaccacaacgtaaggtcgttcggtagggaagttggggcggaacataaacaccttgaactctacttctacgatgatgatcccaacctcgagcatagatatcgtaaatgtgagagcacctag

SEQ ID NO: 30180 - DNA, 768 bp, Zea mays
  Peptide Sequence Number=SeqID_73555
atggttttggttgcattggagaggattgaacagcaagcagagctgacctatgatcaattgctaatgctggaggctaatctattttttggcgcctttgcctcctatgatcggcatagagacatgcggatggatattgatgatatgtcctatgagcattactcagagttgcctgatatcaagtgtgccattgtaaatacccatgtcattgaaccacagaaattattggcactggaggagagaataggctctgtgagcacagctctttcggaggagcagttcacaaaatgcctcaaaagaagcatatatagtcaggtcgctttagaagtcaacaaatcaaccgttgatgacatgaaatgcagcatctgtcagcattactcagagttgcctgatatcaagcgtgccattgtaaatacccatgtcattgaaccacaggccgcgaaagaatactctgagcagctaggggttgatgcttgcatcaaattatttgagcaattcaaatcttatgagggcctttactttttcttgggatcctatctgagctccaggacccagatatccatttcaagtatggatttgctaggagtttttccaactggccttgcaacttcaacacctgagacaaatacatctcagtcccaagggagcagtgacagcagtggtaataacaagagcaagagccattcaacagagccagttctctattcttacaaaaaggaaaggaaggtgaaccaaaatgttctcccaggtcttcgaactgaaatacaatag

SEQ ID NO: 30181 - DNA, 1038 bp, Zea mays
  Peptide Sequence Number=SeqID_73556
atggatatagtgatggaggaaggaaatgtcgatgttggcaatattgctgaaccatcgtatgaggttgtggctagaagtggttgttcagcacaattgtcaactaatgacacggatgaacatgaactggagagcgaggatagtaaggtcagtgttggtaatgctgcaaagcaatcacacgatgttgtgggagtaggcattgactgtattttcaatcatgctaaagtgtcaactgaagccgatcttggaccacaaccgggcaactggcgactggtgaaaccacaaactggtgccaccaaagtggaagaaatacactcgaagaaccatcctgtcagtctgcttgtcatagagcattcaccttttcttgcagaggtcagagaaacaaatagctatatttttcaaagaaaagaaacaaaaagaacaggtgtaaacatctcatacatgctgattcaactgctggagctcaactcagaagcagcgaatagaatgtggctggcagcgttgctgctcgaccgaagtgtggcatgtcgtctgagagtggaactaatggagcagaaggaagtggatctaaaggtgctgctgggattgcatttcatgccccaatcaacaaccgggccagaaatttcaccagctgctgtccctgaattgatgtccaagccaacggaggcggttccaccagctggatcaatggttcgttcaggcactgagttgggtcatgttgtttgtatttatgtgttcgaatccctcaccttgtttgggttcactggacatgcctgcttgctgcgcttcatatcggagatctgcgtgccgtcctcgctcttcaccagccgcttctacatctgctccgagagcgactaccaggacctgctgcgcaacacggatgccaaccagacgacgctcgacaggaacatgttcggtggccagcggctgcatgtctgtggcgaggtattggtaacccagatgtcctgctcccagcctattgaggtcaatggaactgggagcggagcacactgttcactcatcgcttgggttggaacctaa

SEQ ID NO: 30182 - DNA, 315 bp, Zea mays
  Peptide Sequence Number=SeqID_73557
atgaggtcaagaggcagtggggtggaccttgggggcctcgtcaatggcagaggagagctcggagaggaggtagaagcagagcagcgcgccatacacgttgagcagcaccggcgtggcggcagcgctgttccgggcgccgagacagctgtcgcgccgatggagggagggagtaggcgaggtcctccggctcccgatgcaggaaggacgaagcaggaaggggagcttgcagacctcggcaaattgcaggaagtgagcgagagaggaactgactcggacgcggcaccatatagcgacatcatccagcgcacgcattga

SEQ ID NO: 30183 - DNA, 1185 bp, Zea mays
  Peptide Sequence Number=SeqID_73558
atgaaggataatgagcttgttagagatatgtattctcgtttgaatctaatcatcaatgagctcaattctattggcattaataagctaggtgatgcggacattgtgaggaaaattatctccctgttaccacaacaaaaatatgggagcataatcactattcttcacaacatggaggacttgagtacaatgaccccgataattgtgattgggaaaatcgtggcttttgagatgtcgcaaaaaatgtgtctcgaagaggagcccacttcttcaaggctgtatgcttttgcatgtgatgaaagaaaaggcaagaagaaggctcccactccaagttcctcaagtgaagaagaggaagaggaagtagaaagtgatgatgatgaatataatcaaccatcatcctccgaggacgaagaaacaatccgacgcgtcggaaaggtagaggatcttctctttaacattgacagagaaaagcaaagaaagagaggatgcttcacttgcggggaaaatggccacttcaaggacaattattcaactatggccgaacccacaaagaggagcaaaggcaacgcgcccacaagtgtcaagactttggatgactcttctagcgaagaagaacccccaaggatgcgcagccaccggtcctcatcacattcatcacggtcatcacgcaagtgccttatggcaataggtataatgactattccatcctctattgatgatagtagtagtgatgatgaaggtgagggaaatccctccgtagatgatcttgcggaagccattaaatttttccaggatgtttgcactaagcaaaaggctcaacttaaaactttgaaaaataagttgattatctctcaaaatgattataaagctaccaatgatggccttattaaaaagaatgaaaaacttaaggctaagttagctagctctcaagaagctattgaaaatttgctagggaaaaaggaaattcttagcatacacaataatgagctaactactaagctagaaaacattggtaacaccccaggagcatctttagttgaaattcctgaaattattaagaaagatgcttctacttcttgttttgatttaattgataattctaacccctgcaaccaagttcttgttgagaatattgttgtagaaacatgttcaaatgatgttgcaatggagaatgagcaattaaagtaa

SEQ ID NO: 30184 - DNA, 756 bp, Zea mays
  Peptide Sequence Number=SeqID_73559
atgacttcctgcttcaagatttttaccaaacacacgacgatagcgaagggcggaccgacgagccaaggacatagatactgctccggcgtcctgctgatgcaccacggcgatgcgatgagcaagctcgtgcgtccagttggggagtcatcggcgagtgaggcgactagcaccagcacggccgaccggcgagcaaggtcaaactccgagctccatgggagatggggttcggcgattcaacggcggccgcgaagagataaaccagagcgcgatcttgagggacgcggcaagggaagacagagcgcggccatggagaggaacctcgagggagctgcgcgcgtccatggtgagctgggcgtcgagcacagggagatgggcgcgcgcacgggagatgggagctcggctggccagggcgcgacgctgggcacgccgggagaaaacagaagagcgcggctataccgcaccacctcaattaggggtggactcaggccaggccggctagcccacagtactgttgtctccgccgccacgatggcaagcatgaggcaacttttgagggtgcaggtggaggccataatggggggcttcacgtcatgttgcgccaggactgtctaccttgccagcctcaccggccccctcgctacagtgaaggtccacaatagcagcgagcgcctccacctcgtgttccaccaggagctcgacgcactcctatgcgtctgccacccccacatcgtccacctccttgccttctatcactag

SEQ ID NO: 30185 - DNA, 537 bp, Zea mays
  Peptide Sequence Number=SeqID_73560
atgaacaacaaagcaaagggtgaggaagaggaggccgtcgtgcgcgaggaagaggaggcccgccggaaacccttcctgactgtgcccgagctgaagcgtgaggaagaggaggtcgtcgtgcgcgagctgatgcgtgaggaagaggaggtcgtcgaaaacagcgtcgcctgccccgctccgactgctgtgccactcgacagagtgaggctgacagcagctaagtccagcctcgggcgccatgggaagctccgcctcgcccgacccagggctcggactcagcctcgaccccggaagacggactccgcctcgcccgaccccagggctcggactgagcctcggcctcggaagacggtcatcgcctcgcccgaccctagggctcagactcgacctcgacctcggaggagcctccgcctcgcccgacctcgggctcggacccgccacgtcacagggaaggccatcattaccctacccctagctagctcaggctacggggaacaagaccggcgtcccatctggctcgccccagtaaacaagtaa

SEQ ID NO: 30186 - DNA, 445 bp, Zea mays
  Peptide Sequence Number=SeqID_73561
atgaccgcgtcaaaaaaggctggcccctcggaagggttcgacagacgcctcagagcactcgggctccgcgcccactactggctggcccccgaagggttcgacagccgcctcagagcacgcagagcgagggatgaccctgggtacgttcgatacataaccaaggctcgggctacgctcccgagcgcggcccaatcatgcgcaggcgccaacaagtggtcccacgtggtcagccggtgggtgccagatgcattcgcgcgcgcagggaccctgactctccgctttaccctcgcgtacctcgccaacaacgtgggagtagagtcactgtcgccgagcgtgggaggacccagacctgatccgcacgattccgatccaaccgcccaggacacaactcgcccaatcagggctggtttggtggacatggaaatggaggggatccacaggagag

SEQ ID NO: 30187 - DNA, 585 bp, Zea mays
  Peptide Sequence Number=SeqID_73562
atggtcggagcccccgcaccgctcgggcgcgtgcgctcctctcctcatatacatgtctgtgtcgccgcctccctcttctcttcgcttcccgtgaaagcctcaacgacgcccgatctggcgttgcagtccaaccgcaagcctggcggcgtcttcgacgccgttgtcggtgtttgggacccgaccgcgcacccgggtggacccgggggctatctgtcccccacaaccgtcgagaagcgctcccaggagcgccaccgcgcgctgcagcagcagctcgcctccagggtggccgaccttgacgacacgcagatcgccgctgccacgggcgccacctactccgacgacgacgactctgtcgaggccactgccccgtgccaggagggattggtcaagaagcctaagaagcccaaggtgaagaagccgaaggtgacggtcgccgaggccaccgtcctgatcgacgctgagaacctcgtagcacacctcttcgagatctcggcatcgtacatgaatcaacaggacattcaactcatgtggtttgctgattactttggccgagcatttgcagctgtaggcgctccgaatgcgtga

SEQ ID NO: 30188 - DNA, 272 bp, Zea mays
  Peptide Sequence Number=SeqID_73563
atgaccgcgtcaaaaaaggctggcccctcggaagggttcgacagacgcctcagagcactcgggctccgcgcccactactggctggcccccgaagggttcgacagccgcctcagagcacgcagagcgagggatgaccctgggtacgttcgatacataaccaaggctcgggctacgctcccgagcgcggcccaatcatgcgcaggcgccaacaagtggtcccacgtggtcagccggtgggtgccagatgcattcgcgcgcgcagggaccctgac

SEQ ID NO: 30189 - DNA, 342 bp, Zea mays
  Peptide Sequence Number=SeqID_73564
atggcccgcgcccgcgcctataaagcacccagggtccttgaccgtacccctccgcacacgctcgacctcacaggatctcaaattcaccggcgtttgcccgtgcacgggcgtgtcctcggccgcccgatcccctgccaccgtagactggacaacagaacccttcccaaccccgtccgaccctcggaggagactgagcacacctcggtgaagctcctcgagcgaggaatcggagtttgcttcgccggagaggccagtccatggtcgccggactccacccgaccgccggcgagcgtagaccggcctctacgtcaccccgtgaagctcactgtgccattagattga

SEQ ID NO: 30190 - DNA, 171 bp, Zea mays
  Peptide Sequence Number=SeqID_73565
atggcagtcggggtcagtgaggcattgtacgccaaggcggtgagccctgatctgctgacggggaatcgatggggacagttgatgttccttggaggacatggttgctggagtgacttgaccgtccatcttgccaccgggttggactgtcgagtgggaccccgcctcggctga

SEQ ID NO: 30191 - DNA, 408 bp, Zea mays
  Peptide Sequence Number=SeqID_73566
atggatcctagcccacatatgctatgcattcggttttgcccccagaaccggatggttcgtaccattcaaaccactcggatcaacaccaactacatccctccgccacgacaagttcctgtctacccaatggtagtagaggaaatccctgtggatctccctcgcattcgtgtggagaacggagtcattctagaggacagctcggaggagtttctgcctacgcccaccccgttggcagaatcactagccttcgtagctggatcatcagcttcagcaccgccagcaccagcaatccaagcccctgcgcccggaggtgacgacccgaacgactctggtgacgatgatgaagacgacgacgaagaagaagaagttgaggaaaacatcaacgatgaagccaacgaagaacagtag

SEQ ID NO: 30192 - DNA, 426 bp, Zea mays
  Peptide Sequence Number=SeqID_73567
atggagtttgctcacaggtcactaaggtcagatgaccgagaggtggactggagagagttcaaggcagctttcagggggcaccatataccagccggaattatggaccagaagctcaacgagttcctggcacttactcagggcaacaggacagtgttgcacactaagctccgtgaccgtctcaacaccgtcagggccaacagctataatgagttggtcaacatggccatctcccaggaggactgcatcacagctcgtcaggcagagaacaaaaggaagacccccgtggcaggaccttcagctcagccacaacgattcaggattgtgtctgacactcagaacagagggcctcagcagaagcaagggcgatgggtgatccgaccacagcagcagcagcaggcacccaaccacacccagtttctagcttag

SEQ ID NO: 30193 - DNA, 552 bp, Zea mays
  Peptide Sequence Number=SeqID_73568
atggccaagatggaagctgtggaggtggacgaaatccaagccaaaaccactagccccttccatcctaggcgctatcttaccaccctcggtagtctcttcccatcgatggcgcccttcaattccccatctggccgtctgagaaataaaggcagagaaaaatataaatctagctgtaatcttctcaatgcaaagccaggaaacggtttaaatgcaaatagtgatcctgcaaaaccaccttccattgaagtacctgcattgtcattagatgaattgagggaaaagacggatgattttgggtccaaggctttggttggtaaggggtcatatggaagagtatattatgttgttctggaaaacgaacaacatgtggctgtcaagaagcttgatactttagcagatcctgagcctgataatgaatttctagcacaggaagaaaaggtgttgcaggtgcacaacctggacctgctcttgattggatgcaaagagtcaaaattgttgttgatgctgcaaaaggtcttgaatatcttcatgagaaggttcaaccttccatag

SEQ ID NO: 30194 - DNA, 864 bp, Zea mays
  Peptide Sequence Number=SeqID_73569
atggtgcggacgaagaatgtctcattatcagggggaggcaacgatgaggaccctcctcgccattttaggcaggtcaaagggaagactgtttacattgagcagcaggaggacaagaagaagcgacctcagagggaccctgcggctgctccactcttcagtaccaggactcaggagtccttcttcagggcacaactgacagatcagattgctttgcaagcgcaccgacttttggatctacctgcttttctgttagccaccggtgccgactcagaggctcaccttacttatctgccaagtctgctttcacttctgaccgcgagtggcagatatattgaggagtgggttagagtgttctatgccactgtttggattgaccctgaccatcagtggatgaggttctgttttgagctagaggatgtcactctgcatgccagtcagattagacagctctttggatttccagagttgacgactaggctccacagccagtgctacggcactttggatcctccctatcgccctcacggtggagttgcacccgctacagctcacttcactaccctgttcagaccgcctttcacagatgggtcacgacgctctcctgctgacttcactcctgcagcgaagtttctatatgagctgatgagacgtaccttgctatccaggatgggatacagggaggccaccacacacattcaactatggctacttggtgctttgatctcacattcagagttcaacgtggttgatttccttatttgtgagatagaggacacagtgttggatggtctccgtgctcgtcgtcagctgtcgtatgcccattacctctaccacatctttgcgcagctgattaggcctccttag

SEQ ID NO: 30195 - DNA, 645 bp, Zea mays
  Peptide Sequence Number=SeqID_73570
atgtctgctcacccctctctgtctctctgcgagcagcagcatgccggagaagacctgtgtcctcgacgcgcgccagtggaggttgtggagcatgtcgccgaggtgacagagaagttggctgcagatgcggccagttccatgccagagaatggatccctgcacaaggttgccgtggaggtggagtgcgttgctgaagcgatggataaggatgcacataaggttgaagcagtcaacgataagagcacatatctgaggcatcaattcaatttgacctccaccgacgccgtgatttcgccattgtggctagttcagatcggtcctgaccagattgaagctctgtatcagtatgctattcagatgaccctagaactcattcagtttgatgccatgtttgatccttatgttaaatgtcggtctccaccaaagatacttgtcatcttgaatcctcgatctggacatggtagatctagcaaagtttttcatggaaaagtggaacccatatttaaggacttcctagcgatgtcactgttgaggttggggatgtgtctttccaccttcacaagttccttttactttcaaaaagtgcctttcttgaatggtcaattgaagaaaattctgaccaagaagaatgcatcatcaaactaa

SEQ ID NO: 30196 - DNA, 588 bp, Zea mays
  Peptide Sequence Number=SeqID_73571
atgggtcggcgcgagacagagcacgaaggggggaaagaacggaggagacaggcgaaaggggaaacccgcggccttcgtgttgtcctgcgcctaggtcggccctgggtcgggcgaggcggaggctcctccgaggtcgaggtcgagtctgtcttccgaggtcgaggccgagtccgagccctgggtcgggcgaggcggagaccattgtctgagaccaaggctgagtccgagccctggggtcgggcgaggcggagttcgtcatcttccggagccgaggccgagtctgagccctgggggtcgggcgaggcagagtttcgtatgacactcgaggccggagaaggggactgtcagcctcactctgtcgaatggcacagcagtcggagtgacgcaggcgacgctgtattcttgtcaggccggttattggagcggcgaagtgattgcggtcacttcggctctgtagatcgaagggcaaaggtcaggataaggtgtcagaccacccttgcattaaatgttcctgcgatacggtcggttggcagggagatctggccaaggctggttgtcggggaagatcgggcctcgggcgagacgtga

SEQ ID NO: 30197 - DNA, 1482 bp, Zea mays
  Peptide Sequence Number=SeqID_73572
atgagatctgttgatcgccctccaactaatccaaaaagactaaccattgagtcaagtcaggagaaattgaatatccgctgcattccttatgatgttattgtctcaacttggataatgagcgatcggcagcgcgatgcagtcgctaggttgggattttccagtatatttgatttgcgaactgatgccttagagagcagatctctcatcaggtggttgatggataaattggatccacatgacatgaccatacgcccaggggctagcaaggaactgaagataacaagagagacggttcgtcttattttgggtttgccatgtgctggagggggcagggagtttactgattggtatggtgaagtggatgctgctgcaaaactgagacatgatctcaaaaattgtaaagaagaatttgatgttgtcaagcttcaggacaagatagtgcttggcaatgatgatgagttatcaatcagatgcttttttctgattctattcaatcgacttctttttccatctgcttcatggggcattacaaacaatgaggtactaatgacttcaaacatggcccggatgactgatattgactggtgtcaactagtttacacggatttgtgtgatgctgccacacgttggcacaaaaggaacaaaacaaacattacagcaacaatatatggatgttcactcattgttctaatttactatcttgatcacttacatcaccctgcatctcctgataacaaatatgatgttacaattttaattgctgctaacagttgtaactgggctttatacagtttcgtagccgttcaaaaacatgttatgtcattgcaccagaacggcctgtttctgacgttttcaacatatatgtgccatcatcgaccaatgtttgatgctcatgacaaggaggtggataaatactgtgattctcttcagctgagccatcagatgattgttttgaagcagattgaattatctgaaatctttggtgaaatgatcgatgaagttctgagggctgcaacgcagcgcgatacacagcaagaagtttgtgatgatatatatccccccactacctcaatgcctccaacaaatgctccagtatccactccacctgttccaacccctgataatcagcaacacgatcaggaaatacatgttcctactgatgatatcaaagtatcagaacaggaaggacaaaatattgttaaacatgatactcccgtatctggtgcaccacagtttgacaaaacctcattgacagaagcaactactgaacttgttgcaagggatatttcctctaaatctgcagttgctgaacctccccacgtatcacgcgaagaatgtgctcgcaaactatttaagttcatttttttaggacaactagatccgagcatgtctatcattgattttggaggatttggaggttttgtcctggatgttgtccaatcgtttggtcctaataaatgccttgagaaccttttcatgtag

SEQ ID NO: 30198 - DNA, 1566 bp, Zea mays
  Peptide Sequence Number=SeqID_73573
atgtatttcaagttggattacctggaacttctcgggaaagcattggctcttgaatcgggctccaatgctcggagattgaaggagctcagctggattggagcggcgctggattggagcgacggaaatcgcctggcaagtcgcctcggccgcaaggaaagacgccgcgaccgctggggtttccttcttttcggcgcgggtttgtctctgttgattgcgcgaagacggttttggaaaccgggaaacgggggagacgtggctgggctgacgacggaaaggggtacgcccattcacgctgagattgcagcggctctggcagttgacaaaggctcactgatagaaattgaaaaagtatatgagctcaaacgctttcgtgtcacgccttccagaaactattttaaacctattgacaacaacttcatgatacaattcactctgtacactcaagccaaagttgtcaaagatccaccacaagtgtttccaagatatatctacaagctcacatgctttgaaaacatagaagataacattgacaatagaacttacttgattgttgtccttggaatgttgacacaaattaatcctccacatctaattggctacaacaactcaaccatcatcagagacatcttcataaaaaatacaagtgacatgtctctgaaaattactctttggggaaatcaagcatcaagcttttctatcagtgatgtttacaaccaaagcaacaaccagcctattgtcatactgctcgttggatttcttgctaaacgattcaaaggtcaaccatacctaagcagtactacagcaagctcatggtacttcaatcctggaattcctgaggcgcagacctactacaacagccagaaggctacagatgcactattactatctcacgcattgtgcaaaatagcaaatggtggtacccatcttgctttaggagccacaaatcttcatctcaaactggatatcactgcacatcatgtggctgcacagatattaactttagataagctcagcttcattgctactgatgggacatgtgaagcagagttcttttgttttgatagcatagccagaaaaatagtaggaaaaccttgtgacaaccttgttacagcagttacaacttctcagggtcccccagcagccctagccgctattgtgtgtctgaaatttacccttgcagttgccatcaatatgtcagcctactcggtcacaaatagagtcttctctattctgtctattttaacaaatcatggaagacaggccttcataccatctaacatgcctagccatcctcaacaagagttggatacacaagatgaaatacctagccttccgaccacacaagactctccagcaacatcaatggcgaaactatctacctgtagcaacgaaagaaacgagggtgatgaccaacacataagtgaactcaacaatgaagagttatcgtcgccaccgaaaaggtatttgcttattgtgcacctatcaagagcaccatcacttttggaccatgaatgcttccctatagatatgaaccctatcaagagcaccatcacttttggaccatga

SEQ ID NO: 30199 - DNA, 381 bp, Zea mays
  Peptide Sequence Number=SeqID_73574
atgcaagtgggagggtcccgcttgtcattgaccgatgctattttagcaaagggaagcgccatcaccctgaagaatgacgaagaacagggtaatgaggaatctggtaaggaaaaatttaaggtgtggtggccatgctgctacatcccttctttccgaaagcaaagatcagcacaaaaacaacaaaagttaatcacaaattcaccttgggatcttcccttcctccttctttcttcctccctccaaactccaattgagatcgcagccacagacggagaaccacgcaggagggctgcaccttggaggggggaagaaaatgggggggcggctagggttttgggtggtcatgactgcaagggtttgaggaggaagaagatgagatag

SEQ ID NO: 30200 - DNA, 213 bp, Zea mays
  Peptide Sequence Number=SeqID_73575
atggaggcgagcaggaggggcggccgcgacgcagggaggaagaggccagggtggggcggtggcacgggtagacgcgtggggaccttaacgcgcttcggggtctgcgatgacgcggcatcgtcacccgcactcgaacccaccgcctcgtcctccgtgggcgcaggcgatgtcgccgccaccttatcctcctcccccgccgctggccgcagctag

SEQ ID NO: 30201 - DNA, 276 bp, Zea mays
  Peptide Sequence Number=SeqID_73576
atggataaaaagaacactgttgatgctagcaacagcaaaggcactgctaagatgactgcactgcagcgtttgatgaaagaggaagcagagctgaagaaacagctagaggcttcaaagctccgaggtgaggagctgaaggcccgcgagaagaattttgctccagaactggtgcgcatgatgaatgccgactttgaggggataggtttggaggagctcaagatttaccacgacatgttagttgaaatatggtccatgattgatgaccaactcaactaa

SEQ ID NO: 30202 - DNA, 1026 bp, Zea mays
  Peptide Sequence Number=SeqID_73577
atgcaggcggcatgcaaccgcaccaagggggcgcaccctttcaacttcgacgcgtccagcatggaggcccaggcccacacgtcatggaccgggaaaggggataccccggaagggatccttctccgcgaaggaaacgggccccgagcccccctactgatcagaggttcgaaggctggcccctcggaggggttcaacagccgcctcagagcgctcgggctccgcgcccactactggtcagaggttcgaaggccggcccctcggaagggttcaacggccgcctcaggccactcgggcttcgcgcccactactgatcaggggttcgtaggctggccctcgaagggttcacagccgcctcagacgcagaccaagtccggccgcgggcgccataggaaactccgcctcgcccgacccccagggctcggactcggcctcggccccggaagacgacgaactccgccttgcccgaccccagggctcggactcggcctcggccccggaagacgacgaagtccgtcgggcccgaccctagggctcggactcggtctcggccccggaagacgacgaactccacctcgcccgaccccagggctcggactcagccctggcctcagccgacggtctctacctcgcccgacccaagggctcggactcggcctcaacctcggaagacagactcgacctcgacctcggaggagcctccgcctcgccctacccagggctcggactgaccacgtcacaggaggggccatcattaccttacccctagctagctctggctacggggaacaagaccggcgtcccatctggctcgctccggtaaaacaaataatgatgacgcccccgtgctccatgacgacggtggctctcagcccccttacggaagcaaggagacgtcagcaaggactcgacagccccgacggctgtccttccaccaggctccagcgctcctccgacggccacgacatcacacaaacagggtgccaaaacctctccggctgccacgacggcatgtacttagggcactag

SEQ ID NO: 30203 - DNA, 372 bp, Zea mays
  Peptide Sequence Number=SeqID_73578
atgcggctgcgtggcctcgcgtcgcggctagggatcaagagtagagatggcaatgggtacccgctacccgaaacccagtgggtttttgctctactagggtatgggtttgggtcaatttctctacccatgggtttgttaatgggttcaaatggaaacccaacggtgggtatgggaaacccgttgggtacccgaaacccgcatgggtatgagtttgggcaaaattttatacccgtcatgggtatgagttttttagcgggcgtattttttcttcgcgggtatgggtttgggcaagtaatacccagcgggtttttacccattgccatctctaatcaagagggtataagcagaaatcatcttctattaaaattttga

SEQ ID NO: 30204 - DNA, 201 bp, Zea mays
  Peptide Sequence Number=SeqID_73579
atggaaggagatcgcgcaccggacagctacagtgactgttcggtggtgcaccagactgtccggtgcaccacccgacagaaggatcacctattcaccccccctctaggtgctctcactattgcaattacatctgatatttggagtggtaatgctaaggaggactatcttagtgtggttgctcattatgtttctaaggactag

SEQ ID NO: 30205 - DNA, 627 bp, Zea mays
  Peptide Sequence Number=SeqID_73580
atgggcccgactgtggctgacccggacggtccgcgctcgcgagcggacggtccggacatgtgtagatcggctggtttattgccgatttgcgtttgctcaagctttaagagattggagttcgttggtgctacttacatttggggtaatcgtagtaggtcggagcgaagccagatctgtcgcccgttgtcgaacgactttgttgttcctgtccactttgaagtcagccaggaacttcgcctttgcttcttggatcaactgctcctggcgctcctcgaacagaagttgttcttcagccggcaaggcttcccatgtcggtgtgatgatattgctggtggaaaacctcagagctatcttttgaaccggccattgagggccgatttgataggtctagatgtgttttccccagcggagtcgccaaaaagtatgttgacgcttttttggagcgccaaacactcaacaagaaccgtggcggtgccttctgcacaggggcggacggtccgcgcgcagggtccggacggtccgcgacctggtgcgaggcgcggtagtgctctctgcgcaagggcggactgtccgcggcctggggccggacggtccgcggcctggtgcgcggctagggctcctgcctga

SEQ ID NO: 30206 - DNA, 630 bp, Zea mays
  Peptide Sequence Number=SeqID_73581
atggatgctcaatatgatgtgactcaagaatggcttgatagggtgaagatagcaaggaaagggcttcgaggaactaagcgaaggaatcgtcgtactataaagggggatccaaaaagaagtctgccagtcagactggcaaacaggtcgctaggagctgtcaggggcggttcaaccgccccccctgggcggttcaaccggtgttggtcaactttgaccagtctgcggtcagtctgcgcatcagtctgccagtcagactggcagacaggctgccagctttggttctacatcgagttctttgtggattcattactcttggagcttctagctcctagacgactaggtgtctcttatgttgatcctagggcaatagatcttgccatgagaatcgccgaaaggatgttcctcaaaatgaaggaagatgaggcgaagaaaagtattgaagaagaagaaaatgatcgatggagaccaaacgacgaatccacctcttcacaaggttcgtctttcaaatccacttctcatatgtgctttgtcgctaatgggagtgatagtgaaagcgaaagtgaggatgaggatgaacatgaaagtgatagtgaagatgagaatgatcttcaaaaattctcgctcaactaa

SEQ ID NO: 30207 - DNA, 183 bp, Zea mays
  Peptide Sequence Number=SeqID_73582
atgaacaagaacacaagagacacaagatttatcccgaggttcggtcacaccaccaaggtgccctacttcctcgttgaggcgcccacaaagagccgggagagaaaaccccagctcaactgcccggaggcaagttcagctggtgtatggtcaaagaggttcacagctgaagttgagttcagctga

SEQ ID NO: 30208 - DNA, 159 bp, Zea mays
  Peptide Sequence Number=SeqID_73583
atgacccagctcttcgagttctacaaggctgaagattctgagcgtctgtttgatgatgatgaggaggatggttatgattatgcttatggtaatggtaaagaagaaggcgtcgaggtggatctccaggagttcaaggacttcgacgagttcgaggattag

SEQ ID NO: 30209 - DNA, 159 bp, Zea mays
  Peptide Sequence Number=SeqID_73584
atgacccagctcttcgagttctacaaggctgaagattctgagcatctgtttgatgatgatgaggaggatggttatgattatgcttatggtaatggtaaagaagaaggcgtcgaggtggatctccaggagttccaggacttcgacgagttcgaggattag

SEQ ID NO: 30210 - DNA, 768 bp, Zea mays
  Peptide Sequence Number=SeqID_73585
atggcgtacttcttcagtggcttcgtcaatttgcctctaaagtggccttcctcttcgggcttcgggcctctcgaagagaaagggtctcctggttcggatccagcggctgcagagcggcagcccctgtcgctgaagctttcttcggtggcatggcgaagaaacattgtcaaatcatgtttttgggggccttcggaagccgaaggcccccaacaagctgctatcaagaatgtccgagaaaagtgcaatgtggaaatcacaaaagacaacatcatgtcaaggaacaagacatttgacaagcaccacactattatcaatggtatgctagaaacaagtggctttggttgggattggaacaagaacaagatatccgtcgatagtgattctgtatgggaggcttatgtggcggaagtttcagttttctattgttacactatcatcaatgtttgcatgaaaaataaagaagctaatggatacaaacacaagacaatcttatactgggacttgaccagcttggtgtttggaaaagatcatgcaaatggtgaagcgacaaagaccctagctgatggtgcgagagatatgagtaaggaagagggaaccggtaaagatcttacttcatcaacaacctcaggaagcttgaagaggcagcggtctagtgattccttcacctcaatgatgccggagaaattagacaagttcactgaagctattagggatgaagcaccaaaagggccaacttctaaagatttttttagcactttggaggatatt

SEQ ID NO: 30211 - DNA, 459 bp, Zea mays
  Peptide Sequence Number=SeqID_73586
atgcgcgcgcccccttctctctccttttgtctcatttgtttttcccgcgcaacaactccctctccctctcttccacctctctctctcccacctcgtaccctaggtgatccggtgacggttatcgccggatttttggatccccaaggtaggctccgcctcctattggaccaaagggaggaatgggagcgttccactagcgatattctggaggcgagaagcgagaccgccgaagctcgcactcgcgttgtgtcaatccagaatgcttatgaaaacttggtcggtgcggtgaggagggacacgaagttggcgacccttacccatctcgagagtgcaaatacaaactctcatctccgcatccttgggcgagggaaagcagttgccgaggctcgagttgtggctctcgaggaagagttgaatggtcgaaccaagaaagatgagaagctcctagccactctatag

SEQ ID NO: 30212 - DNA, 276 bp, Zea mays
  Peptide Sequence Number=SeqID_73587
atgcaacggaaattgggcgtcgctgaaggggacttcctcgtggtgcagcgccgctcggaggagctagagagggagtggcttctcctgtcgaaggtagtgaatgtgatgcaagggcgcttcggggtgcttccctcgcctgagtctgaatcgttcatctctcgcctcgaaggcttcgccggggggattgagctaaaggagctgagcaaaggctattacgatgcttggagtgattcagacttcgtcggcatggtgaagactaccgagccttttgcctag

SEQ ID NO: 30213 - DNA, 507 bp, Zea mays
  Peptide Sequence Number=SeqID_73588
atgcaggccaggtctagtcggctgccctcatgtgtgggttaccatgtgtgttgtataaggactgatagaattacttacattgttgcatcatggggatgggctggaatgaacttttctgcaggccgcacacccagagaaggggcaagcaaagcagcttacaagatacttaaggacttgctggactgtttccctagagagattgctactatcatgcgtggaatctttcctaggggtgatcctttcaaccttaagtgggaccagccaaagggtagagctctgacaggaggtgacagcgagcaacaacacagtgatgtcgtagcttccagcgctatgtttgcagttatgcaattgtataatagctcagagcgcaatttgggaatggtcaacggttctatcgcccttgctcagaacaagttgtaccaagctcaggaagtgcatgctgcagagttagctcaagtgcaagcagaattggccctagtcactcttcaaaaggatgaagtcgtctag

SEQ ID NO: 30214 - DNA, 264 bp, Zea mays
  Peptide Sequence Number=SeqID_73589
atggcaaaaagcgtgccaaatgagctcggggtaccttcagactcggatcagaaccataacgtgaaagcaagcacaaagaatacgaaggttggcgcaggaccgaagctatgcgcaggggagcttcggcatgttagcagaaaaaggaaccgacttaaaaggaaaaggctattcagacctcgatgggttactatagagtcattagcaaatgtaaagggcatgggtgtaattttacatgggctgcgtctcgtgcctataaatagatga

SEQ ID NO: 30215 - DNA, 279 bp, Zea mays
  Peptide Sequence Number=SeqID_73590
atggaatacacaatctctttgccgtttattttttggcttcaccgcttatttttcggtgtatcggcgctgacttttcgctgttgtagtggtggtgaaggtgggggctgtggccatgatgatgaagctgaggtgcccgatctttcggcgagtagagataattccgatttgtcggaagatgacccttgcgatccgactacgacgagcaagcccgaggcgccaatgcaatcgctgaaccaactccctgtggttaccgaccttgctgatgcgagatcggcctga

SEQ ID NO: 30216 - DNA, 201 bp, Zea mays
  Peptide Sequence Number=SeqID_73591
atggcgagcagggagaggaagaagccccggccaaggagaagcagcggggcgcgcggaagagaggaagctgggcgcggctaccaggaagcagaggcgcgcgccgagggcgaggtgacggacggcgcatcgggaatgggagctcgaagccgagctcaaccacacgggtggtgtttcctgaacggagaggtgctaatcagataa

SEQ ID NO: 30217 - DNA, 174 bp, Zea mays
  Peptide Sequence Number=SeqID_73592
atggtgggtacaagtgcggtcactgcacgacggcagtcggggtcagtgaggcattgtacgccaaggcggtacctccttaatttgcttgatggtgtgacttggccttcatccctaccaccgggacagatggccgagagggttattgcttccgcaggagaggacctggaggagtag

SEQ ID NO: 30218 - DNA, 276 bp, Zea mays
  Peptide Sequence Number=SeqID_73593
atggccattggaagactgctgtcgcatggcgcaccggacagtccgacgaccgttgcgcgcgaagtatccgttgctccgctggcacaccggacactgtccgatgacttaccggacagtccggtgaattatagcggagcgcccttggaatttctcgaaggtagcgagttcagcttcaagttccctggtgcactggacactgtccggtggcacaccagacagtccggtgcgccagaccaggttagattaagtgagaaatgtaaattatgtgacatatga

SEQ ID NO: 30219 - DNA, 420 bp, Zea mays
  Peptide Sequence Number=SeqID_73594
atgacaagggaagccagccccagaggtcacagtgcagctcacaatcttcggggcaacaacaaagctccttcaggccgccagctccaaggggcagaggcgccaggagcttcggaggaagatttggggatcaacccacgaaaatttattgcttattctatggtgaagacaagggtcacactacaagaatgtgtcgaatcaccattcagaagcagaaggagatcgctgaagccgaagcaggacttacacactgcttcgtgccactccccctacataccagaatatctagccattcataggcttcctggccacaactcccacccccaccaccactacaaccgacctattctcgaggccagccagaagggcgccaataccctcagcagcaacgtgaagtcagggaggaatctgaagcttgcatag

SEQ ID NO: 30220 - DNA, 1380 bp, Zea mays
  Peptide Sequence Number=SeqID_73595
atggtttgtgttgggtccaaggcaattagacccaaggggagcacaataaatggcttgggagatggagctttagacgatagctcacacaagaagaggacaaggaaggatacgagcgagaaacacgggaaagggggtcacagctcaagtaaaggaccttctgtagggaaacctcggcatgtgaaggataggaagcagaggaaagatgatgggaagaaagggaagggtcgacgaaaggaccatcattcaggaagctccgtgatggtgaatcccaggacgaagaacctcaacaatcaggatgcggtaccatcctccgatacatcaaaaccagtacaaaatgttcttaggaaaagagttgatcctgaaactgcaaagtactttatggagatctcaaacctctttgataacaaggagattgattttgaagagcgctcaactatatgcgctaatgccttagaagaaactagagggaaagagcatgaacttgccactgatgctgttataagccacaccttgcaggttcttatagaaggctgtgagttagagcagttatgcacattcctacgcaattgtatcgactatttttcggtcattgccgtggacaaaaatgggtcgcatgtggctgaagcagctctcaagtcactcgcaacacatcttgaagatgaagcctccagggccatgatagaagggatactgaacaaaatatgcaaggttattgctgtggatgctgttactgtgatgtccagctgctatggttcacatgttctccgcactctactttgtctttgtaagggtgttccatcagattcactacaagacttccatactactaagagatcttctgttctagctgagcggctcagttgtgggacaaatcagtctagtcgacatgttccaaagaattttgaaaatggtttctcaggcatgtttaggtcttttgtcagagaaatgctacataatgcaaaagctgacattgcaactttacgagttgacaagaacagtagccttgttttacagactgcactgaagctatcgtctggtgatgataatgaattgcatcatataatatcaatacttcttggttatgatgaatataaaactgtacagacgagagattacagtgaaaaaatggacgagattgttactttacttgaagaaagtgcttatagtcatctcttggaggtgattgtggaggttgccccagacgaattgcgcaatggtatgcttgcacgtagtctgaagggtgcattatttgcaatctcatctcaccactgtggtaactatgtggtgcaagctttcatatcatctactaaaacctcagatcagcatctcctcctgagcactgagtacagtggggacaacctggggtggggtggtttgtaa

SEQ ID NO: 30221 - DNA, 717 bp, Zea mays
  Peptide Sequence Number=SeqID_73596
atggctgaattcaaaaggcaggaactgccatactcatacctaagaacattttgtactggttttgatgtatcggaggatgctgcttactctgaaacgagacagagaggaagcagaatcagcattctgaaagaaacaagaatcccagagaacggcaaccaggggcggaccacatggaaggaaaagaaggggaggaatacctggtgggtgctcgtcgccggagaagagaccgacgaaggcctcggcacctggcgcagggtggcggcggcgaaggccttccacaccgttctagccgagatctaccggataatcagcaagaagcccctgtcttcggaggagtctggtttggggtctgtgggtgcgtcagttcgtccggcgcgcgaggaggaggaagagcagcggatgcgtccggcgcgcgaggaggaagagcagcggcaggaggaggactggagtgtgtctgtgcaggtgcagctggcccggcagagaggaaaggaggaagacgagtcacgccgtcacggaatttgggggcacgccatggagcgccgagctgagcagtggcgactggcggtggcggctatgcttgctgtgcggctgtgcctgggcgaggggcgagggcgacggaagactgcaagtggaagagcagtggccgacgacaattgggttgtggacttgtggtggcctgggctgcttgctgaaccatgggccgcccatgagttgtga

SEQ ID NO: 30222 - DNA, 273 bp, Zea mays
  Peptide Sequence Number=SeqID_73597
atggccgttggaagactgctgtcgcatggcgcgccggacagtccgacgaccgttgcgcgcgaagtagtcgttgctccgctggcacaccggacactgtccggtgactcactagacagtccggtgaattatagcggagtgcccttggaatttctcgaaggtagcgagttcaacttcaagtgccctggtgcaccggacactgtccggtggcacaccggacagtccggtgcgccagaccagggtgcctttgggttgtcttttgctctctttgtttga

SEQ ID NO: 30223 - DNA, 204 bp, Zea mays
  Peptide Sequence Number=SeqID_73598
atggagtacaatggatcaagcagtctcattagctgcgagaagcagacgattcggatcaagtttttatccttgcaagtgaccgcacttgtacccaccataaccggaatgggagaccacgtctcaggtcgcgtgaggggcaaagtctactgccaggttcaatcaggatttaataacattatgctaaaggaagaaaaactaaattaa

SEQ ID NO: 30224 - DNA, 525 bp, Zea mays
  Peptide Sequence Number=SeqID_73599
atgccatcggcagtggccacgcgaactaacgcacctaggccaactccgagctactctaaacgtgctagagattcaagcgaaacatgggaaggagaactcaccgaggatggtggtggacaccgagctgaccacgacggattgcgagtctgcggcggtgttgagtcgacggcgacaaattccggtgccgccggtggcttgtcttctgaaattcggttgcggccaccttcaacacgcccgaaaggagcccctgggttccttaccccgagcacggtcgtcggtctgcgcggcgtaatggacaaggaagggaaggatgcgatggcggctgcggctttatctctccacaggacggattggaacgcgtggcccggcttttccgtcaacgacgcgcccgccatgcgcggtgagttcgttggcgggcgaggtggagcggttctggcaagtttggcccacatgccagagaacaaaaaggtaacgggagtgcgcggtaatagtgctgacgtgtgggacccacagatcggtcggtga

SEQ ID NO: 30225 - DNA, 279 bp, Zea mays
  Peptide Sequence Number=SeqID_73600
atgggcttgcagaataacctcctgggactagtaaattgtatcacatttgagtcccaaaggatcaggacgcttcagaagggcagtccttggtgggatgtgccgagtcttctccatggaaaagacaatagaaccttcgctgttgtggactcggcctctgcctctggtgtttccgccgcatccctgttgcgcagggtattcgtggcgacgagcagtgtttctagtctgctgctgattagcgatggtgtgcacttgggattggttacggtgttgtcggtctga

SEQ ID NO: 30226 - DNA, 243 bp, Zea mays
  Peptide Sequence Number=SeqID_73601
atggctgaggtttccgtatctagaattggaaacccgacgaggctggacacgacaacaccatcgtgcaccggtgacgatcaccgacccgatctaccgctcacccgcggcccagatgcccagatggtcgtgtggccgcccctcttcttccttttctcactgctcacggtgacggtggctcaccgaatgcgcgtcgagttgcgcggacgggtaggaggggatgcttttgtggtcgaccggggttag

SEQ ID NO: 30227 - DNA, 327 bp, Zea mays
  Peptide Sequence Number=SeqID_73602
atggcgcgtacaaggaaaactgcacgcaaatctactggacctcttggcgtgcctcgtcatcagctagcccccagacatgaagagagtagtagcggtagcaatgacccaatcggagacttagaggccaaggtggaacaactcggacagagctacgtcaccggaataggatatgggcgcaggacagccaacatgccatcacggactctggccgaggctatcgctgccaacccgccaccagtaccaccaactttggccgaggctatcgctgccttggtcaatgctactgcggataatacacgcttcttgcgtgagatggcgggcaattag

SEQ ID NO: 30228 - DNA, 420 bp, Zea mays
  Peptide Sequence Number=SeqID_73603
atggggtataacaaggacgtacacaccattaactctacccacacagtggcttacaagtgggaccaggcgacccagggtggttttacatgggcccaccatctcaacaacgcgtgggtggcgacagaggccttcgtgctccatgcgccaggtctttggcagttggtgaggcctttgccattcctagctctgatggggaccgataaggctgtcgcctgcttcgtaaacaccctctgtctcagggccttcgctccatcagtctttgtcttccttcgcttttcctttgtcatgattcatccctatcctgtaatagtcaaggcagggggcggtatgacgaaccaacatgcaggccagagtgagacaattaatcatcgaagaggaaaggcaagagcactggagaaggaaattgcagatatgcaatga

SEQ ID NO: 30229 - DNA, 1065 bp, Zea mays
  Peptide Sequence Number=SeqID_73604
atgaagcgcattgttaggagtggctgtcatgtggggctattgttagggccaaagctcgcggtgtgcgagaagcgtctcatcgtttgcatcgaaggtgcacctgccaagtgttcggtgaactgcctgaacgccttcggtggcttcacggcacttgatacggagcacaccatcgtcgacaaaatgtccggcatcaagcctggcctcaccacatccacgaccatctatggtgctcccatcttcgaccaatactgcgataaggatctcggtggcaacgccatggagctcatccagcgcggccccatcggcatcgagcgcatgaacctctgcagcaccaccttcgctaggctgaccaagccagaccacgacgacgacctgtgctgcacaggcatcctcgacattcagttcgccagacggttgccgtctgccgacaacgaacctgtcttcaatggagagtcgtcttcctccaccactgcgccacccagatttccattggacctagagcaagtggtggacgacctcgttggtactgagacgttccaattcagccacgaccttctcttcttccacgccagcgtcgacaacgtgtgcctcaatgacaccgtcaccgatagggagagcacgctccagagccctcgcctagagtacgagtgcgtcagggtcagcaaggtcacagcgcagggccgcctcaaggaactcaacagcctcctcgccgccacaacgaagacgacatcatgcagcacacccgcgtccacccctgcgccggtctacggcttcggttccgtatgcggagatggtggagtcgcccgagtggaagtccgcgcctctcctggtgtctatgaccgctacaccgaacctggcttccacgtcttcatcctaccactcttccgcggtgagcaagccaaagaggaagaggtacccgtaaacacgtcctccaagtgttcgatgagagtcctcaaccacggtgcatactcagttcccaacctccccgtggtctgcatcgtgggtgggtccaacttccccagcctacggggcttcgaggcgatcgactaccagtccaagcgctag

SEQ ID NO: 30230 - DNA, 1284 bp, Zea mays
  Peptide Sequence Number=SeqID_73605
atgccggagatcaagtgcggcgcggccgagaaggtgaagccggcggcgagcccggaggcggagaagcccgcggacatcgctggcaacatctcctaccacgcgcagtacagcccccacttctcaccgttcgcgttcgggccggagcaggccttctacgccaccgccgagagcgtccgcgaccacctcatccagggccgcgcgctcaccaacgccgtcggcaacctcggcatcaccggggcatatgcggaggccgtgaagaagttcggctacgagctcgaggccctcgcggggcagagcaaagtaaataattctccagatatttctagcaaggaaaaagatgcagctctagggaatggcggcttgggtaggcttgcatcttgctttttggattcaatggcaacattgaatttgcctgcttggggctatggcctgcgttaccgatatggactgttcaaacaacacattgccaaggagggccaggaagaagttgcagaagattggcttgataaattcagcccttgggagattcccaggcatgatgtggtgttccctgtcagattttttggccatgttgagattttgcctgatggctctcggaaattggtcggaggagaagtcctgaaggctttagcatatgatgtgccaatccctggatacaagacaaaaaatgcaatcagtcttcgtctttgggaagcaaaagctactgctgaagatttcaacttatttcaattcaatgatggtcaatatgagtcagctgcccaacttcatgctagggctcaacagatatgtgccgttctttatcccggtgatgctacagaagaaggaaagcttctaaggctgaagcagcagtttttcctttgcagcgcatcacttcagtgttggcccattaacgtgtacatatatactagaagtgtgtgtggtgtagagttagagctgtatgcttccacattccagaaaaatccacatggtaccggagccaggctcaacggcgatggcgtcgcggtgaggagtgtcttcggcctcgacggagaagaccaccgagaaggagatcagcgacggccgaaggaggccgccgaggcacacgagcggtcgaaggaggacaagggcgacaagtggcaccgcgtggagcgcagcagcggccagttcgtgcggcgcttccgcctgccggagaacgccaagacggaggaggtgagggccgcgctggagaacggcgtgctcacggtcaccgtgcccaaggccgaggtcaagaagcccgaggtgaagagcatccagatctccggctga

SEQ ID NO: 30231 - DNA, 1026 bp, Zea mays
  Peptide Sequence Number=SeqID_73606
atggctgccctaaggactatagacccctactcttaccttgaccttaaagttctttcaaaagttggtcatcttgaccaactctatgttatctgcttatctcaaaaagttgtctcacttttctttatgtttactttctggtctcgtagttctactcttactcttgtgcttacgatgtcttttgtagatggcctgtatcagcgggaggtggagtctgagaggccgccttcccctgcacctcagccagagaagccccctacaccaccacagggcatcccagctactggaggagaccctgacagagacggagatgacgacgacgctggtggcagttcaagccatggcatggagcgttcagaggagctagagccggagggatggatcgcgagacccatcactcatgacgctgctcgcgggtgtcacttccacgacgctcttgataccctgttgcgtcgggctttcgaccgacacacatggtctatcgagtaccgttgtgtagtctaccagcatcgtcgcgggctatacccgaaccagtgggaggctacttgctcggtgcgccgtccggacgatgatctccggggtgcagaggccttctcagagcactattctatcactgagagggatactgctgagacagccctgcaagatgcagcacgatgggcactttctcagtattgctcgttgttcagtggggtagctgatggccttgacctgaagtactaccctcgttgttcgaccggcagtgctggaggtgtgattgtctcgccagtcggtgagggcaatcccaggttgagcagtatggtcaacttggccgtcgtgctcaacacagagttggatcacgcccttgatgagttgggcaaggtttgggcggaggttgtggaattgcgtgctgaatgcacggcacgccactatcttgatggtggttctctcgcccctgtagggattcagcacccttaccattcaccgccccgtggtcacttcgactatggtaccctagactgcaggacccggatagatttggatccctag

SEQ ID NO: 30232 - DNA, 1476 bp, Zea mays
  Peptide Sequence Number=SeqID_73607
atgggcctctgctcctcctccaccgccgcccgggccgcctccgaccccggcgccgcagccgcgggtgatgccgccgcggcaaagaaggggcgcgggatcgtcgcgtgcgggaagcggaccgacttcggatacgacaaggatttcgaggtgcgctactcgcttgggaagcttttgggccacggccagttcggctacacctttgccgccgtcgatcgcgcctccaccgagcgcgtcgccgtcaagcgcatcgacaagaataagatggtccttcctgttgctgttgaagacgtaaagagagaagttaaaatcttaaaggcattacaagggcacgaaaatgttgtacacttttacaatgcattcgaagatgacaactatgtttatatagtcatggaattatgtgagggtggcgagctacttgatcggatattagccaagaaagatagtcgttacagcgagaaagatgctgcagtagttgtccgacagatgctcaaggttgcagctgagtgccacctgcatggtttggttcatcgggacatgaaacctgagaacttcctattcaaatcaaaaaaggaggactcgccccttaaggctacagattttggtctttcagacttcataaaaccagggaggcaattccgtgacattgttggaagtgcctactacgtagcaccagaagtactcaaacgcagacgaccattctgggacaaaacagaagatgggatatttaaagaggtcttaaaaaagaagccagatttccgccgcaagccttggtcaaacattacttcgagtgcaaaagattttgtacaaaaattactagttaaggatccccgtgcaagactaactgctgcacaggcattatcacatgattgggtgagagaaggaggaaaggcatctgaaatacccttggatatatcagtattacataatatgcgtcagtttgtgaaatacagtcgtttcaagcaatttgctttaagggcattagcatctacattaaactcagaagagatgtctgatcttcgtgatcaattcaatgccattgatgttgacaaaaatggaacgattagtcttgaggaactgaagcaggctcttgcaaaggatgttccatggagattaaagggtccacgtgttttagagatcattgaagcgattgacagtaatacagatgggctagttgattttgaggagtttgttgctgcaacactacacgtgcatcagctggtggaacatgatactgagaagtggaaatcattgtctcaagctgcatttgataaatttgatgttgacagagatggctacatcacacctgatgaacttagaatgcatacaggaatgaagggttctattgatcccctcctggaggaggctgacattgacaaagatggcaagataagcctagatgaatttcgccggctcttgaagactgcaagcatgagcgcacgcaatgtacaaactcctaggggtgttcgcaagtcatag

SEQ ID NO: 30233 - DNA, 1464 bp, Zea mays
  Peptide Sequence Number=SeqID_73608
atggcctcccgaacgccccgccgtcctccgctacctaaacgctccaccatcctggtaccgatgttcggcgactccgacggatctaaggacaccagcgccgccgtgccagggtccaacccgtcggagccgcccttccccagccgggagctcacgctcagcagctacctttgcgacaaggcgctgcccgccgcggcggggccatcctcgtcgcccaaccccgaggcggcggctggcccggccgaagaggccgcggccaacgccaagctgtgcgtcgagcgggatatgctccacctcaccgcgcccaagcgcggggatccgcccggcgatgactcctccgtggtaggggcctcccagcagccgtcctcctccctgctgcctcagtcgcagctcgcgtcattcctccaggtcgatggagatctgcggtgcgtgagcgctgcggccgcctccgcgcgcagtgcctgccgcgcccgcgccgccccgaggcggatctacagcgccaacacggggcgcacccggagcatcaactccgacgacctgtcgtattcctactcggtgttctcgcacaacccgagctgctccctcacgcacaactccaccgacatctacaccgccggggagggcacgaacggctccgtccacagccggttcaacttccgccccatgggtgacggcagcgtcgccttcgcctcagcgcagctcaaggagggcactgcgtccttcttccccatggagctccccgcgagggcggcagcggcgctcagcgctagcggcagcttcgacggtagccgtggagggatgcactcgtcacggcctgataggatcttgcgggagattgtgtcggactccatgcttgccatggctcaggtcctgcaggatttcccctgcgaaaccctggaggtgctgcgggagacagtgcggagcatggttgatgctccggagaagagggacaagctgtcaagcctgccgaggaagctggagcgtcgctcggacctgaccgcggaggtattggggcgggcaaacaagacgcagctggagatcctggtggccatcaagaccggcatggccacttttgtaactggtaagggccgagtttcggtcagcgagcttgtggagatgtttctaaagacacggtgccgcaacatgaactgcaagagtgccgtccctgtggacgattgtgagtgtaagatttgctccaccaagaaagggttctgcagtgcatgtatgtgcccggtgtgccagaagtttgattgtgctgcaaatacatgcagctgggttggatgtgatgtctgctcccattggtgccatgctgcatgcgcgctagagaagaacttgataaggccagggccaacattgaagggggcgatgggcacaaccgagatgcagttccagtgcctcggctgcaatcatgcttctgagatgtttgggtttgttaaggaggtgtttaattgctgtgcggagaactag

SEQ ID NO: 30234 - DNA, 972 bp, Zea mays
  Peptide Sequence Number=SeqID_73609
atggatgaggaaaaggttgatgtcggcaatattgttaatccatcatttgaggttatggcgggtagtggttgttcagcacaaattctaagcaaatgcagtgacacacacgaattggataataatgatggagagaatattaaggccagtgttggtaatgttgtagaacaatcgcttgatgttgcggcagtaggcagtgacctagttcatgtgtcggctaaagccgatgttggagaacaaccgaatgtgactcccttgacatccttggatgttcaaaatgaatcaactcaaataagttctgatgtggatacgttggagcagatcgaacaagataacttggacactttgattaggatatgcgagcataacaaaccaaagaagttgaatgtagctcgagttttacccaaagattatacgtgcactacagaagatcttcaacttattgaatacattaaatcactactgggaaaaaaagttgtggtgaacatcgacaccgcttggttaaatagatatgatatggaatgtcttttccatggtgacttgcaattgactggcgaggcaagtacatctatattatataatataaaatatatatctttatatctatcctactatattgtccttagtgcatatatacattctattagagatgaagagcatatacttcatagagaaggtggaaaggtcttcttggagagcacgttcatttccagcttgcttaagcgtgatggtgatcctaagatactcttgaattgtaaggaagacacacttgaaaacagggtggacaactatttacaagctgacatggtgttcattccaataaacatagaaaattttcactggtacctggcgattgtcaatgctaaaaaaatgagggtttcttgcggtctatggatggtgaactatatgaaatattggatagggtcttctctgtctaataacataactcaggtagatgagttgcatttcatatga

SEQ ID NO: 30235 - DNA, 1987 bp, Zea mays
  Peptide Sequence Number=SeqID_73610
ggcaaagactcataccccatttacagaagaagagatgacggacaaaaagtacgagtaagggggcatgacttggacaaccgttgggttgttccttataatcctactttattgaggatgtatgactgccactttaatgtggaggtttgctcaagcattaaggctgtgaagtatatatacaagtacattcataagggtcgtgatagggcatctgtcactgtgatcgacgttgatggtggtcaaagtattaacgagattgagaacttcagagattccagatgggtatcgccacaagaggctttatggagaatatatagtttcgatctgcatggtatatctcccccagttctgcaactacagctccacttgcctggcatgcatcttgttagttacaatataaatgatgatatgcgtcaggtcttaaacaaggataacattgacaaatcgatgttaactgagtactttagagcaaatcagttgtttgattgggcatcaaactacttatatagggagttccccgaggtggcaaggtggtggccaggtgcaaagaaatggacagcgcgtcaacaacgtatgcaagttggaagaatagtctcagcacacccagcagagggagaacgttattatctaagggtgctacttaatcacgtgaggggtgctacctcatttgaaagtctaaggacatacgacggtaataagctatttgcgacgatcctggttttctgtgagcctactaatgtggttggtctgtggaacaaacatttggaggcaatgtctgatgacttctgtcgaacccatagtaactcgcatgtggtcgagcagttagtgttgttggatattagagatatgcttcaaacaatgggcaaggacatcaggttattccctctacctgtaataaaggacgagcacgacaatatggcagatgttgttagagagatatttgaagagatgaatattccagaagaccctgaggctgaatttgtggtttcatctctcaaccatgagcagagacacgcttacgacgtgatattatcatcggtggagaatattagtggaggtgtcttctttgtggatggtccaggaggaacaggcaagacatttctgtacaaagctttgctggcaactgttcggtgctctggaaagatagctattgctactgcgacgtcaggagtagcgacatctattatgcctggtggtaggaccgcacattcaagattcaaaatcccattgaacataaaagaaggtgacgtgtgtagcttcactaaacagagtgggacagccaaaatgttacgaaggtcatcactgatcttatgggatgaggccacgatgactagacgacaggcaattgaggcacttgataagagcatgagagatataatggatagacctcatttgccttttggagggaaaacagtggtatttggtggcgactttagacaggtccttccggttgtacgaaaaggtacaagggcccaaatcataaactcaatgttgcgtagatcttctctatgggatagcatgcaacatcttagacttgtgcgcaacatgagggcacagtcagatcaatggttttcagactatctactatgtattggtaatgggatcgaagagacatgcaacgatgataatgtgagattacctgacgagatatgcattccttacaccggtgaagatgatgatgttgatagattaattgaagaaatatttccatcgctagagacgaacatgcataatcgagattacatcacatctcgagcgatcttgtcaacaaaaaatgaaaatgttgacaagataaatatgaggttcatcgatcgcttcttagggcaagagatggtttaccatagtttcgatgttgctgttgatgatcctaacaacaactatcctcctgagttcttaaactctctcacaccgagtggactgcctccgcacatccttaaactaaaggtcaactgtccagtgattttgctccgaaatcttgatcctcccaacg

SEQ ID NO: 30236 - DNA, 177 bp, Zea mays
  Peptide Sequence Number=SeqID_73611
atggccgtgatgggttcaacatcggaaaagatgtacctctatcagactaagtaccagaataagataacacgcaatgggagtggagagatggtgagagtagcgtgtatcctccgtggcaagaggctggacagtggtgtatctgtgctctcggttggcgtgaacctgatctggtcttaa

SEQ ID NO: 30237 - DNA, 894 bp, Zea mays
  Peptide Sequence Number=SeqID_73612
atgtcggcgtttcgagactggggggtccctaagccgacgagtgagtgtgccgcgtgccccagcccagatgggtcgagcgcgtgggcgagcgcgaaggggggaagcgaggtggccggagacgggcgtgagagaggtggaaatcccgcggccttcgtgttcgtcccgcgcccaggtcggggcgccatcattgcctatctggcggagctagccagatgggacaccggtcttgttctctgcggcccgagtcggctcggggtagggccgagcccgagcccctgggtcgggcgaggcggaggtcgttcggcagaggccagggcggagtccaagccctggggtcgggcggagcggagttcgtcgtcttctggggctgagcccgagtccgagccctgggtcgggcggagcggagttcgccgtcttccgggtcttagcccgagtccgagccctgggtcgggcagagcggagttcgccgtcttccgggtcttagcccgagtccgagccctgggtcgggcggagcgaagttcgtcgtcttctggggctgagcccgagtccgagccctgggtcgggcggagcggagttcaccgtcttccgggtcttagcccgagtccgagccctgggtcgggcggagcggagttcgccgtcttccgggtcttagcccgagtccgagccctgggtcgggcggagcggagttcaccgtcttccgggtctaagcccgagtccgagccctgggtcgggcggagcggagttcgccgtcttccgggtcttagcccgagtccgagccctgggtcggggcggagcggagttcgccatcttctggggctgagcccaagtccgaaccctgggtcgggcggagcttcctatggcgcctttggtagggcctggcttcctttgcgttaa

SEQ ID NO: 30238 - DNA, 255 bp, Zea mays
  Peptide Sequence Number=SeqID_73613
atggtggtcagcattgcaaccattgctcaggagaaggtgaagctgtggaaggagacttccaggagttccaagactacgacgagttctaggcgtgggcgccaaacactcaacaagaaccggaagcggtgctctctgcacaggcgcggacggtccgcggccaggggccggatggtccacgacctggcgcaggactggcgttccctgcctgacggccggacgatccgcgcctataggccggacgatccgcgcctatag

SEQ ID NO: 30239 - DNA, 1098 bp, Zea mays
  Peptide Sequence Number=SeqID_73614
atgcaggcggcatgcaaccgcgccaagtggacgcgcttctccgactcccgacacgccagcatggaggcccaggcccacgcgtcgtgcaaccggcgcaccggatgctgcatgcaagcaactgtaccgcctgtgccaccaccgcgcctcctcgattgcggaaccaataccgcgcgcgggagcagcggtcatgtcgtcagccaagctcacgtcccatccggggacagcaagagaaccccccctcacggcgtgaagacaacgcgcccgagcggcgggcgacgcttcgccttcgccgaaacaaccgcgccaaaaaagggaccgggaaagagggataccccgaaagggatccttccccgtgaaggaaccaggctccgagcctccttactgatcaggggttcgaaggctggcccctcgaagggttcaacagctgcctcagatcgcgtgggccctacacccactactggggttcgaaggctggcccccgaagggttcacagtcgcctcagacgccgagcgagggatgaccaggggggaccgggtccggcagatcacccgcaggtacttttgggcgtgcctctgggcccctagccgacccccaacgaacggggcacggacgtccactcggattacccgcttgcagctcaccggagtcaccatgttcggtgcccatcgagggctcgggggctgctctcgcaaacccggctccggccaaacagttgacagcgtcaacataccagcccgagaacttgggccccgaccgtacacccgggctacggcctgctcgcatgagggaacaaccagaccagccgaagcattacgcaaggcattaagacctcgaaggagtgaaaccactcctccgaggcctcgggggctacacccggcgggtgcgctcgcgtgcacccaccggaacaaaatgcaaccgagaaaggctggtccccttgcaaaaaagtgcgacgaaagcctccaagcgagtgctaacactcccttcgaggctcgggggctactgtcggggaccataattaggggtaccctcaagacgcctaattctcagctggtaacccccatcagcataaagctgcagaggcctgatgggtgcgattaa

SEQ ID NO: 30240 - DNA, 204 bp, Zea mays
  Peptide Sequence Number=SeqID_73615
atgtcgcgcgcgttcgacgactactatatcaaggattgtggcgtcatcttggcaccggaggtgatgcaaaagaggatcgacaacagtgaccagttcgtcatcctcgccactgtcaggccgtacgccgccgtcgagacccgagagcagctagttgaccagacgccagcctggcacactggacattgtccgatgcatccagactga

SEQ ID NO: 30241 - DNA, 204 bp, Zea mays
  Peptide Sequence Number=SeqID_73616
atggctgcggctgcgcggggcctggccggcttgggcgccgagctgagggaagggaggagagagggcttaattctgagcaaggctttaaaggcccagaagaaagcagaagatggaagatgccaggtagctcttggaaatcttcgatcagaggttattacactaaggaatgaagctcttaaaaagacaaaatattattctccctag

SEQ ID NO: 30242 - DNA, 852 bp, Zea mays
  Peptide Sequence Number=SeqID_73617
atgagagggggagaagcaattgaaacacttcccacgcaggtcggcagggacgggcctgtgcagaggcttcagcgggcgaggacgacgccagcgagcacgacgattgactaccgtcacctagtcatcaccagcaacggggtgagtggcgaggggggtggaggaggaggagacaagcacatccttgtaagaaggcagccgaccatcatagttaccaccaccatcgctccaacgctgggccttggaacggccagcaggcaacgaagccggagaaagggagggggagggggaacccgacgttggggaggggaggattgtggccgccgggcctggagtagacgtcggcgtggggctgtggctggtttgagcgccgggatgaaggggtggaggagggcagaggggcgggtgacacatcctaccctccagattagaaacagaacttccgtccagctgccatttcacttactgtcctccaccagtccaggaaactgtcattttctggttgaggggacagaagctgctatgatggaatttgaaattaatatgtcagaaatgcctcttgggaagctaagcaaggaaaatattgagaaaggatttgaagcattaactgagatacagaatttattgaaggacaccgctgatcaagcactggctgttagagaaagcttaattgttgctgcgagcaatcgctttttcactcttatcccttctattcatcctcatattatacgggatgaggatgatttgatgatcaaaatgattttacctatacttcctctgaaaaagtccaagtataatgctccaattagtaacttggtcaatcagaaatatgccactcaacttttgcaaaattag

SEQ ID NO: 30243 - DNA, 258 bp, Zea mays
  Peptide Sequence Number=SeqID_73618
atggcggcgccgccaaaggcgtggaaggcggagtatgccaagtctgggcgggcctcgtgcaagtcatgccggtcccctatcgccaaggaccagctccgtcttggcaagatggttcaggcgtcacagttcgacggcttcatgccggccgttctcagtggtttctgtgggtggtatctggaatgcaggctagattggattagtggtcgccgttttggggccatttgctatgaaaaacctgtaggtctgatgttgtgctag

SEQ ID NO: 30244 - DNA, 2181 bp, Zea mays
  Peptide Sequence Number=SeqID_73619
atgccagtttccttttatcttttgggcattgatcgtcgacattttaacttgattcgtaatgcaatcagcgttgacgatgttgaagggatagatgcacttagatgggatgatcaagagaagatacgaaactacgttgggagtgcctcagctggtacaagttctacagctgctcctcctgagaaatgtacaattgagattgctccatctgcccgtacttcatgtagacgatgcagtgaaaagattacaaaaggatcggtccgtctttcagctaagcttgagagtgaaggtcccaagggtataccatggtatcatgccaactgtttctttgaggtatccccgtctgcaactgttgagaagttctcaggctgggatactttgtccgatgaggataagagaaccatgctcgatcttgttaaaaaagatgttggcaacaatgaacaaaataagggttccaagcgcaagaaaagtgaaaatgatattgatagctacaaatccgccaggttagatgaaagtacatctgaaggtacagtgcgaaacaaagggcaacttgtagacccacgtggttccaatactagttcagctgatatccaactaaagcttaaggagcaaagtgacacactttggaagttaaaggatggacttaagactcatgtatcggctgctgaattaagggatatgcttgaggctaatgggcaggatacatcaggaccagaaaggcacctattggatcgctgtgcggatggaatgctatttggagcgctgggtccttgcccagtctgtgctaatggcatgtactattataatggtcagtaccaatgcagtggtaatgtgtcagagtggtccaagtgtacatactctgccacagaacctgtccgcgttaagaagaagtggcaaattccacatggaacaaagaatgattaccttatgaagtggttcaaatctcaaaaggttaagaaaccagagagggttcttccaccaatgtcacctgagaaatctggaagtaaagcaactcagagaacatcattgctgtcttctaaagggttggataaattaaggttttctgttgtaggacaatcaaaagaagcagcaaatgagtggattgagaagctcaaacttgctggtgccaacttctatgccagggttgtcaaagatattgattgtttaattgcatgtggtgagctcgacaatgaaaatgctgaagtcaggaaagcaaggaggctgaagataccaattgtaagggagggttacattggagaatgtgttaaaaagaacaaaatgctgccatttgatttgtataaactagagaatgccttagagtcctcaaaaggcagtactgtcactgttaaagttaagggccgaagtgctgttcatgagtcctctggtttgcaagatactgctcacattcttgaagatgggaaaagcatatacaatgcaaccttaaacatgtctgacctggcactaggtgtgaacagctactatgtactccagatcattgaacaggatgatgggtctgagtgctacgtatttcgtaagtggggacgggttgggagtgagaaaattggagggcaaaaactggaggagatgtcaaaaactgaggcaatcaaggaattcaaaagattatttcttgagaagactggaaactcatgggaagcttgggaatgtaaaaccaattttcggaagcagcctgggagattttacccacttgatgttgattatggtgttaagaaagcaccaaaacggaaagatatcagtgaaatgaaaagttctcttgctcctcaattgctagaactcatgaagatgcttttcaatgtggagacatataggtgcatacttgcttcttttttcaatgtcatgcttgctcacatttccaatgtggcaccccctggtgacgcgctgtgtcgcgatctaggcaatgtgtcaaagactaaaatggaagggttagaggtgaaggaggtggacaataccagcttcaagctttggtacacagggacaactacaaatagaaatgaaggagttttgattgataagagtctcaagaacggtgtggtagatgtggggaggcaaggagatacgattatcttagttaaacttgtcgtgggtgatttggtcttgaacgtaattactgcatatgctccccaagtaggccacgatgagagtgctaagaggggaagacttagatga

SEQ ID NO: 30245 - DNA, 501 bp, Zea mays
  Peptide Sequence Number=SeqID_73620
atgggaagtcttatgttgggtgctggtcgtggtcgacaggaacgagggcatctggcaagctcttatagttccggctcaggcagattggatacgggcatagttcccaaagctttaccctgtagtctggactataagttggttacgatcctggcacacatatgcgatgcacccggctctgcccttagaaacgggtgtgacagctgtccatctggcagcacaggaggcgtgattgtttcacctgtcggtgaggacaatcctaggttgagcagcacagtcaacctagccgccgtgctaaacacggagctggatcatgcgttagacgagctgagtagggctcgtgctgagatcgccctgctgcgggctgagcgcgcggaacgtcgtcacttggatgatggttcccccgctcccatcgggactcagcacccgtaccgctcacctcggcgtggacgccagtcttatagcaatcccgactgcaagaccaagatagatttagcaccatag

SEQ ID NO: 30246 - DNA, 909 bp, Zea mays
  Peptide Sequence Number=SeqID_73621
atggtggtcagcattgcaaccactgctcaggagaaggtgaagctgtggaaggagacttccagaagttccaagactacgacgagttctaggcgtgggttagcggcaacccccagtcggctgcctgtgaaggccgcgatggctcgtcttagacacactgcacggaagtccgtcatccccttcttaccctcccgccttgctgagcgtccgcttcgccgtcccgtggccggacagtccagccacttggagagactgcaccaccgcctgcatgaggagcaggaacgtcgacgacaggagcagcagggctcttctttcttgctccagcaggagatagagtctgtgaggagctgctctcctatgcttcccctggaggcgcaccctgcaccaccactgggcgccccagcctctggagtagctgctggaggagacccagacgacggaggtggcgacgacagctcgagccatgacaccgacttttctgctgaccacgagccggaaggatgggttgctcgacccatcactcacgacgctgctcgcgggtgtcacttccacgatgcgctcgacaccctgctacgtcgggcacttaaccggcatacttggtccatcgagtatcgctgtgtggtctaccagcatagtcgcggggtctacccggaccgctgggaggtgacctgcttggtgcgtcgtccggagaacagtctccagggtgctgaggtctgctcagagcactattccatctctgagcgggactcagctgaggcggccatgcaagatgttgcacgacgtgcgctttcgcactactgctcggttctcggtggggtagctgacggtctcgacctgaagtattaccccagctgttgtaacaccataaattcgtcttccgagaataccttagtttatattattaattcctag

SEQ ID NO: 30247 - DNA, 555 bp, Zea mays
  Peptide Sequence Number=SeqID_73622
atgccttatggtttgaaaatatgtaaattaatcatcttgcaccgtgatcctggtgtggagattggattggttttggacatcgtcgacgagatcaacctcatcgacaccttcttctgctatctcggtggcaacgcacggttgttcgatgactatcgcgatgaagattattatgtgctaccacggaagtttagtattgtcgctcgagtagaagttaaattccccattgaaccacgttatcgtgatagacaacatttcattttgtctgacatcaatggagccaagatcgaggcaatgacaagttcgtacgagacagtcaagcacttcaacaatttgctacatgaaaagcatgttttcaagatgcacaatgtagatttcagtattagtatgggtgaacatcagtttcgacatataagtggtccaatggaattgtatctcaccagacaaactgtcgtggagccgtacacagttccatttcaaatgccgccattcccaaaacatatattcttgagtcttgcagatattgccgaactaccaaataggcaaataggactttag

SEQ ID NO: 30248 - DNA, 501 bp, Zea mays
  Peptide Sequence Number=SeqID_73623
atgaagtctaaatgtgtggtgtggtcttacagtgggcaggttccaaagaatgaacacttgatgatgtctgggcctttggggcaatgtgataatcctgactgtgtgaattgccctcctgcttgtaaaaacagaagacattttcagagaggtctccaagtacaagaaaggtttgaggaatggacccaaagcttgaagcctgtgccggtgattgttcgttgcagaataattagagcaaaaactccagaagtttgtcacagaaaatacctccatcttctgaatgttcctaacaagtcgctcttggtattcaccttgttctccttccaagcattgaatcaatacacacttactctagatgatagtgcttttgacagcatttctgccgttaacttgactgcaataaataagaaaaaagaagcagctaaaccagctgattttcatgacccagcaagggagtcgtttgaggcagagcttgataggatcttgagggtacaggagcagtag

SEQ ID NO: 30249 - DNA, 345 bp, Zea mays
  Peptide Sequence Number=SeqID_73624
atgcccggatccgcgaccgtcgccatccaaccccggcctccgtctgtgaccgctccatggtggcgcaagcgctggaggcatccacaggggctacaacgtgaacccgcccccgttcgacatcggcacccccctcccccgaccattgtcggtttccatcgtaggagctcctcgctcgtgcccgcttcttcaccgatgactcggggtcatgatggtcgatattctatctatatcaatgcatctctctcgcacgcctattacctgtacattctatctctctttttgttgggcgtgaaattcacagtaaaaaggcaaaagagagctcttttctcaattcttagcaaataa

SEQ ID NO: 30250 - DNA, 357 bp, Zea mays
  Peptide Sequence Number=SeqID_73625
atggcccaaaggcacatttccctttcacctgtccgctcgctgcgtcgtgcgcctgccttcctctcacggttcgcgcccgacgaccccgacctcctccgcaaccgccccgtcccggaccgcctgctcgtcgtctccgccggcgtcaccgccaacctcaccgtcggcgtccccgtgcaggcgcagctccccggggttcttgtgcccgaggttcgcccgggctccgccatggatgccgtgcaggcggtagatagggcactaaccgaggcgaggccaacaagcccagctcgatcccgcgtcggtggcttggccatggatgcggaggacacggaggcaggcgggcgagtgatgaagatgtga

SEQ ID NO: 30251 - DNA, 660 bp, Zea mays
  Peptide Sequence Number=SeqID_73626
atgtcttcacccgagctccgggaatcttccgcgctaatgctgaaggttaccgggggtcgctggcctaggaatgttccgattccccaggcggccggatcgtcaagacgcgtcgtggaaacgtcgggcgttcgcgagggttggggacccacgtcgcgaggtcaaaatggtgcgggcaagcgcgaaggctaccgccctggctccagcatgcctccgcctggcgcatccggctccagcgcgccgctccctgccatgcccacgcaggagcgaagacctccgtcaccatcgtgtgctgctgagacggtggtgggtggcgccgaagtctccatggatatttccgtggaggactaccttgtgggtagggtcgcgatgttcgacgcccacacaaggcggggacctaccgggttggagtctgggcaactggccgttgtcccggcgccggcggcggctagcccggtggccgtggcaactggggcgaaggggtcttcgcaggacccatggtccaggttttgcgccagcggcgaaattgcttcggccgccgccgctaaggacgtggctagctcagttgcgcagcagctgaagcatgcggccgcctcgggggcgttgacctcggagtttactgctgaaaggcgacgattcaagaggaggattgaacgcctctga

SEQ ID NO: 30252 - DNA, 309 bp, Zea mays
  Peptide Sequence Number=SeqID_73627
atggcggcacacacgatgtccgttcgaggagcttgcgggggccgacgcggtggtgaggggcgtggcggccacggtgatggacagtcccagcggcggtgggcgccggcgacaggtggaccggcggtttcatggcatagaaggaataattttcaaccatattatggaactcgacatttactgcatgtcacatttcatggcaagatcgctagcctaaagagggtaaggcttgcaggtgaaagcccccatccaaggaactgggatccacatgctgaacctgaccatgttgccggatatggaggaggagcctag

SEQ ID NO: 30253 - DNA, 1719 bp, Zea mays
  Peptide Sequence Number=SeqID_73628
atggctagatcggcggagcatcggacggccgcacgccggtctactgctcctgttctgcacaccacgcttggcgtcagcttggagaagacgaggctgatgcaggctagaatcgatggctttgttcagcaaatgaccggccttcttcggctagaacgagatgcggagctggaactggcccaggatcatgaggtgagtgccgccggtacagtgatggatggaatgccgaaaaagccagtggtagctcatggtcaggcccaagaggatggtgacaccatttgcaatttgagagtcatcagcagctcaaccggattaactggtcaacatctagtcttattcagagccgagggaagccacagacttcctgcaaccagactctcccctggagacacggtttgcgtgagagcatgcgacagccagggcgaggttgccgcttcaactccttgcttgcaagcctccgtccataatctcggtgaggatggacgcagcattacggttgcattcagatcacgccgcggcggtgaacctgccttctccaggttcccagggaaatttgcgcgtattgatcgcatacaggctctagcagatgcagttacatacgagcgcaactgcgaagcactgatggctcttcagaagagagggttacagaaaagaaacgcatccatcggggtagtggccactctgttcggagacaaggaagacgcgacgaagccggagagaaacagtctgacggatcgtcgtggaccagaagcacctgacggcggttcgctggagacgcacagccacagcttcgacacctcccagtcgagggctctcgcactggccctggacaaggagaggccagtcctggtgatccaggggcctcctggaacaggcaagacccgtctgctcagctacctcgtcgcgcgcgtggtgcgccggggtgaacgcgtgctcgtgacggctccaagcaacgcggcggtcgacaacatggcggagagcttgtcagcgagtgggctgaagaacattgtgcgagtcgggaacccttccaggatatctccgtctgtggctcccatgtccctggggcagatcgtggccacgaggctcgagaagctcacccgagagttcgagacgaggagatctgccctgagaaaggacttgaagcgtcgcgtacaggacggcggcgacggttcttcagttcgtcagcaactgaaaaggctcggtaaggactacaggaaggagaagaaggaagcagtcagggaggttctggcaaacgccgaggtggtgctgtcgactaacactggcgcggctgacccacttgtgagggggactggaggttgctttgacctggtgattatagacgaagctggacaggcgattgagccatcatgttggatccctatgttgcaggggaagcgttgcattcttgccggtgaccaccggcagcttgcacccgtagtgctttcaagagaggccatggaaggtgggctgggcatgtctctgttagaaagggcttcgtcgctgcacgacggactgctcgctacgacgttgacgacacagtaccggatgcacgagtctatagctagctgggcgtcgaaggagatgtatgacggattgcttcggtcattcccgtccgttgcttctcgactcctcgtcaattatccatctgtcaagttttctagccaggataattggagtaaatattgtcctttagtcccttttagcatccatgtgagggactaa

SEQ ID NO: 30254 - DNA, 663 bp, Zea mays
  Peptide Sequence Number=SeqID_73629
atgtcacctcatcatcggcattttacgtcccagttttcttcttcttattatgcccccgtgcgaccccaaagaaggagagaactgaagctgcttccactgcctgattattccccaaccagttgttaccattcaggtcatctccgactagtctcacctgcagtgccctacgagcgagcactgtcagcacttgttggtcgccattcctatcccaccagcagccatggcggccgtgacgacaacgccatcgtcgaaaccaaggaaagtaggagaagaccaaggaaggggaagaaaacagcgcccaaccaaggcgtgcgtgcaccatcgtcgtcggagttgtcgactaggacggcgcagagcggcgacccccttgggcgaaaggagctggggcaacacgtggtgcactggctgaagcagggcatgcgccagatggcctctgaattcgcttcctcagaccagccagagacacaaggtaacaaggcattcctgtggtctgatggtgggcacgcggcccacgcggggtttgtagcgcaggcacaggcacacctttctgccactcccatgcccaagggacaggacgctctgtgccgcacggcctccgctcactaccccacgctgttcgacaacttccagagagagctccgcgatgtcctgctgcggcggtaa

SEQ ID NO: 30255 - DNA, 801 bp, Zea mays
  Peptide Sequence Number=SeqID_73630
atgtgccaagggccacactccatagccgataaatgcctcaaccaaatcgcgtccgctactcaagtgggcagcgtaccggagggccccttcgtccttgtcatcctccgccacctcaaatcgagggaacgccacataacgtcgtggagggaggccaggcaggtttttgacatcacccggagacacatagaaccaaaaatctcaccagttgccccacttgttcctgacacaagggactatctccacgacttccgcgaagtctttccagtcctcggtgtgaaggcaataattcttggcgaagacctccacagacggctgcccgccgtaggaagtaaccgcccagacatacttcgccagcgcaaccacggcgttaggcgtcaactggtggacctgcacttcgaaccttcgcagcacctccgccatgaagcgatgtgccgggaggcgaaggccggcgacaaaaaggcctcaaaaacaaccaactcgccttcaggcttggggatctcctctgcacccgaaactcgcccgacaccgtcaccaaagtacccaagccgctgcatctccagcacgcggaccgaggatatcctggaagtgccgaactccacggtatggccaggctgcagctccatcacagccaaatcgctcaaagtatcctcggacgacggcacgaccgacgacgcactcgcagcagacgaggaagaagacattggaacgtatcggcggcggcggcgcacggtctgcttgatgcggggcagatttccgaagcaggagagcaaggagggcagacgagcaatttacaaatgctag

SEQ ID NO: 30256 - DNA, 162 bp, Zea mays
  Peptide Sequence Number=SeqID_73631
atggtgggtacaagtgcagtcactgcacggcggcagccggggtcagtggagcattgtaccatgcaggatgtagttgatggtgtgacttggcctaccaccctgccaccgggttggacggtcaagtgggatgttgctccggcaggagaggagcatgaggagtag

SEQ ID NO: 30257 - DNA, 810 bp, Zea mays
  Peptide Sequence Number=SeqID_73632
atggtctgccctagactgcagaattatcctggtaaacccctgagcagttatcacgaattactcaagggctcaggggctacatctaccagatgtgcttgtgtgcaccaagaaaaaaccggttccagacgaaagcgtctacacaactccgaagagttgcgtagaggcttggggctgctgtcgggcaaccagggatggggtgccaaaagaaagcccaagaaactcccaaagaacgacccatccgatcaagttccccgtcgagcaagtcagagaggcagagcggacgaccaagtcccccatcgaacaagtccgcgaggaggagtaggcgaccatgtcccctgtgcgagcaagtctgtgaggcggaccagacaatcgagtcccccgccgagcaagtctacgaggtggagcggacaaccaagtcccctgccgagcaagtctacgaccgctgagcaagcctacgaggtggagcagacgaccaagcccccgccgatcaagtctaaagcattgagccagagccgcaagcatacgttgaccacgacagtgcgtgatgccaggagccccagtaataagacacatacacactctcctgtcagggacgacctcagcgccggagcctctacagtggccagtaaggcagaagcgacaagacaggaggccatgtcgaatgaactagtccacacgcacgaaaggacaacatcgagcccacaatggcgaaggggaaccgtgcagtgtcagtcgagtcctgggcttacaccatgggtcctgccatgcatcaccacgaggacgtcagccacgagcccaccgcaaggataa

SEQ ID NO: 30258 - DNA, 681 bp, Zea mays
  Peptide Sequence Number=SeqID_73633
atgggctggctctggcaccaccgtctagcacatgttggaatgaagaaccttctgttggaactcactctcagcagcaagaaggccaacaaggatcacacgtgggccttgggactgaacgaggatgcgccgtggcaggacgtcgccgcaggccttcgtcaaagtgctgagtcctgcgaagggtgtctctgcccgctttgtctccgtcgaaccagcggctgcagcgaaggcctcgagcgaagggtggcgtctttgccttcgccccaacatttgccctccgagggaccagttcgacaaagtcacctggtgccgaagacgtcgctagatggcggagacgctgccctcgctcgaagtggttccgcgggggtttttgatgtgaccgttgatggacgacgtactgttggattgcgggtttcccgaagcgtcgcggcctgtcggattgcgggtttcccgaagagccgcgccctgcctataaaagggggcgggggcggcgctgtttggactctgccttccgcgctccgtaaaaaccctagccgcccgccgtcttgctgctccttttcctccgctgctccctttgctcgccggcgttctggctcgagtgaagcagaccgcccgccgccgacgacggtacgtagcaatgccatcctcttcttcctccgccgacgccacgtcgccggcctgtaa

SEQ ID NO: 30259 - DNA, 345 bp, Zea mays
  Peptide Sequence Number=SeqID_73634
atgggctttgttgatcgttttggcaaagtgagcagggaacgtgtgataatgggccttttctacagaagtttcagcgcgttggggttgggccctctatgcgcgtgcgaatggcccggggagctctgcctcgcccgacctcaggcctcggcctcggaagaagatctccgcctcgcccgacccccgggcctcggcctcagcctcggcctcgagaggagtcacaacctcgcccgagcccagcctcggcctcaggagaagtctccgcctcgctcgacctgggcctcggaccgactacgctacaggggatacatcattaccctactcctagtcagctgcctcaggctatga

SEQ ID NO: 30260 - DNA, 393 bp, Zea mays
  Peptide Sequence Number=SeqID_73635
atggccgaggctcgggctacgctcctgaggtaccctaggacattttcgagaccagcaggaacgatttgtaacggaatcccaccggagggaggcatcggggccctcggaccctatcgaatgggtccgggtccggcaaatcacctgcaggataaaactgagtcacgatctcccacgagtttggcctcgggcgcaacagggagctccgcctcgcccaacctcaagcctcggcctcagaagaagatctccgcctcgcccgaccctcgggcctcggcctcaggaggagtcacaacctcgcccgagcccagcctcggcctgaggagaagtctccgcctcgcccaacctgggcctcgaaccgactacgttacaggggatacatcattaccctactcctag

SEQ ID NO: 30261 - DNA, 101 bp, Zea mays
  Peptide Sequence Number=SeqID_73636
gtggcaatgagattgatggttctggttatgattatggtactggagaagatgaagccgtggaaggagacttccaggagtttcaagactacgacgagttctag

SEQ ID NO: 30262 - DNA, 2022 bp, Zea mays
  Peptide Sequence Number=SeqID_73637
atgaggcgaaaaaacggcgggcatcccccatccaggggcttggaagatggaaagacacggccggctcagagcggaagaagccaaaccgccgcgcacggcgcgcacgaccgcccggcggttacaagcgaccctccacttttgcccagaccaacgggcgaaagaggccggcagccatgcaggcggcatgcaaccgcgccaggtggacgcacttctccgactcctgacacgcctgcatggaagaccaggcccacgcgtcacgcaaccggcgcgccggatgctgcatacaagcaattgcaccgccacttgcgccaccaccgcgcctcctcgattgcggaaccaacaccgcgactcgaggcgacccagcgcacgacccggcagcgccagcctggcgcgacggtcaatgtggccaaaggtggaccggcagtaatggcggtggcaggcgggcgggagcagcggtcacgtcgtcagccaagctcacgtcccatccgggagcagcaagagaaccccctctcacggcgtgaagacgacgcgcccgtgatccgtccctcgaacggctcgcgcacgcgcaatggccgccccaccaaccactcgccccgtcgcattaactccgcggcaggacaggcggcgcaggaaaggcaggcgacgcttcgccttcgccgaaataaccgcaccaaaaaaaggctggccctccgaggggttcaacagccgcctcagatcgcgtgggccatacacccactactggtcagaggttcgaaggccggccccccgaagggttccacgaccgcctcaggctacccgggctccgcgcccattactgatcagggaatcccaccagagggaggcatcgagccctcggaccccgtcgccaggggaccgggtctggcagatcacccgcagctcatcggagacaccatgttcggtgcccatcgagggctcgggggctgctctcgcaaacccggctccggccaaaccgttgacagcgtcaacataccagcccgagaacttgggccccgaccgtacacccgggctacggccagttcgcatgagggaacaaccaggccagccgaagcattacgcgaggcattaagacctcgaaggagtgaaaacactcctccgaggcctcgggggctacacccggcgggtgcgctcgcgcgcacccaccggaacaaaatgcaaccgagaaaggctggtccccttgcaaaaaagtgcgacgaaagcctccaaacgagtgttaacactcccttcgaggctcgggggctactgtcggggaccataattaggggtaccctcaagactcctaattctcagctggtaacccccatcagcattaagctgctaaggcctgatggggctcggattcgggctcagtcccagaagacgacgaactccgcttcgcccgaccccagggctcggactccgccctggcctccgccgaacgacctccgcctcgcccgacctaggggctcggcctcggccacggaatacagactcgacctcagcttcggaggagcctccacgtcgcccgacctagggcgcgggccagccacgtcaacaggaggcaccatcattaccctaccccgagccgcctcgggtcgcggacgtcagcaaggactcgaccgctccaacagctgtccctccgccaagcaccgtcgctcctccgacggccacaacatcacaccagcagggtgccaagatctctccggctgccacattggcatggccctcttagagagggttggccgcgcgaggacgaggacgagacaggcgctcccttggggccgctcgcttccctcacccgcgtggacgcttgtaacccctactgcaagcgcacccgacctgggcgcgggacgaacacgaaggccgcgggattcccaccactctcacgccggactccggccgcctcgctcctctcccccctttgtgctcgcccacgcgctcgacccatctgggctggggcacgcggcactcactcgtcggcctgagggaccccggtctcgaaacgccgacaatattcaaaattga

SEQ ID NO: 30263 - DNA, 108 bp, Zea mays
  Peptide Sequence Number=SeqID_73638
atgccttgctatgagctcctcctgctgcctgcgctgtatggctgtattggctctcgtgcagcagttattggtgcacaggtgtttcgcaagttgtcacctgtcaagtag

SEQ ID NO: 30264 - DNA, 180 bp, Zea mays
  Peptide Sequence Number=SeqID_73639
atggcggagcacgaccaagaaacaagcagcacgcatgagatggcatggacgtgtggtgtgtggtgccatggcggacaccagtacttccacggtgatacagagttggagattaagggagaaaggaatggggctatggacaactgtacctttatacgtattgcttggccacttgggagttga

SEQ ID NO: 30265 - DNA, 1902 bp, Zea mays
  Peptide Sequence Number=SeqID_73640
atggagagagtcgtcatcgctgccgtcttccttctcctcttctcatgccaaccatctgaagcgggccgggtcgtcgtccggcggccgccgccgacgctggcgaggcggcagcggcactacacctcaccgcgcgcgggcggcgacggtggtggaggcgtgtccgtgccgccggcggtgcagtacgagacgcggtggtacacgcagcggctggaccacttcaactccgcgccggcgagctacgcgacgttccagcagcggtacctggtcaacgacaccttctggggcggcccgaccgcgcccatcttcctgtacgccggcaacgagggcgacgtggacctcttcaccaacaacacggggttcatgtgggagtcggcgccccggttccgcgccttgctcgtcttcgtggagcaccgctactacggcgagtccatgccgttcgggggcaccagggcggccgcgttccgggacgcccgcaccaagggctacctcaccgtcacgcaggcgctcgccgactacgcgtcgttcgtgctcagcctcaaggccaacctcagcgcgccggcggcccccgtcgtcgtcttcggcggctcctacggcggcatgctggccgcgtggatgcgcctcaagtacccgcacatcgtcatgggcgccgtcgcgtcgtccgcgcccatcctcagcttctacggcatcgtcgacccctacgccttctacgaccgcatcaccgacgacttcaagagcgagagcaagcactgctacgacgtgctccggaagtcgtgggacgtcctcgacgatgcgctcgccaccaaagaaggccaggcacagctgagacgtacattcaccatgtgcaatggaagtagcgtgcaggacatcccgtctctgctggagagcgcggtggtgtacgcggccatgacggactacccgacgccgtcggggttcctgacgccgctgccggcgtacccagtccgcgccatgtgccgcgccatagacgccagccgggcggagtcggcggaggcgagctccggcgccgccaacgacggcaacagcaacagcaccgcccagctgacgctgtcccaggtccgggacgccatggacgtgtactacaaccacacgggcgcggcggcgtgcttccgcgccgaggaggacgacgacccccacggcatgtacgacgggtggaactggcaggcgtgcacggaggtgatggtgatggcgtacggcatccgcgacggcggcgtgctgcagccgtcgcccttcaacttcaccgacgtcgtcgacagctgccgcaactacaccgggctgccgccgcgcccgttctggatcgagaccgagttcggcggattcgatattgggaatgtcctgaagaaatctgctagcaacatcgtcttcttcaacgggctgcgggacccgtggagcactggaggcgtactgaagagcatctctgacagcatcattgcgctggtggagcccaaagacaactatcttgtgtcgactggcgtgtccagcggggcggaatccggtggggtcgtgggggcgtcaaccgtcaggtcggactccggtggatgcagggacgcagtccggtggccggcgggctggcaggcggagctcggcgcgtcgtgcgggatagcgggttggcaggcggagctcgacgcgtgctgccggcgcgtgttgctggctgtcgccgcggctggaacctggaagcggagctcagcgcgtgctgccggctgccgccgcggctggaacctggaagcggaaggcctcggtgggcggaagaggaaggcagcagctgagcgagtgagtggtctcgggcctcggcgactcggcagctcggcggctcgggctcggcggacggcgggcaaaagcggaaggcacagacgcacaatggatggccggctgagcggacggcagtga

SEQ ID NO: 30266 - DNA, 888 bp, Zea mays
  Peptide Sequence Number=SeqID_73641
atggaaaaggatcgccaagatgcgtcgcagaagcgacgggcgttcacgagggtcagggacccgcggcgcgaggtcaagatggctcgggggatcgcgaagtctgctgccccaggaaccagcaagcctccgctgggcgcgaagtccgccgcccccggccctagcaagccgcttcctgtcgtgcccgtgccggagcaaaggcctgcgtccccgcggcgtaccgctgagacggaggtgggtggggtcgaagtctccatggatatttccgtggatgactttcttgtgggcggcgtcccgatgttcgacgcccatatagggcggggacttgttgggtcggaggctgggcaactggctgttgtcccggcgctggtggcggctgggttggtcgccgtggcgaaggggtatgcgcaggatcctttggccaagttttgcgccagcggcgagatcgcatcggccgccactgccaaggacgtggtgggctcggttacgcagcagctgaaacacgaggagctggaggtgcttccatcgatcgtgacgggtctcatgtccttcgcttcgctcatcacctgtgggggagccatgaatgccttgtcccgtgatggatgcaggcacttcgaagtcttcgatcggtccgatgaagacttcgactgcgagatcttccaggttgaagatgcggtgctaaagcagtccgctggggcgctttatgataggatgtggggccctcatggtcgtgacactgtccgggaaaggtctgaccgggcgatggagcagatggtgaatgatgaggaggtcgaagacttaggtagcctggagagcgcaaaccctttggcggagggtgtgagggcggggactgaggagcagccagcgctgccaacaggttctgacatctga

SEQ ID NO: 30267 - DNA, 954 bp, Zea mays
  Peptide Sequence Number=SeqID_73642
atggcagctatgtttgtatctccatacgacttggaagctcaggcgttccagagaaccatcgaatttgaggaagaattggcagaggaattcagtggtggaactacaaatgctagaaataaagagacaacaagtgatgatgaagatgaggttcttctagcatctccttactggcaggacaaagataagcagaaagatttgtcagttcccggtgctgggttcaacttgcatgggatcatatcttcttgttgtgaaccatatatgattgtatacattgaacttgaggagaaagctttagtggatcaattagaaaaacttgtccagctcatccttctattctacctggaagaaagatgggaaatcgaggaccttgcccttggtcttgcatctcaaacagttcttggtgctgcaactatggtgagccagacaggcaaacatccagggcaactaaaaggtcagaaggattggagagaaaagcgggatgagttcaagaaaaaggtgtccattgtcgagttgaatcatattcttaatgaagtgaatactcacatccttccttcccacaatgatctcaccccaataactacaatagctggtggaagtgttgccaacacaatccgtgggctcttagctggttttggaatatcaactggaatgagttttagtggtgtagatctcacaagtttaagggccaaaaaagggcacaccgctcagactgactctagttcatacaatgttggtgatgaagaatattgtggttatgactatatccttgtagggcagctttcagaagttagaatcagcaacttcgtaactcaccagctattattccttacacctctttcagcttgtttctataagacatatgcaattctaaactgggtggtcccgctggcaaggcagggtagatatgatgaaattgcagactcaaaactgagcgacaagcgacaagttctctga

SEQ ID NO: 30268 - DNA, 669 bp, Zea mays
  Peptide Sequence Number=SeqID_73643
atgtcttcctcctcatttgctgcgagtgcatcgtcggccgacccgtcgtccgaggataccttgagtgatttggtggcgacggagttgcagccgggccacaccgtggagttcggcactttgagaatctcctcggttcacgtgcaggagatgcagcagctcggatactttggtgaagcaaagtatgtttgggcggttgcgtcgtatggtgggcagccgtttgtggaggtcttcgctaagaactattgcctacactggcagaagaagaaaataggagataagattgcacaatttggatcgtgcacctttacgccgaggactggcaagacttcggcggaagtcgtggaaatagtcccttctgcccggaacaagtggggcaattggtgggacttttggttttatgtttcttgtggggaagttgaaggtttgcctgggctccctgcggccattatgtgctctcactgctatgtggcgttcccacaattcgaggtggcggaggacgatgagaacgaaggggccctttggtacgctgcccgcatgagcagcgggcgtgatttggttgaggaattcattggatatggagtgtggcccttggcacacggctgggtacttggcgtaagtgtgcccccaccggatgccgacctgagcgatcagttggtgacgaatctctaa

SEQ ID NO: 30269 - DNA, 2067 bp, Zea mays
  Peptide Sequence Number=SeqID_73644
atgcgggttgggggactgccggactggggagtgggacgagacgaccagacaaatccagaatcgcagtcgcgttctgctcctggaggcccccgcctggccgcctgcgccttcgccatggaatcgcgcggcaagcggatcctcccctttctgttggtcattatcgccgctgcggcggctccgtccgccatgccccgtgacgagagagaggtggtggtagtttccggtgcgccggacggggttgtgtgggtggcccagctctcggatctccacttcagcgtgcaccacccggagcgcgcctacgacttccggcggtatgtcggcccggcgctggccatggtcaaccccgacctcgtgctgatcactggagaccttactgatggtaaaagcaaagatctgttaacaatgaagcaaaacgaggtcgaatgggtagaatatgaaagtacaatgaaggaaataattgaaaatagcaagcttccaagaagaattttctatgatatgagaggaaaccatgatagctttggtgtaccagcatctggtgaggactatgacttttatagtaagtatagcatcaacgccaaactaagacgacaggggcgtgtccaaagcattactttggagaatagtggtcggaagcatctgtttgttggctttgatagcacaatggagattggtcttagaggtccaaccaatctatttggacatccaactgacaagcagatgattgaattggatcaagcattatcacagtggaatactgactttgacaaggttccagtgacaaaaatcgcatttgggcacttcccgttgtctttctcagcattaacagagtcaggaaaaagtatcaaggatgtttttctaaagcaatcattggcagcatatttgtgtggtcatcttcatacaaggttcgggaagaacttgaaacgatactaccatcgggcagtccaggaaccatcattatcagagcattactaccaacataacatgcaccaaggagatgcattccagggtaataaggaaaactgttctgaagaagcttctcatgttgaagagttctgggaatgggagatgggtgattggagaaagagcagaagcatgaggatactagcaattgatgatggttatgtttcctataccgatatagatttcagattaggttcaaagagcataatcatactacctacctttccccttgattcaagattcatgcagagagcctctgcttttcgtgattttaaatgtcatgtcatgggggcatcatcttttgataccgtgagagctcttgtattctctaaacatgagatagtatctgtttctgtaaaaatatacgactcaaggccaggaactcttgaaatagtcttcgactctgaaatgaaaagagtggattccaatgaaactcgaggaaatatgtatttgataccatggaactggagggcatttgaagattcctctcccagccgatattggctccaaattgaagtgatggatataacaggtgacacaagtgtcagccagttgaggccattctctgttaacggcttgctggcaagagtgaactggacatggaaagagttttttgtgattgtttttataccttggttattcggtcaccctattactgaagatggtagcctgacttacatgacacataaaggctggattctaaaaggacccagtagtagcaacgaagtagtccatgctgggattccagatgtcatggtcattgttctacctcacctttgctttgtgttagtacccaccattgtgattttagctgccatggctgctgagagaacagcatatcgagagcattatctttctcgatcaggaaagaagaaagatgactaccgtaagagcaggagacagatagaacatgaaaacttttggaacggtcgctggattagcaaatttctgtgtcttctctgcgtggtggttctatgcaaacattggaagctttgcagagcgctcgtgaaggcttatgctatgaaccccttgctccatgcgccagtacttttcttcttcgttcctttactcatggtgtttgccatctacaagacacggtccatttag

SEQ ID NO: 30270 - DNA, 573 bp, Zea mays
  Peptide Sequence Number=SeqID_73645
atggctcagtttggtggtgaagttatggtctctgttccggcgaagctcgtgctgtttgaggatttatgtatgaacctatttgaaatctatttaaaaattttacaggtggatcctctttcccaccaagtcaaggtttgtgaattcgggcttgctaaaattttgggaggagttgaaatctttagaaaaatgaaggtcgcatgtatcagagatactgtgagcacaacagttggaagcttaagtcaatttcttgctcatagtaggctgatgaagttgatgtggttattgatccaaaagatatcgaccttaaaacaacaagatcgggtggagaagggcatcttcagcagttatgcggacgtcgagaagctattgcaggcactgtccaaggaggaggaggaggtcgtgcgggtgttcctggtcaccttttgcgccaacgtccttctcaacttctacgtgaagctcgatcctctagccaccacgtgtaggttgttagtcggaataccagagcggaatatggtgtccttcgtcatgctcatgcagggctacaacacgcacgctgacatgcatagagcatga

SEQ ID NO: 30271 - DNA, 234 bp, Zea mays
  Peptide Sequence Number=SeqID_73646
atggttgaggagaccacttccatgatcgaggctgcatatgcaggagaagacgatgtcgcaagatcaagagcgctgtcgcacgacaagtctgagctgtttcgccgcttcgagcgactggttcaggtccgtcgtgagctactagaagggaaatgcgaccttggaaagttcgtagacgaggtctgcctcatcctaaagtttggcatggatacagccaagtgtgctgccacgttgtga

SEQ ID NO: 30272 - DNA, 729 bp, Zea mays
  Peptide Sequence Number=SeqID_73647
atggctgaaaggtaccaacttccacgaagttgcgttcctccaacgacaaggtggaaggattgcgggtgtcccccatccgggggctcggaaggtggaaagacacgatgcataagggagcgcgaagacacggtcgcctttcaagggggtcaccctccttttaaaggcgactctccctacttgcgtccccagccgtcgtgggctgagtcttctccaacacgctccaaggtcctccccctacggcgtgggggctgggccccacgcgtcatgcaaactggcccagggcagaagaagccaaaccgccgcgcgcagtgcatgcaaccgcccagcggttacaagcgttcctccactttcgcccagaccagcgggggaagcgagcgacgcttcgccttcgccataaggaccgcgtcaaaaaagggaccgagaaagggggataccccgaaaaggatccttctccgtgaaggaaacaggccccgagcctccctactgatcagaggttcaaaggctggcccctcggaggggtttaacagccgcctcagagcacgtgggctccgcacccactactggtcagaggttcgaaggccggcccctcggaagggttcaacggccgcctcaggccactcgggctccgcgcccactactgatcagggcgggaacgatcttgtaacggaatcccatcagagggaggcatcgagccctcggaccccatcgaaaggggaccgggtccggtag

SEQ ID NO: 30273 - DNA, 342 bp, Zea mays
  Peptide Sequence Number=SeqID_73648
atggcccctgccgtcggtgccgaggcggaggcggctcgagaagtccccgtcgccgacgggatcaccgccaccatccgcgcttcgggcctccgagcaggcggcggcgagccgctcgtcagtcttctgttgctccgcaggcccacccttatcgagtggggttactcgcctgttgattatctgaaccgcttcaccaagcatgagtcgccccgtgtcaaggtgacgagtgagagtggggatccttggaccgcatcgccgtccgaggctaggtcggaccttgctgaaggtgttactgcccccttccagcgtcaagacccgagcctgcaagatcagagtgtcttgtag

SEQ ID NO: 30274 - DNA, 804 bp, Zea mays
  Peptide Sequence Number=SeqID_73649
atgacgcttcctgttgacgtggccggtctgtgccctaggcggggtgacgtgggggctcctccgaagccgaggttgagtctgtcttctgttgccgaggctgagtccgagccctggggtcgggcgaggcgggaggtcgtttggccgaggccagggtggagtccgagccctgggggtcgggcgaggcggagtttcgtcgtcttccgggtcttagcccgagtccgagccctggggtcgggcggagcggagttcgccgtcttccgggtcttagcccgagtccgagccctggggtcggggcggagcggagttcgccgtcttccgggtcttagcccgagtccgagccctggggtcgggcggagcggagttcgccgtcttccgggtcttagcccgagtccgagccctggggtcgggcggagcggagttcgccgtcttctgggtcttagcccgagtccgagccctggggtcgggcggagcggagtttcgtcgtcttccgggcctttgcagctttatgctgatgggggttaccagctgagaattaggcgtcttgagggtgcaccaaacttcaattcaatggctctacacattgcggtaatcaaggcgaacatgagtgaggtttccatactgggaatcgcgcgtgcaggcatgttgtccacggggcggagcggcttcacggtggaaggcagggcccgacgagcaattcccagctaccaggtggtcgattccgcccgcaaacggcacggacagcttcctgatggctcgcgcaagcccacaacccagcccaagattccagccaatggcgagaaatag

SEQ ID NO: 30275 - DNA, 174 bp, Zea mays
  Peptide Sequence Number=SeqID_73650
atggagagtcatgatctccgggcagaatgggaatcacggcttgtgggtggctatgagatcgatggttctggttatgactatggtgctggttgtcagcattgcaaccactgctcaggcgaagatgaagctgtggaaggagacttccaggagttccaagactacgacgagttctag

SEQ ID NO: 30276 - DNA, 252 bp, Zea mays
  Peptide Sequence Number=SeqID_73651
atggcggtaggcgtaggaacgtcgaacattgcgaacactcgtacacacgggaacgtggaccttgccgcggcagatggcagacgctccactaaatcgaactcagcagtggaggcggcgaactcagcagtggaggtagaggtcgaagggagggggagatgccatctagccacggagacaccatctagcttgaccttcttgacttgttattcggcggtggcttttgcgaaggaagaaattagaaccattaagtag

SEQ ID NO: 30277 - DNA, 369 bp, Zea mays
  Peptide Sequence Number=SeqID_73652
atggcaagccacgacgttaatcggtctcctagaatgatgatccatatcaggagcctcgacttctccctcaacgacgaaggcgaagtggtcagggcctcagaagcccgaccccctctgccgaggaatcacgacacgaccgcgagggccagcagaggcccccgcttcgactacacccccaaagtgcccatccgctttgggaaccttgatttcatcatcaaccagggggtgatagggccagaccagtgctcgtgcgacctcctccgctcgagaggaaacatgaaaaagcgagcaatcacaggacgggcgccgcgtgatgggtcctgtcaacgctctcaggtctccgaagctcaccatgtcgccgacgactag

SEQ ID NO: 30278 - DNA, 213 bp, Zea mays
  Peptide Sequence Number=SeqID_73653
atggcgcaatgctcagctctaaccatcctctttggtaagccttacacttcacgatcacctattcacccccctctaggtacgatgctctcagaaaggatgatgagggaaggtgaggccttgctcgtggaagcaaacagacgaaaccatataaccgagaggtggcatcatggcctcctcaatgctcagaatcagccatccgtcgtcgtcaagtag

SEQ ID NO: 30279 - DNA, 228 bp, Zea mays
  Peptide Sequence Number=SeqID_73654
atggcgtctccccctcccttcgacctctgcggcgatctcaacgacgacgacatcgatgaacccgtcaccaccgtccctaaggatcgtcgtctccctgccgccacccctacgatgaacggcctcaacgaccacctccttcgcttcacctgcagactccagcgccccgcccaaaaccctaaccctagccccaatccgccaccgtctccgcccccagactccacgctctaa

SEQ ID NO: 30280 - DNA, 192 bp, Zea mays
  Peptide Sequence Number=SeqID_73655
atgaagctgtggaaggagacttccaggagttccaagattacgacgagttctaggtgtgggttagcggcaacccccagtcggctgcctgtgaaggccgcgtttatctacgtttcttttccgcactttgatttattaaccgaggaggaagatagcatctcgtttgaagatatcattgttgtcagacggagataa

SEQ ID NO: 30281 - DNA, 597 bp, Zea mays
  Peptide Sequence Number=SeqID_73656
atggactcatgggtatcctcagttggaacagtaaacccatggcaaatccgccaagaacagagttcccgcggaggaagaaccctgatagacatcgttcaggctgttggggtcatgtggttacctgcgaaaggcaactggctgttggggtcgattggaggaatcaccacagcagacgaactcgagtttttcctcttaggcgccatctcgattctatcggcgagcagagtggaaggcgaattgcagaggggatttggaagccagaaagcaagaactagggcatggaaagcagaggcggctaaaagcacagcacttatgggatattcccgagccagataccgtttcaaaaagtgcccagtcagcacccggcggttatttccaaaacactgctgtgccacgtggtcacccggcggttatttccagaacaccgttacctctaaagcgccaacgccgactacaagttactcggcagctatttctgaaagcatcagtttgatgcccaagtcattcacttactgtctcaaaggaatcagcttcacaaatgagcaggacaatcatcaaggagaagccaacatcattctttcattagaaggaagataa

SEQ ID NO: 30282 - DNA, 630 bp, Zea mays
  Peptide Sequence Number=SeqID_73657
atggatgtggaacttctctttgaaagatcacttcccacaactttacaatttagtacatgtgcacaatttggtgatcgagcaaagtctgtaaccgataatgcggatgcccagtttcttattgataatggggatgattttttcaacaatcctcaatcttcagaggctagcttggctgaagaatcagtttctacaaatggtcaacagatagaacaggaagtttctggagatgctgtgccatcagatccatcaattgacaaaagcattcaacatgcgttggtggttagagactacaaaggggcagttaaccagtgtcttgcttctaatcgtatggctgatgctttggttatagcccatgccggtggttctgctctctgggaaaacacaagaaatcattatctcaagaacagtatctcaccctacttaaaggttgtctctgctatggtgggcaatgatttaatgagttttgtgagtacctggccactaagttcatggaaagaaactcacgcccacctatggacctaccccctcgtctcacagcatggtcgccggcttggtgtcgcccccgaccatgttgtctctagcaacacagcgggcaccgtcggtgcagcctcccccaccgacaaccattga

SEQ ID NO: 30283 - DNA, 201 bp, Zea mays
  Peptide Sequence Number=SeqID_73658
atgcaccttctcaggacctcggcgggtggagattggatcggctgggtggtggattgctcgccggcgagtcatgggcagggtaggatcctcgggtggtcacgatgggcgcatcgccggcatggctccgccaaggcttgcggcggcgctgcctcgggttggcaagggaagaagaagcccctgcaccgtccgtcctgggattag

SEQ ID NO: 30284 - DNA, 300 bp, Zea mays
  Peptide Sequence Number=SeqID_73659
atgaggtctcccattccggttatggtgggtacaagtgcggtcactgcacgacggccagtcggggtcagtggggcattgtacgccaaggcggtgagccctgatctgttgccagggaatcgatggggacggttgataaactcagctagtgcttttggcaaccaaaccacacagccaaacagctgcatgtctagaggttctctggaggagatggttgctgggataacttggccgaccaccctgccaccgggttggactgtcgagtgggaccctgcctcggctgaggtggagcatgaggagtga

SEQ ID NO: 30285 - DNA, 204 bp, Zea mays
  Peptide Sequence Number=SeqID_73660
atgaagctcctagagcgaggaatcgagctctgcctcaccggagacgcccggatcaaggtcacaggacttcacccgaccgccggcgaacgtagaccgagctccacggtatcttcggacttaggtcaaaactacagtgtgaggaagcacaaagaatacgaaggatggcgcagagccgaagctatgcgcaggggagcttcggcgtga

SEQ ID NO: 30286 - DNA, 375 bp, Zea mays
  Peptide Sequence Number=SeqID_73661
atgggcaagagcaagaaaggtgggagttcctcacaccattccggcgataagcgaaaacgtaagccgactcctccctcgaaggactttggcgactcggagtactcggaggaggagttctcctccgagtcagagggctcgctggtccctgcctctcccccggcgtcgtctgatgattcagacgactcccaggggatcgccatagaggtatggacctacatccgggccgtcgagcgtgctgggctcgagggctcggatgagtcggaggtctccttggacgaggaggactcctcggcctcgtccgaggagggcggcgatgacggcgatggcgacggcggcgacggaggaggcggcgatggtgacggcgacggcggctaa

SEQ ID NO: 30287 - DNA, 282 bp, Zea mays
  Peptide Sequence Number=SeqID_73662
atggccgtgatgggttcaacatcggaaaagatgtacctctgccaggaccttgtcgatgtaggcttgctgatcgaggaccctttaactggtcacatgcctcatcatggcttccacattctcgtacctccgatgtgttgtaatgtctgcgtgacgggtgaaacgctcttgggcaaggtaaagaatacagataccgaacttgtcaatggccgacctagatacagtgggaaagcttcagctcaaatgggaaggtcctttcttggtggtatcttcgtgaagacctag

SEQ ID NO: 30288 - DNA, 441 bp, Zea mays
  Peptide Sequence Number=SeqID_73663
atgcccaccttcatctcaaagccgaagcctcctgtaatagtctatgttatactgaaaaacatttgttcaccggacagctactgtgtgctgtccggtgtgcaccagacaggcattgtaggctgtccgcccctgaggacccagtgccagtacctgatccagtgccagacactcaggcagaggatgcggcattccatcagtttgaggctcagggcacagccgttcccgatgatgatgatgatgattttgggatcccgcctccgcctcctgtgcctccacgctcacatgatcatgaggctgggagttccagtgctgcccctacttcccctcctgccattgaccttggttgcgatcctccagtctcttactcagcagcaggctcatctggcagtagcccagcagcagatgtctgagagaatgctctccatgtctcagactatttag

SEQ ID NO: 30289 - DNA, 363 bp, Zea mays
  Peptide Sequence Number=SeqID_73664
atggcaacacctggggtgttacagagacgccggatcaaggtcaccggacttcacccgaccgccggcgaacgtagaccgagctccacggacctcttgaagccaaccccacccttcgtcggagactccctcgccgccggtaccttcagacttaggtcaaaactacagtgtgaagaagcacaaagaatacgacggatggcgcagagccgaagctatgcgcaggggagcttcggcgtgataatagaaaagggaaccgacttaaaggggaaaaggctatttggaacccgatggattattatagagttattagcaaatgtaaagggcatgggtgtaattttacatgggctgtctcgtgcctataaatag

SEQ ID NO: 30290 - DNA, 1071 bp, Zea mays
  Peptide Sequence Number=SeqID_73665
atggagccgccgccagtcccggcgctggtcctcgcaatcgacgagttcgcggccaacatcgaaggcgagagcggcgaggaggacgccgaggagagcaaggacagtcgcgtgcctaccagcagcgccatggcgcgcgcggtagagtctagtcctgtccagcgactcctccgcagtgcccaagtcgtccccgccctcggggaccgggctcgggtcctcggacatcagcgacgacggcagccgggcaacgatgaagaagccgttggacacctcctccgccagttcggcatcctcgtcagagctggtggtgtcatcgaaggctcgctgacatcctcctccgtggatgagagctgcgtcgcgatccgcgggacgacgagcaccctggtgcgtgcgtgcagcggtgtggaggcgaccgcggccgagagcagcgaggaggacgccgtcgtcctccgagtattcgggataccagccatccaaaaagctctcttccgaggcactgggcgccgacgcatcatccgtcttgacgccggcagcaaccggtcgctctccgactgggacggcggcgacttcggtagcggcaggcgccggcatggccggcacgtcaggtgggctcgggaccacgtcagcgtcagccgcctcccctatcacgatggccgcctcggcagaatagccggcctcgggaacctgctccacaacgacaggtgccgcccgagccccctgtggtggaacgccttgcgagagggtcggctgaacgacaaggctcggagcggcgctggccgcacaggccgacgccgtcttaagggccttccggggtgccaggttggtctggccatggcttcgcttgctgagggaaaaaggaaaatcacggctgagacatatgaatggaaagccaggacgaagacattccgagatacctacccgctccgggccatgatccaccgcgcctggggggaagtttcttggatcccagctcccggaacagccgccgaggtccgcttcgccggcaacttcggcgccacccttgctttggacacccggggagcagattgcccaggcactgtcacggtgacttga

SEQ ID NO: 30291 - DNA, 876 bp, Zea mays
  Peptide Sequence Number=SeqID_73666
atggggacatattcttggctaagatgtgtggaaatggatcttagcacacatatggtatgcgctcggttctacgccctggaactgggtgtgacagaagtgatggttcgtactctccaaactatccgggtcaacaccagctacgcccctccgccccgacaaatctctgtctacctagtggtagtcgaggaagttccgatgaatctccctcacattcgagtggagaatgaagtcatcctggaggacaactcggaggaacagctgtcgacgcccaccccattgacagagtcactggccttcgcagctaggtcatcgacatcggcaccgcctgcaccagccatccaagctcctgcacccagaggcgacgacctagatgactctgggacgaggatgacgacgataacgaggacgaagaagaacaagtcaacgagggataggggattcaagactctgtctgctcatgagtccctgacaccgctatccacctacgctgcttcggtcaccgatgctgccagacggactctgtggtctcacagccacacctaccggcagcagctgcacgacacgaattttaggcatcttcctctgcgtctgagtggagggagtcagaccagcatcgttctaggtgaagctagtgaggatcgcctcaacaccctagctggtgtggtggccgacctcaacaccgacctggacagtgccaccctggatctctctagggtgcatttggagctggaggatgcccatgccatgattgcagccctggaagcccaacttcaaggacgggatccgcctgaagcccaggtccccgccatggcgttgtctcctccccgcaagaggcttcgctatggggagcccggatccgtcaccaggttgctctag

SEQ ID NO: 30292 - DNA, 741 bp, Zea mays
  Peptide Sequence Number=SeqID_73667
atggaagaaacacacctccacgtgttcgacgcttcctgcccgcgccagagcacgctcacgcgtgcccccgcttgcccagcgccgcgcccgagccaagccagtgccatggcccgcgcccacgcctataaagccctcccaggctttggctgcactcttccgcgcaccctcaaacctcgccggagtttagctcgccgccgtttgcccgtgcgcagcgtgtccgcggccgcccaatccctctgtcaccatagaccggccaatagagcctttcccaactccgtccagccctcggagaagactgtgcacacctccgtgaagctccccgagcgaggaatcggggtttgcttcgccggagaggccagtccacgctccccggagctctcaaccccgccggagtacgtggaccgggtaatccactcaaccatccttcgattccttgtgcacacggtcactatgttaccccgtgaagctcaccgtgcccttggattgaaccagttcaccgtggtttggccggtacactcgccgccgacgagaacacccgcctgcgcgcgtgacccgggcgattccggccatccccgacgtcaagccgtacctcgacgtgaccgccagagcctccccgagccagccccacccttcgccggacctccctcgccgccggaggtagccccggatccagcccccgagcctgcaccagaggacctgtctgccactgctttggaaggcaagccccggttttatgcataa

SEQ ID NO: 30293 - DNA, 348 bp, Zea mays
  Peptide Sequence Number=SeqID_73668
atggaagaaacaaaccgccacgtgttcgacgccgtctgccgcgccagagcacgcccgcgcacgtcccgcgccgcgcccgagccaagccagcgccctgccattcccaaccccgtccagccctcggagaagactgtgcacgtctccgcgaagctccccgagcgaggaatcgaagtttgcttcgccggagaggccggcctaaggtcaccggacttcacccgaccgccggcaaccgtggaccgaggttctctggaggacatggttgctggagtgacttggccgtccaccttgccaccgggttggaccgtcgagtgggaccctgcctcggttgaggaggagcatgaggagtga

SEQ ID NO: 30294 - DNA, 672 bp, Zea mays
  Peptide Sequence Number=SeqID_73669
atggctatccggcctgagttcatagatagcatgttttcgggacaagatggagctggcgcactagaccagtccgatgaggcacctaactgtctgataacttccaacgatcggctgacaattcagaacgataacctcgaacaacactgttcagggtctagtggcacaccataccggcactatccagggtccgttttgcccccagaactaggtgtgacagaagtggtatcagagatggttcgtacaatccaaaccacccggaccaacaccaactacatccctccaccacggcaagttcctgtctacccagtggtagtcgaggaaatccctgtggatctccctcgcattcgtgtggataacggagttattctcgaggattgctcggaggagtttctacctacgcccactctgttggtagaatcactagccttcctagctggattgtcatctttgacaccgccagcaccagtagtccaagcccctactcccggaggcgacgacccaaacgactctggtgacgatgatgacgaagaagaagaagaagaagaaaaagaaaaggagaacatcaacgaagaagccaacggtgaacaccaggaccactacgtggggttatgtcctgtcactgaacattatacatcaatgttcgagacggggcactttcctaacctactgtag

SEQ ID NO: 30295 - DNA, 759 bp, Zea mays
  Peptide Sequence Number=SeqID_73670
atgggcgcgattaagtcaaggctcggtccactcaagggacacgatctcgcctcgcccgagcctgccctcgggcaagggcagccgaccccggaggattcacgtctcgcccgagggccctctcaagcaacggacacaccttcagctcgcctgaggcccagtcttcgccaagaagcaaccttggccaaatcgccacaacggtcgaccgtatcgcaggagcgtttaatgcaaagagtgaggctgacagcagccaagtccggtctcaggcgccataggaaactctgcctcgcccgacccagggctcggactcgggctcagccccggaagacgacgaactccgcctcgcccgacccagggctcggactcgggctcagccccagaagacgacgaactccgcctcgcccgaccccagggctcggactcgggctcagccccggaagacgacgaactccacctcgcccgacccagggctcggactcgggctcagccccagaagacgacgaactccgcctcgcccgaccccagggctcggactcgagctcagccccggaagacgacgaactccgcctcgcccgaccccagggctcggactcagccctggcctcagccgacggtctccgcctcgcccgacccaggggctcggactcgacctcggcctcggaagacagactcgacctcgacctcggaggagcctctgcctcgcctaacccagggctcgtaccgaccacgtcacagaaggggccatcattaccctacccctag

SEQ ID NO: 30296 - DNA, 1905 bp, Zea mays
  Peptide Sequence Number=SeqID_73671
atggggggtctctgctcgaaggtctcagctgtagacaagtcaccgagcgacaccgcgcttggccggaaccaggtcgccgatcatgagccaggggcgtcgttggagttggagaagccaccggtgtcccgagagtcagctgcgccggcaaagcggctggacgagcagctgcagtctttctcgttccttgagagcgtcgtccctggggttgcttttcatgccggggctaacacgggcggcgaagcggggtccaggacctcgccgcagctgaccaggtcgctgtcccagagggctggtgtgggcaaggcaaaagccggcgctgccaaggtttcagaagtgagctcaattttaggtagagctagcactgctgggcttgaaaaggcagtggaggttctagatacacttggcagtagcatgacaagtttaaattccagcagtggttttgtgtcaagttctgcagcaaagggaaacaaaatatccatgctggcttttgaggtggcaaatactatagttaaaggctctaatctgatgcgttctctatcggaacctagcataaagcatctgaaggaggtggtgcttcattcagaaggtgttgaaaaccttatatccaaagattttgatgaactgctcaagatggcatctgctgacaaaagggaagagttagaagtattcacaagagaggttgttcgctttggaaaccgttgcaaggatcctcaatggcataacttggaccgctactttgaaaaactggcatctgaacgaaccccacaaagttatctgaaagaaaaggcagaatcagtgatgcagaaactggtcacctgcgttcaaaatacagttgaattatatcatgaattgcatgctttggatagatttgagcatgattgtcgtcttaaacagaaagaacaggatggcttgagttcaagaggagacaacctggatatactgaagcaggaattgaaggtccagagtaagcatgttaagagtctgaaaaagaaatcactttggtccaagaatttggaagaggtgatggtaaagcttgtagatattgtccacttcttatatttggagatatataatgccttcggtcgtcctgacagtgaagagccacaagaacctgccaaacaccataatagattgggaccagcaggccttgcattgcattatgctaatatcatcaatcagattgacaatcttgtttctcgatcatgtgcaatgcctccaaatgcaagggatacattatatcatagcttaccacctaccatcaaatctgctttccgttctaagctacaatcttttgaagtcaaggaagagcttacagcttctaggatcaaagcagaaatggaaaagactttgcgttggcttgtcccttttgctagtaacacaaatagatctgaattaaactgcaagatatcagggcagatggacatgtcccgaatggagaccttgtatcatgctgacaaggagaagaccgaagcacttatcctggagctagtcgtgtggcttcatcatcttatcagcaaatcaggaaacgccagtggaggtgtaaggtctcccatcaaatctccagtcagctcaccaacacaaaagggtgctgcaatcacactgttgtcgggcaaaacaaacaatttgccaccgattctcacccaagaggaccaggatatgctaaggggtgttaagtacaggaaatttgttccaggaataagcaaaagccaagagtttgacacaaagtcaagtcacagcaaacatagtaggttgagcaagagcaacagccactctccggccagtggcagcagaaaagacttgctcccagttaggaggtcttccatgcttccagttattgacttcgagattgacaggaccaaggctttggatctaattgacaggcttgacaacctaaaagtacaatga

SEQ ID NO: 30297 - DNA, 741 bp, Zea mays
  Peptide Sequence Number=SeqID_73672
atggaagaaacacacctccacgtgttcgacgcttcctgcccgcgccagagcacgctcacgcgcgcccccgcttgcccagcgccgcgcccgagccaagccagcgccatggcccgcgcccgcgcctataaagccctcccaggcttcggctgcactcttccgcgcaccctcaaacctcacctgagtttagctcgccgccgtttgcccgtgcgcagcgtgtccgcggccgcccaatccctctgtcaccatacaccggccaatagagcctttcccaactccgtccagccctcggagaagactgtgcacacctccgtgaagctccccgagcgaggaatcggggtttgcttcgccggagaggccagtccacgctcgccggagctctcaaccccgccggagtacgtggaccgggtaatccactcaaccatccttcgattccttgtgcacacggtcactacgttaccccgtgaagctcaccgtgcccttggattgaaccagttcgccgtggtttggccggtacactcgccgccgacgagaacacccgcctgctcgcgtggaccgggcgattccggccatccccgacgtcaagtcgtacctcgacgtgaccgccagagcctccccgagccagccccacccttcgccggacctctctcgccgccggaggtagccccggatccagcccccgagcctgcaccagaggacctgtctgccactgctttggaaggcaagccccggttttatgcataa

SEQ ID NO: 30298 - DNA, 600 bp, Zea mays
  Peptide Sequence Number=SeqID_73673
atgggagcggtgaggcagatagcactaccatggggaagagaagtcaaattaggaatcatgacgaaaaaggggcatacgataggggccagagtggacaggggagcccccaaggatacggaacctggggcctccgacgtgcctagggtggcaaggatgccctcgctaaccgtcctcgatggctcacaaggagcaggctcggtaacacagttggcgccatcggccaggggagaggacgaggagctccaagaaatctacctcccccatggcggagaagatgtttactgcccgccagagatggacaaggcgaaatcaaccatcgacgcatcgagagaagcatcgcccatagaaatggctaaaaaattagagcttgcactcacgacatcatcgtcttcctcctcattagttgaggcagtctccatggtccctacgcatctaaggctcgaccttgcaatgcctcttatcgaccctgataccccacacccagttctaaggaacctcaaggggcgctccgggctagagtggaggaaggccacaatcggcggcaagcgaggacccgaggttgtgcagatagaaccactggtcacgctagcctttgtttga

SEQ ID NO: 30299 - DNA, 363 bp, Zea mays
  Peptide Sequence Number=SeqID_73674
atggacgacagggcaatcgtatcactagcaacctttcagtcgccgcctccgtctgaggtcgtcggggtcattgcttcagcacactgcagggagcggcgccacctcgagttcgactgcgcagatgcaaaacaaagaccaaataggccccggcagccccggtcttggatctgcctccgtggggagctgaacgagctaggcgacaagacagagaagtcattgcggaccgaccttcatcagttctcggccttgcgtcagaagctagcgagtgatgcggagcttgccgaaatggtgaaagctgcggagccttttgctcaaaaactgggagtcaccatgctcgattgcgctcccctttggatgggttaa

SEQ ID NO: 30300 - DNA, 291 bp, Zea mays
  Peptide Sequence Number=SeqID_73675
atggggctcggtgtatgtggctcgctctaccgagagttggatttgccccttgtggaggagtgcggtgaccatgaggatgatggttttgattatgattatggtaatgttttctggtattctttccatttggaaaggccaaacgggacaattgctgagtatgttgatgtgtactcacccttgctttacacaccaaacccccctccaggttgtccatgttacaaccactgctcagaagaagatgaagtcgtggaggaggacttccaagagttccaagagtacaataagttctag

SEQ ID NO: 30301 - DNA, 249 bp, Zea mays
  Peptide Sequence Number=SeqID_73676
atggggcgcatgcctgggacgatgacgcccacaccggagaacgcagacatagcgtgcaaggattcccccgccaaatcagacgtgtgctacactaattggaaaggaggggcggggtacgaggccgagatggatcgaccgatgaacgcgcagttgttacatggttgtcactggtttgttacgctggcggggatagagatgacaagatggtcccacgtgactgtggcggatgttgagtccgagcgcgcatga

SEQ ID NO: 30302 - DNA, 792 bp, Zea mays
  Peptide Sequence Number=SeqID_73677
atggcggcgaccgccttcgcggaacgtattgcttcgggggcgctaacctcggagtttgcttccgagagacggcggcttgagggaaggattgaacgccttcgcacacaacatacggaggcagtaagggacaagtcagtggctgagaataaaagccacaaattccttgagaagctctcggtggagtcggagctgaagagcgtccgcagctattgtgagaagacagaggcctccacccgtgccgaggttgagcggacgcacacgctatttgtggaagcctaccgcgagctcggcacacagacttctccttttgataaatctgtggaggaggtgggtcttcgctttcttgggtggctgaaggaggagctggagtcactctcatccatcgtgacgggcctcatgtcctacgcatctcttgttacctgcgagagggcggcgaatgccttgtctcgagaaggatgtaggcacttcgaagtattcgatcgggcgagcgaggactttgaccgcggaattttcgaggttgaagatgatgtgttgaagcggtccgttggggcactttatgataggatgtggggtcctcatggtcgtggcaccgtccgagagagggccgatcgagcactggcgcagatgatgaatgaagaagaagttgacgatctcaccggtcttgaaagctcgatgactcggatggatggcgcggaggaggcgagaggtgaagggctctcagcacctcaggatggctccggcgaagaccatgcggcggtgtctgctcctgcgcaggttgaagagatgcgctag

SEQ ID NO: 30303 - DNA, 369 bp, Zea mays
  Peptide Sequence Number=SeqID_73678
atgtcgtcggtagcgagggaatgggcaaggcctagcccactactcctcgtgctcctctcctgccggagcagcatcccactcgaccgtccaacccagtggcagggtggcgggcggccgaagtccggcgaggacgatcttggttgcccggtgaagttctgccgggtccgagagcttgggaagcttcacaagctcttagcgaagctaaccgagcggctggcgcggcttggaagcgtccggagtgggctggccacggtggccgaggctcgggtggcaatggcgggcagaaaagagctcgccagagctaaggaggggcgtctggccggcgaaggatttgagctagggatcaaggtgaacacgcttggtctttag

SEQ ID NO: 30304 - DNA, 690 bp, Zea mays
  Peptide Sequence Number=SeqID_73679
atggcgcttcctgttgacgtggctggcctgcgccctaggttgggtgatgtggaggctcctccgaagccgaggtcgagtctgtcttccatggccaaggccgagtccgagctcctgggtcgggcgaggcggaggtcgtctacagaagccagggtggagtccgagccctggggtcgggcgaagcggagttcgtcgtcttctggggctgagcctgagtccgagccctgggtcgggcagagcggagttcgtcgtcttctggggctgagcccgagtccgagccctgggtcgggcggagcggagttcgccgtcttccgggacttagcccaagtccgagccctgggtcgggcggagcggagttcgtcgtcttctggggctgagcccgagtccgagccctgggtcgggcggagcggagttcgccgtcttccgggacttagcccgagtccgagccctgggtcgggcggagcggagttcgccgtcttctgggacttagcccgagtccgaaccctgggtcgggcgaagcggagcttcctatggtgcctttggcagggcctgactgcctgtcagtctcactctgtcaagtggcactgcagtcggagtggcgcaagcggcgctgtccttctgtcaggccggtcagtggagcggcgaagtgacggcggtcacttcggctctgccggggggcgcgcgtcaggataa

SEQ ID NO: 30305 - DNA, 120 bp, Zea mays
  Peptide Sequence Number=SeqID_73680
atgcgggcctgcggccagattcgcgcggtgccgaggcaaagcctacgcgaccgcggagctcagaaggatgaagacaaggctgacaccccggtcccagtcgccagccaaggaggaatatag

SEQ ID NO: 30306 - DNA, 291 bp, Zea mays
  Peptide Sequence Number=SeqID_73681
atggtggaaggtttcactccagcatgggccgccgttccggacccaacagaggcaggggacaatgcatcacccaatggccttgctctcgacaatggaagcatgctctgcctccgccttgcactggggctgcttgactgctctagttggttgctggggcggggaggcgaggtgcctgctgattctgcctctagaactgacttcctcctgtctgactgttctggcgattctactgctgatgctgggggtactgcctctgaaactgttgttgaggcgggcactgattctgcttga

SEQ ID NO: 30307 - DNA, 705 bp, Zea mays
  Peptide Sequence Number=SeqID_73682
atgggctcggtgtatgcggcttgccctgtcgagggtggattgccccttgggaaggagtgcggtgaccatgaggatgatggttttgattatgattatggtaatgttttctgttattctttccgtttggaaaggatggctcgtcttagacacaccgcatggaagtcagtcattcctttcttgccttctcgactcgcggagcacccgcttcgtcgtctggaggtagagtctatgaggagctgctctcctgtgcccccactggaggcaccccctgcaccacccctgggcgtcccggccgctggagtagctgttggaggagaccccgacgacggagcacaatcgtggggtttacccggaccgctgggaagtgacttgtttggtgcgccgtttggagaacagtctcgaggtgcggatgtctgctcagagcattactctatctctgagcaggactcggctgaggcagccatgcaagatgccgcacggcgtgcgctttcgcactactgctcagtgctcggtggggtggtcgatggtctcgacctgaggtattacccccgccatccatctggcagcacaggaggcgtggttgtctcacctattagtgaggacaatcctaggttgagcagcatagtcaacctagccgtcgtgctaaacacggagctggaccatgctttagatgagctgagtagggctcatgctgagatcgcctag

SEQ ID NO: 30308 - DNA, 336 bp, Zea mays
  Peptide Sequence Number=SeqID_73683
atgacaaggttgacctggctaggatataagcagcaggcgacgtacggacagacgacgaactttgtagcaggggaagccgctgagctgggcgatggcgggggaggagcgccatgggggagaagaggcggccgggcgccatgggatggaggccgagttggagctgaaggggacgccggccatggaagagggagaggagggagctccggccatggagatgaggagagggagaggaacgccgacctgagcagtggcgcaagggagcaggcggctgcagaagaagcctacgcgtgggggataaggcagaggacagcggctgaaaaaaaaatcaacggatga

SEQ ID NO: 30309 - DNA, 651 bp, Zea mays
  Peptide Sequence Number=SeqID_73684
atgggtcgacgcgagacggagcgcgaaggggggaaaccagagggagacaggcgtaaaggggaaacccgcggccttcgtgtttgtcccgcgcccaggtcgggcgaggcggagtccgtcgtcttccggggccgaggcagagtccgagccctggggtcgggcgaggcggagttcgtcgtcttccggggccgagcccgagtccgagccctggggtcgggcgaggcggagttcgtcgtcttccggggccgagcccgagtccgagccctagggtcgggcgaggcaaagttcgtcatcttccggggccgagcccgagtccgagccctagggtcgggcgaggcggagcttcctatggcgcccgctgtcgggcgaggcggagcttcctatggcgcccgaggccggacttggccgctgtcagcctcactctgtcgagtggcacaacagtcagagcgacgcgggcgatgctgtcttcttgtcaggctggccacctttgcattaaatgctcctgcgatacggtcggttggcgtggcgatctggtcaaggttgcttctcggcgaagactgggcctcgggcgagccgaagctttgtgctgatgggggttaccagctgagattaggagtcttgggggtacccctaattatggtccccgacacatag

SEQ ID NO: 30310 - DNA, 1155 bp, Zea mays
  Peptide Sequence Number=SeqID_73685
atggaacctttccaaggcgtctcgtgcccacgtccgctcgcgggcccgagccttcttcgcgtccttcttctccttcctcttctacgcggcgaccctccacgcagctcggtccactgcgtcctccgggaccggtggcgggaaaggcttgtgagcccctacctcctggagacggacgaagagtctcgactctgggagagggcaccggcgtccggcttccccaacgtgacggctacccgcctgtggaggtcgtcgacggaaaggggatccgaggacatccgcaaaccctccaagtcgacccccggcgtcatctcccaaagcggcagccgcctgctccgtcaaagggagcaccctccagcgatgaatggcggcaaccacccccgcggcggtgagccctcctttccacagctccgccaaggccttcagaaggggctggagattcttttgtctatcgctcggggtcccgtagcgtcagttatcggcggcggcggtcaccactcgctgagaaaacgacgggagcctcccgtcgtcatttcggagatagaaccaccgacgctgccaccctttgttcgaatacgcgaggacggcaggaatgtactgcagtgcccccgcctccctcagctggaggatgcagccaccggcccgcaccgccatgcggacccttctttcccccatcggcgaggcaaaaagctccgcggagaagagatgggtccacaggtcccagtgagggtcaatccccaagtatccttcacaaaccgccgcaaagatggcggcttgcgagatggagttgggactgaggttgtgcagctccaccctgtagacatgcagaatcgcccgcataaaacagcttgccggcactccgaacccccgctcgtgaaaggagacgaagctcacgacatacccccgcggcggggacggggcggctccgctcgaaggggccatccactccggctgcgagtcaccggagaaagggcgaagcaaaccatcagcaacaagggcctccaggtcatccgccgtgacggtggagaaaggccacggatcgcgcggcggaacaatggtcacccggtcggccatcaccaagcagaagaggtggcggtggaaggaactgggtgcacggtttcctttctctggctattccctcgggttgcgaaaacctaa

SEQ ID NO: 30311 - DNA, 96 bp, Zea mays
  Peptide Sequence Number=SeqID_73686
atggcggcacggatgaagctccttggccttgagattgagctagcaggagatgaaaagttggtggaggcagagacttgtgcgccgttgatgacttga

SEQ ID NO: 30312 - DNA, 687 bp, Zea mays
  Peptide Sequence Number=SeqID_73687
atgacttctcacggatcctcagacgaagggaatgcacagtcccacactgatggacttgcacgagagggtttcccccgtatcttgtgggaggtacttcaaggagctggttacacgacgcctccccagtatgcggtgcagctgtttgagaagcaccgagtgccccgctgtagggtgaggatgaccctagagcctcttcccctacagccaggctggcgtttgttggattccgagtcttttggatacagggtggaggatactattgaggcgattgctcttcacggactgaccaccttctatggtttcaccccttggagctatccactcaccccattggctaccaagatcaccttggataacagagaggaacttgtggtagacttgtccactgagatggtggaaaaagacctacaagtggaacagatgtcaaatgagatccaagagcttgaggagctagtgggaaccagggagaacaccattgaggttctcgaggatcagcttatcaacactcagcagcaacttgcggaggccaaccagcatctggatatgcaccaccaggagatccaggacatggaggccaacgaggatgtcgacatcgagggaggagaggagcctgcctccagcttggacactgctggctcaggaagaccaccttcccctgagtcgagcgttgcctcgtttgctcactag

SEQ ID NO: 30313 - DNA, 306 bp, Zea mays
  Peptide Sequence Number=SeqID_73688
atgtacatcctcgtgctggagcaaggagttgctcaagaggtagccccggatccagcaccagagcctgccattgaggatctgcctgccccagctttggaaggcaagccccgcagactttactcctcacgtgacctgagacgtggtctcccattccggttatggtgggtacaagtgcggtcactacacgacggcagtcggggttctctggaggacatggttgctggagtgacttggccgtccatcttaccaccgggttggacagtcgagtgggaccctacctcggctgaggaggagcatgaggagtga

SEQ ID NO: 30314 - DNA, 561 bp, Zea mays
  Peptide Sequence Number=SeqID_73689
atgggaccactttatttgtaccactgggctggtgagagcgacgtggttgacactgtggtagtggtcctttttctgccgcttggtgtcgaagtctacgctggatcccccagtgatcaagtgaatgaccccgcgataaggttgctcggcgaagccttcttgcttgggtgctggcggtggggttttgatgtggaggatttgggtgatgtggtggtggtggggggaggactcgtacctcttgatggtaatggtacacgtggttgggttggtgatggatttgctcgttgtgtggttttgttgagaggggtactcgtgacagcgaactgtgtctccggtgggatgttggttggcaatggtgtgcacctgttgctggttgcgattgtccctgccggagtcggactgcgccagcctgacccacgttctgctggactgcagagtgtccttgggtttcctctgagattctatcttgcgttggtgcagctcctcggacctggcatattttttgaacaattggtagagctcttgcaagtttttgggcgggtctctgatgcaatggttgtataa

SEQ ID NO: 30315 - DNA, 423 bp, Zea mays
  Peptide Sequence Number=SeqID_73690
atggcgcagagtgtcgtcttcttcgcagcagacctagatcttgcctcccgggagggaccccgtcgggttaaggtaactgcagaagcttgcagttttgtggttcaggatcatcctctagatgccaaccatggtcacagtctgagagtcataggggtgagtgacaagagcattggcctgttcttgcgatatgcattcaccagtaggtacaaagaggttctaagcaagtcccacagttcttccatgatgacagtgcccaagtttgttccacgccttacaaaagaagaaactcgagtgtttgaatctgccagagaatcgatggctggtttcaagaaatggcgagtaggtggggtgagactacaaaaggcttccattcttggccggaagaggaagacaaagctgcctgatggaccacctacttcttga

SEQ ID NO: 30316 - DNA, 297 bp, Zea mays
  Peptide Sequence Number=SeqID_73691
atgccccaatggctcaactatgttaatgataaggacaaggttcgatttgctggtagtgagaccaccttggagtcgagccagggtgtgatcactagcgccgaaggcttctgcagatccacgagctacattatcagacttaggcaactgggaaggagtagctacacaactgtggtagaacctcctaaattatatggacgacatgcacatgtcttcatcccaaagacctcaaacgactatgcatgtgtaccagataacttaaaagaatatgtctcaagtatcccaagagaactcggataa

SEQ ID NO: 30317 - DNA, 399 bp, Zea mays
  Peptide Sequence Number=SeqID_73692
atggtcgtaggaccatttccagcatctcacagaccagcaccggcccaaaacaaaatcagcccatatgccttagaggtctggacaacaggctcttcacttcttcctcttgctcacgacatcccaaaccaatacctcgcatccgtcgctaaacttctagggaagattctggccgcgcctagtgctatggcgactgtgagtatcgcaatactgtggctttccctacgggccgcatcctcagttcaggagcatcacgaccacctccagtgctgcggccagcacgaccactgccggatcgccccaggcgtcgcggacatcttcaatcaccagtgcttggctcaggtgtgtctactcaggaacgcccagatccccaactgcaggttcgccaactcaaatctctaa

SEQ ID NO: 30318 - DNA, 183 bp, Zea mays
  Peptide Sequence Number=SeqID_73693
atggcatcagacacttcggcaaactctgatctgttccatcacatactgaatgaacttcaagcccctcctcttatcggggtgggggatggtcttgaccttatgttacccttccattggtaccccaaggaccttaaactattcacctccttgcattttcattcagctcttgatgcctatgactga

SEQ ID NO: 30319 - DNA, 591 bp, Zea mays
  Peptide Sequence Number=SeqID_73694
atgggcgccatcctggggaagcccacaatgctcgtgggtagtggccaagaagatcggagccgcggggttcatgctgaaggaggtggtgcgatgtctagctcccagatcgtcgtcctcacgctcctcatgctcctggagttctggtcagcgagatgttcgtcttcgtgctcagcctcgtcctcgagtcgtcgcgcaagcagcgagagcagcgtgggtctcatcatcaggatcacacaaacaggatccagcaaaaagcagatccaaaacggatcaagcatatttgcaaggtcaagtgttcatttaggacatccaaaacaaggccctggttttcgaacatgtagatctgcagatggcaaatcccacagccccctacttacgaggatggaacatgcatatccaaatgagtcatcagaattccctttggctcatctgtgcattacgatggtcgtgaattctacagcagcactttatagtggtcgattactcagcagccatgatttcatggcctacgttcagacgggctccgggaagccgatgaccttctacttccccatcaccggcattgtagcatcccaaaaattcaaatcttag

SEQ ID NO: 30320 - DNA, 561 bp, Zea mays
  Peptide Sequence Number=SeqID_73695
atggaacagagagcaaaaggtcttcgtgtctggaggggcacgaacaggcttgcatctaggctatataatttgaagcgtgacactaaaccattggtgtcgttatcagaagaccagtcaaatgacttgacagatggcgataagaaccaagaagccaattgtagtaatgtggatgatatgtatcatggcctcactgtcaactctgagattgattctctgcctgatcctaaggaccagaaaaggcaaaggattgaagctatattccatgagtatgcatattctgataatcttgtagtgctggaagatgtgccaactgaaggttattttgctcacgaacaagagactgagctgattggtccagaagttgaaataccagaatcttgcttcagggctctcaataagccaaatggaatgacatccgattttgtgcaaaataaaaccaacttgaaggcacagacctcaggctgggatgtattatatgacaagtttgaaaagttaaatggggattgcttactcgataagccaaatggaatgcagtcatccaatgaccttgcacacacttaa

SEQ ID NO: 30321 - DNA, 588 bp, Zea mays
  Peptide Sequence Number=SeqID_73696
atggagatgggtagcatagaagcaggagctcgcacggcagttggatctcatcgccaggcaggtggaagtgtggttccagaacacacatgttcagataacacacatgttcatgcttatgctgaccccacacagacaaatgaaacaaacatcaaaagcaagtcactgcctattatttttgacctcctaatcttctacttcattggatttgcattgttctggctggaggcttttctgagcatgtgggtcattcaggttttggaaggtggtgcagttgtcaggactcttagagatcatagtattccttctaatggggatatcaatgaaagtaaagtttcttatttgttattattatatttcttgttggtgcaacctgaaaatgaaaagccaattactgaaagcggagatgaaatctcttatgaaggagcaaaggcaaaaagtccaatatatttattatcgggactacgaaggagatcaacgattgtgatgcgtaatcttacatattcagaaccaaaggctgatgaactggcagcatcagaaatggcagttgcatatagctcctcgaattgggtattattagttgagggatga

SEQ ID NO: 30322 - DNA, 1335 bp, Zea mays
  Peptide Sequence Number=SeqID_73697
atgggagggatagacaccgtgattgtgggggacgccgagattgccgcaggggaggccgagcttgctgcgggggacaccgagattgccgctggggagggcgagcgccgagattgccgcggggagggccagagggcgaggcggacgggatgcggggcggcagaacgtctaagaatgtatacatggtttttattgtgctttccttcacaaagtcgccactttggactgaccaggtggcaggcggcggcgcttgcggcgctggccggctgggtgtgggcggcctccttctacgacctcacgcgccgggcgcgcgcgctcgtccagccgtgggtcacgcgccaggtgcacgccgagacgccaaccatcctcaggttccagaagttggagcacaagatgctggacaatttcttctctgtgctgtcatgtgttgtctccgtgcccttctacacgggattcctccctctcctgttctggagtggacacggtaggctggctgggcagatgaccctcctcatggctttctgtgactacctcagcaactctgtcaaggatatggtgtcagcccctcggccatgctcttcgcccattagaagagtgacagctacagaagatgagagggaaaatgccatggaatatgggctaccgtcatcgcatgctctcaacactgtttgtttgacgggatatttgttacactatgtcctgacatacggagaacatggcagtcttatagttgctgcgggtttatctctagctctctactccaaatttgcttcatgtccagccaagcaatcgaaagatgtcgtcaaggcactgaagaaacggattggccataagaatccaaaagttcaacttcttgcgctaacttatttggttgctgacccaaagatcaaggaggacgggtggacagctcatccgcatccttgcaaacgagtagctccataccgagaggcccttttgcttgccgagaagcatcagaatctggagactaacagtgacatgtcggctgcggtggttgcagatgctcctccgcagcaggaaatggtagcagcaaacagaatgggccaaccgcagttcttctctttattgaatcatctggtggtggacgaacacaagacgattcttgaagaggtccccagagaagaaaatggcaccatttccgccgccaattatgctggtaatggcagcatcaacgacgacgacgctaccttgtatcagggaggtgatgtgctaccgaataggtcggcaagtatatttgagaacgacttggcctcgaccgggaaagccatgcagcagctactccgggtcctcggtttccagatcggcacaacaagaacgtga

SEQ ID NO: 30323 - DNA, 696 bp, Zea mays
  Peptide Sequence Number=SeqID_73698
atggccgctgccgtagcttgcaggcgcgcggcgctcctgcacgggcaccagcagtggccgcagcggtgggcggccgcgccctgcccccgctccatctcgcagctcgtcaagaccaacggccgccgcgccttcctcgtagacaccctcgccctggtcaggaagctggagtcgcagggcgtgcccaccaagcaggcggaggcgatcacctccgccatcacggaggtcctcaacgacagcctcgagagcatctccgagtccttcgtctccaaggccgagatgcagaaggcaagcgcctcgcctttggcattgcgtggatgtgagatgctgcaggagtccaatatctccaagttcaagtcccaagtgcagagctcgcaggaaaaccatttctctttactacagcgggagactgagaaacttcgcggagatattgataagatgaggagtgaactgaagtatgagatcgacaaggtcaccgcaggacagcgattggatctgaatcttgaaagagggcgcatacgtgatgagcttgccaagcagaatgaggaaaccactgagcttaccacaaagcttgacaaggaaatccactcactgaaggcccagttggaggcagcaaagtacgatgtcatcaagtactgcataggtaccattgtttcgatctcagccgtcggcctcgccgtcctccgcatcgtgatgtga

SEQ ID NO: 30324 - DNA, 870 bp, Zea mays
  Peptide Sequence Number=SeqID_73699
atgcaggtgctctgcgacgtctgcggcggcgcgccggccgccgtgctcttctgcactgacgaggccgcgctctgctccgcctgcgaccgccgcgtccaccgcgccgacaagcgccgccgcatcccgctcgtccagccctgcggcgacgactccgccgccgccgccgccgcgccgctctgcgacgtctgcaaggagcggaggggcctcgtgttctgcgtggaggaccgcgccatcctgtgccccgactgcgacgaccccatccacagcgccaacgacctcaccgccaagcacacccgcttcctcctcgtcggggccaagctctccgccgcgctcgtcgaccaggcgcccccctcccctgacgacgacgacgacgacgtcgccgagcccgacgctgtccccgccgcctgcgcggccaaggcctcgtctcttgagtccggcggcggcagcagcatctccgactacctcaccaacatctgcccgggctggcgcgtcgacgatcttctcttggacgactcgtcgttctcagcgccatctgtacgtgcccgtccccggatcgcgctaacggatcggtctctcggtggttctcggaagcagaagaccggctacagcgacggccacgatcaggtgccgtccgtggatgccgacctcttcgacgtggtggccagcggccggccaggcaagcgcgtcggcggcgcagcgctgggcttcgacaaggccccggcctccgttgtggtcgtcccgacgcaggggtgcgtgacggagaggacttggaacagcgacagcgacgtgttcgcggtgccggagctcccgcagccgccgccggccaagaaggcgcggccggcgccggcgccaactttctggtgcttctga

SEQ ID NO: 30325 - DNA, 1002 bp, Zea mays
  Peptide Sequence Number=SeqID_73700
atggcgcccatggcgggaaagtcgggggaggtcgtcgacgctgccacggccgtggctgcgacgggggcggtgaggcgcaagcgctcggcgtgggcatggggatgtgcacagagcgagaggcggagggaggagaacgtggggacgatggtggagatgacggaagcagttgcaagggagaagatggacacggctgatggttggcgcgacattcgacgacgtgagcgaaagttgttcgtaggggagagggcgcggagggtctatggtgattggctgattgcggaggacggcatccgacggaaggcgtccacaacccgtggttctgccttcgcactcgcgataccttgcccccgcacccgcttccgtcaatcacgcagcgctcacaccccattcgccccagatccagatcccgccactatcatcggcgcgtcctcccccgcccgccccaaacccggatcccgcggctcccccgtcaagctccccagtctcccccgttcgccgtctctcctcaccttccttccctccccctccctgctcggtgctcacacacgcccgccaccgccgacgtcatacagacccactcctcctttgccctggtgcgagcaggcttcagcagcaaaccccgtaggctgctcccggacgagggagaacgcgcgggcggcggtcgcgtcgttgccgaaccctagcagcttctcccccggtgtcggcggggagagggagaaggcgaccatcgcagcgcacccgctgtacgagcccctcctggaggcgcacgtcccctgcctacgcgtcgccacccccgtcgaccagctcccccgcatcgacacgcagatcgcggcgtgccccccgccgcttgccacggccgccggggccgcgaccgcgggagggccgtccggcggggaggagctcgacctcttcatgggtgtagggaattggggatttgggattcaaggaaggtttggtttactgggtctgggtgacgtgtacctggaatcgctttggctataa

SEQ ID NO: 30326 - DNA, 207 bp, Zea mays
  Peptide Sequence Number=SeqID_73701
atggcgccaccgcgggttggccgcgccgccgtgcccaatgtgcggggattggggggaattcacatttttactgtatattttatttacatgtttggtgtgatgttgattttggctatactatatcattatgttaatgggaacatggagcgaccacccgggaaaacagtgctaccacaagggtataatgggacgcccttggctgattaa

SEQ ID NO: 30327 - DNA, 828 bp, Zea mays
  Peptide Sequence Number=SeqID_73702
atgggggccaggctgcgcatgtcgtacaagctggcccgaagcgcgaagaagccaatggtcaagaaggcgaaccgccgcccaaggagcatgcaaccgtcctgcggatacttcccttccatcttcaccgaactagtggtcaaggaggcaaaccgccgcgcaaggagcatgcattcgccccgcggttgtgtgccccctcagcttcgctgcaaccagcggtccaacctctggcatgggggcccaggcccacatgtcatacatccggcgcgccggttcctgggtgcaggaaagtcgcaccgccgctcgcgccaatatcgcgccttctcgaggccgtcgcagaaggctaaggagataaatcttcaaaaccgatgcagcgactcgaggcaccccgcgcatggcccaacaaagacattaagtacggaggtcacgggccagtcagccgcgggggcaggcatggcagtcagcatgaccataggcgggccgagacgacatcgtcaggcccagaaggcgcaggacccctatgcgcacaacccggacccccgaagtaaagcagcccggagccattggatagggctctatccggagcgcctccgctccccgcttagccgaaggtctaatgcggcctcatggctgattgtccgtgacgtaggccagcgggcggagcgtgacataagggctctgagccgtgcggcctccacattcattgcggaggggacacgccgcctgtccacccttctgataggtgatgtgcccccacagcatttattgcgtcctgtccattccgctggcaggcggcgccagggccaccctgcagacggtgcacctgtctag

SEQ ID NO: 30328 - DNA, 447 bp, Zea mays
  Peptide Sequence Number=SeqID_73703
atggccgcctcaatgcgagcgccattccgaagaggtcctcgccctcgtcctcctatggggggcaacaacgaggccattaaagccaaagagttggaggctcggcggcaggtggtgctggtggtctcgccagcagaggcaaccacctctgcagtgggcagcctcaccagcggtggcgaccacctcagcaccaacgacagcggccacctccacgccggcggcttaccgacaatggcggccgcccccaccgcgcacgaagaggtcctcgctcccgccctcctacggaaggaagaagcgggtcaccaggccatgcggaaggcaggaccccaacttggctcgccttccaccccagcgaggatgatgaacatccttgaagctgagggcaggggggaggccgcagcctggctcgcttctctccaccacgagactggtgctcatccttgtagatga

SEQ ID NO: 30329 - DNA, 210 bp, Zea mays
  Peptide Sequence Number=SeqID_73704
atgggggatcctagccgaggattgggagaagaagtctcagaggttggggttgttctccatcaactacggaggtgggattatgatgatgagcactgctctatgtgctcaggcctctcacgaagtccagattacaacatagaagaactttggacgcagccaaccagcgtcttgttcaccatgacacactccttaccgtacaggaaacactaa

SEQ ID NO: 30330 - DNA, 2763 bp, Zea mays
  Peptide Sequence Number=SeqID_73705
atgcagccgaggtcccgcattcggggccgcgacccgccgccgccgccgccgccaggaggacgctaccgtcgccgatccccgccccctccatcaccgcgccaccagcgccgcccacgtgatccgccccctccacagcggaagaggcgcagctccgagctgcccccgccacggcgatacgaggaggatcctctccttaacggcttcgcccccgctgccgagaggcgttcacgcggcgacatcctgctcgaggccggccgtctggccgctcactacttggttgccaaaggcctcctctccgagcaccttctcctggcaagggaggacccaaatcacaatcccatttaccgccctgagccccccgctcccgctcccgctcctcctccgactctagctccctctagttacgggaggaagagagacgaggacgacggcccgaggtggcggcggagtggaagtggagccgaggaccaggggcgtggctcaaggtgggacgacgacagggaagccaagaggtcggggtgggacaggaggagccacagctttgatggaaggcgtaaatgcaacgatgacggtggcggtgatgctgaccgtagcggccgccggacacgcgactacgatgagtcgaagagaccaccgatgtcaaggtcctattcgcataacgatcgttgggcttcagctgatgccagagtagatcgaaggaggagaagtaggagcaggaccaggagctactacagtggcagcaggagagatccagatttgctagcaggcacccgtgatttggatcgcaccaaggtgccagactctggcattgttcctgctgctggtggtgatggaggcgtgcacgatgcggatgccgatggaacacgaaagcagctgaaggttcctagttcaatgttggtttcggagatgaatgacagtgctgtcgaagctgcgcctatagaagaggatcatgctcaagacatgtctgaaggtgaggacggtgagtttgcagaagagatttctgaagacgaggatggtgagtttgcagcctctgatttgaatgatgaagatggtgatgaaatggatgacacccaaagacaaccgtctcacatgcatgttcatgcatctgaatctatcgaggaacctgtccatagacagtcccagctcagcaatgctgaagagggaatggaaactggcattgcacacgtggatgcatatatggtagagccattggcagagaacaatgttttctctgaaacaaggtatgaaatggaggctccacaaaatggagctgaaactgctgttgttgatctttacagagatgcagaagagcaaccattgacagagaataatgattgctccgaagcagagaatgagatgaacaagagtgagtttgaaactggtgttggcaatcttgatagagatgaacaagagcaactattggcagagaataataatggctctgaagtaaggtatgacatggaggctccacaaagtgaggttgaaactggtgttggcagtcttaatagagatgaccaagagcagctgttgacagtgactgatggttactctgaattaagatatgaaacagggactccacaaactgaagttgaaactgttattgatgatatcagtagggatgagcaagagctgccagcttggtacaaaatttttgatctcaacgtcattgaaactccattgggctgtgaggtttccgagatttcttgtggtcatccagcagatggtctttgtgattctgtgcctgattcagttggtctggtgaaccaagaagcaaacaatgatacctctgaaattcaaggtcaagatggtcatgcaggggccaatcaagtgttagaagatgagtctgatttgaatagctatgatctgaacaatgaagctgatgaagatgcacaggatgatactttagaaaatcaagttcaagacgagaatgtagaggataatcacttactggaggatgggcatgatttgacgaggtatgatgtgaacaatgaggctggtgagcatgcacatgataaccacctggtgaaaaatgcggaaatacttctaaatcatattatggttgcatgtatatcagataattgccatatgaacaatgagaaaatgcttctaaagcaaaatgtggatgagcaacagatggagaacgagcagatgcttatagatcaggtcactagtgttcaagttttggatagtcaccatgtgcacgatgaacagttgctggtaggtcatgctgcagatgatcatcaccaaatggaaccaaatcccatggctttttctttgggcgttcatgatctggataactactatttgagtagcaagcaaatacttctgtataatgatgcaggaggtatacaccatttgaaggatgggcaaattattttagatgaggctgcagatggacaagctagagttcacaatatgggccatggacgaacgattcctggaattgatctggaagatgattatgcacaggtgtctgccatcagaaatacaggagaatgtctagaatctgctttcgagggggagaggaaaatccatgacacctggacatgtttgctgtactgtacagaagtgatacctcgcacgaatacacggataatgttctacaagaacatatgtgttctcaagactagcaaacctcaagttttggtgacaatcctaagactaacacacaagcagcttcttcttcaactgtcaccagattttcaaaactggtgtactggaaatgatgctgtgaaggcacaggtgattcccatttctcagtga

SEQ ID NO: 30331 - DNA, 858 bp, Zea mays
  Peptide Sequence Number=SeqID_73706
atgacctctctgacgaaatccatgtgctgggagctggcgtcgatcaagaaggaccggctgaacggcgtcggggtggccttctaccggaagccgacgagcaacgagtgctacgagtccaggaggcggcagcagccgccgatgtgcgcggacgacgacgacgcggacgcggcgtggtacgtccggctcaacccgtgcgtgcaccgcgtgccgacggccccgtcggagcgcggcgcgcggtggccctccgagtggccgcggcgggtgcggttgccgccgtactggctcaacggctcgcaggccggggtgtacgggaggccggcgccggaggacttcgcggtggactacgaccactggcggcgcgtcgtcgacgggtcctacctcaacggcctgggcatcgactggtccagggtcaggaacgtgatggacatgagagccgcgtacggcgggttcgcggccgcgctctgggagaagaagatctgggtgatgaacgtggtgaacgtcgacgcgcctgacacgctgccggtcatcttcgagcgcgggctgctgggcatctaccacgactggtgcgagtccttcagcacctacccgagaagctacgacctcctgcacgccgaccacctcttctccaagatcaaggatagatgcgcggttctgccggtggtggtggaggtggacaggatcgtgaggccggggggcagcatcgtggtgcgcgacgaggccggcgccgtcggcgaggtggagaagctcctgaggtcgctccactgggacgtgcggctgaccttctccaagaacgacgaaggggtgatgtacgccgagaagtcgggttggcggccggagcttgtggaagagccgtcgtaa

SEQ ID NO: 30332 - DNA, 1860 bp, Zea mays
  Peptide Sequence Number=SeqID_73707
atggccggcgccggcgccggcgcccgcagctcgcgcgccggcggcgggaagcgcggcgccgcgtcgtcctcggctgccgccgcgtccgcgtgcgtctactacgccacgacggcgctgctcgtcgcgctgtgcgtcgcgggggcctacttcctcacgtccacctcctccgccgacgggggacgccgcaacggtcaccgcgtaccgccacactacacgctcctctttcgcgccgttggcgccgaggaggagccgcggcccgaccggagcgccggcgccgcgctgggcgacccgcacgccaggcctgacgaggagcgtgtgtcggacgaggcggcggcgggcgtggaggaggagcacgaggccgccgcggtggccatggaggacgtgaaggccgaggacggtggtggccacgtggccgccggagacgacgaggcggccagcgcgcgcggtggggaggtggaggaggagaaggagcgagaaacagccgtgctggaagagagcagccgcgagcagcgagaacaggagcaggagcaggagccgcagctggagatgccacacgagcggcctcggggtgccgccgctgccgtcgaggagaagaacctggacggcggcatcgaggaggagagcaacgcggggcagaggcagcgagaggcggagcagagcgcgctcgaggagcagcaggccgcagccgggagccagttgcgccgcgaagcgcaggaggacccgcaggccgacgacggtgccgacgaagggacagaggaggagcgcggcagggagcagtcacagggcgaggaggaggcgcgctcgtcgtcggtgtcagggtccagcggagacgccgacagcggagaggccgtgtcggagtcggagcacacggggacggggcgcgcggacggaaatgccagtcaggacgacggccgcagcgtcgaggtcgaggactcgctcgccgccgaaggccgcacggaggagcagaaggcgtgggcgacgcaggccgacgagtcacaccgggagacggaccgccgcgacgagggcggcgacatcgacggcaacggcgcggagaacgccggcggagaggagcgcgagtggcgggtgtgcaacgtgaaggccggcgccgactacatcccgtgcctggacaacgagaaggccatcaagaagctgcggccggagaacttccggcggtacgagcaccgggagcggcactgccccgacgagggcccgacgtgcctcgtcgcgctccccagcggctaccgccgtcccatcgagtggcccaagagccgagacagggtatggtacagcaatgtcccgcacacgaagctggtggaggtgaagggtcaccagaactgggtgaaggtgagcgggcagtacctgacattccccggcggcggcacgcagttcatccatggtgcgctgcactacatcgacttcctgcagcagtgtagagatggtaaggagggttactctgccttgttcggccagtccgtccgcgccatctcgtgggggaagcacacgcgggtggtgctcgacgttggctgcggcgtggccagcttcggcggctacctgttcgagcgcgacgtggcgaccatgtcgttcgcgcccaaggacgagcacgaggcgcaggtgcagatggcgctcgagcgcgggatcccggccatctcggccgtcatgggctccaagcgcctgcctttcccgagcaagtcgttcgacctcgtccactgcgcgcgctgccgcgtcccctggcacaccgacggtggcgctctcctcctcgaactgaaccgcgtcctgcgccccggcgggttcttcgtctggtccgccacgccggtgtaccagaagctaacggaggacgtcgagatctggaaaggcacgtaa

SEQ ID NO: 30333 - DNA, 249 bp, Zea mays
  Peptide Sequence Number=SeqID_73708
atgatgaccgtgtcaaaaaagggagctctgcctcgcccgcccccaagcctcagcctcgacctcagcctcggcctcgggagaaggtctccgcctcgctcgacctcaggccacagcctcggcctcggcctcgggagaaggtctctgccttgcccgaccccaggcctcggcctcgggagaagtctccgcctcgcccgacctgggcctcggaccgactacgctacaggggatgcatcattaccctactcctag

SEQ ID NO: 30334 - DNA, 306 bp, Zea mays
  Peptide Sequence Number=SeqID_73709
atggcgaagcctggccatggtactcctcctggtcctctcctgcgggaagcagtaaccctcttgaccatctatcccggtggcagggatgaaggccaagtcacaccatcaactaaaatcaaggcgtacaatggatcaagcagtctcattagctgcgagaagcagacgattcgaatcgagtttttatccttgaaagtgaccgcacttgtacccaccataaccggaatgggagaccacgtctcaggtcgcgtgaggggtaaagtctgcgggcaggttcactcaggatttaataatcattatgctaagtga

SEQ ID NO: 30335 - DNA, 795 bp, Zea mays
  Peptide Sequence Number=SeqID_73710
atgcacgacctcctacttgcgctagagctgcttggttgttctggttggttgttcgggcacgaaggcgagctgcctggttattctgacgctcatactgacttcctccctgctggttgttctgaccgtactgctgttgccgttgaggaaactgtctctggtactgctgctggtgctgacgctaatgatggtgctggtgaccttgagggtgaccttgctcgaattgctgggtccttcaggcacatggtaatgacaaaagttgtccctgaactcctcccaggtgatggcttcagggtctacatgggtggcgagggcatatctgccatggggactcacatgcaagagacaaccctaggtgctaggaggaggcctgagccagatttttgccaagattcgcacgcttgcgatctcggcgagctgttgaacaagggcagaagaacacttccacgtgttcgacgtgctctgagtgcgccagagcacgcccagcgcccgaccccgcgcgccccgcgctgcgccgagccgcgcccatgtctcctgctcgcgcccgtgcctataaagcccaccgaagcttcaaccgtactcccccgcgtgctctccacctcaccggagccagagatcaccggcgtttgccctgcaaacggcgtgcccgcggccactcaatcccctgccaccgtcgaccggcctgcagagcccttcccagccacgcccgaccctcggaagagaccgtgcatgccccgcctctacgtcatcccgtggagctcatcgtgccgtttaattgggctagattgtcgtggttag

SEQ ID NO: 30336 - DNA, 437 bp, Zea mays
  Peptide Sequence Number=SeqID_73711
atgagcaccagcattttaaactctgcccctcaggatcatatccagtcggctcatcagatcttcagtggggattctcctgttcgtaacccgggtagaatcgttgacgccactatacaaataagcagggagctggagcaccgacgccaggggcaggagcaggagcaacatgactcttccccctcgctcagcagaagtggagtctgggaagcagccttccccttcacttcaactagagatgcccctacacaccataaggcaccccagctgctggaagaataccctgacaaaaacgacaacgaacccggtggcagttcagcccaaatggagcttctggaggagcatgaacaaaggatgatacctgaccatactctgaaccgtcgggtccgtcatgaagctctgaactgtgctaggctcaccgacatatggcctgaggactg

SEQ ID NO: 30337 - DNA, 594 bp, Zea mays
  Peptide Sequence Number=SeqID_73712
atggctatcacatctgggcaagaacttggtgaagaggtggagactcggaaacccgaaggcccttctgctccggttcatgatgatgtactgacagaggcccttcttgaggttgatgccaagggttgtgattgtgcacaagctgctgtttgcatatttgatgaagacaaagaggaagaagaagaagaagtcccgctgatccacaagaacagccgacactatagagagacaactgacgatgatatcccggccgtctgttcagaggtcccagagggtgggctttccttgcttgactccgctgggcaggaggtccctcccccatttgaaacagtaaccgcggaagtaaacagggcggtgcggcttaccagcggcgagggaggtctggcgaagggtggggcgggcgggctcatcggcggcatgtgctccggcctgctcacggcggtagagttcaatccaagggcacagggagcttcatggggtgctaaggagtctacccgtgcaaggaatcgaagaagaactcaccgtggagctcggtctacatatgccggcggtcgggtgaagtccggcgacgtcgatccggtgtctccggcgaggtag

SEQ ID NO: 30338 - DNA, 546 bp, Zea mays
  Peptide Sequence Number=SeqID_73713
atggaggtccgtcaagttatccttccgacaccttcgccctcaaagaaggacaaaaaggaattcatcaccacaacaactcctttctaccccgatgtcctcttaataggggggagattggagtcatctcccatctccgacgatgagccaaccatgccaggggaagacctccccagcgagaagctcagcgatggaggaacagatgccggaatattcggcgacatcacgaagctggggagcgggacccagctcagcccgtatcccgggatgaagtctcggaagcgcaagaacttggacagaataacacagccatgtgttcgacgcgccctgtcaacgccagagcacgccccggcgctcgaccccacatgcaccgcgccacgccaagccaaacccgtgcccacgcccgcgcctataaagccgaccgaggcctcgaccgtacgcctccgctcgctctcaacctcgccggagcgcaagttcaccggcgaccgccctgcgcacggcgtgccagcggccgcccgagacccgaccaccgtagaccggccaccctag

SEQ ID NO: 30339 - DNA, 309 bp, Zea mays
  Peptide Sequence Number=SeqID_73714
atgaaggcgatgtatgctgcgaagcctggagtcattgtattcaaaggggagatgtcttggctccatgtcagagccctgctcgggcgtggtggaagtgttcccgaggcgttggttgagccatcccttacgtgtgccacggtcgacggagtggccgcttatgggattcgctgtggagcaggcagccgaggccgagctcgggtgaggcggagaaatcgcccgagggccacactcggcgtcgggagagacggagattgcgcccgagggccgaactcggtgtcgggcgaggcggagattacgaccgagggctag

SEQ ID NO: 30340 - DNA, 360 bp, Zea mays
  Peptide Sequence Number=SeqID_73715
atggcaagttctcaagcgatggataggcttgcaacaccgattcattgcgacatgctagacttccctgacgcgtggcgcacgatcgttaagtggctaacgctggcgaggacgatcccggccagccgttgtccaagtgggtacggcgggcacaatgatgagcgagcccgagctaatccaagtgccaagatttttactcctctccgttatccaattgagctgggcacgaatcacagaggcgggcgcgaatccgggcgcgcggctcactggcagcgaggttctctgaacctgggatatttgtatagcactgtaccatcggattccttattcagaacacctgacatccagaattgcagtgcctag

SEQ ID NO: 30341 - DNA, 81 bp, Zea mays
  Peptide Sequence Number=SeqID_73716
atggagggtacaagtgcggccactgcacggcggcggccggggtcagtgggagcattgtatgctcaggcagtacctccttga

SEQ ID NO: 30342 - DNA, 459 bp, Zea mays
  Peptide Sequence Number=SeqID_73717
atgcagtacaatggatcaagcagtctcattagctgcgagaagcagacgattcgaatcgagttttttatccttgcaaggcagatcctctggggcaggctctggtgctggatccggggctacctcctgagtaactccttgctccggcacgaggaccggcagtcgagtgaagtccggcgaccgtggactggattctccggcgaggcaaagtctgattccttgctcagggagcttcaccggggcatgcacggtctcttccgagggtcgggcgtggctgggaagggctctgcaggccggtcgacggtggcaggggatcaggtggccgtgggcacgctgtttgcagggcaaacaccggtgatctctggctccgagcgcgtcgaacacgtggaagtgttcttctgcccttgttcaacagctcgccaagatcgcaagcgtgcgaatcttggcaaaaatccggtgtag

SEQ ID NO: 30343 - DNA, 165 bp, Zea mays
  Peptide Sequence Number=SeqID_73718
atggccatgatgggtccaacatcggaaaagatgtacctctggcagaataagacaacacgcaatgggagtggagagatggcaagagtagcatgtaccctccatggcaagaggatcgacggtggtgtatctatgctctcggttggcgtgaacctgatctggtcttaa

SEQ ID NO: 30344 - DNA, 105 bp, Zea mays
  Peptide Sequence Number=SeqID_73719
atgcccatgaccggccatcgctccctcaacgtcgcatttccaaaaggtggatgtatcgataaaatgtgtgctggagttcatatattagtggttgtgctacattga

SEQ ID NO: 30345 - DNA, 339 bp, Zea mays
  Peptide Sequence Number=SeqID_73720
atggggaggagggtcgaactgctgcaatccatggacagggagccaactgagctgcgtggaagaggaacagggagggcactcggccacaacaatagcaggggagtggaggccggtcgtcgacccagacgtggccatggagctgtgctcggccatgggagaaaaactgtaggggagggttggcgcctggtcagccgagcgccatgggcaaactggagaggctgctggcttcttgctgccggagaacaggaggacagagggaggcgaccatggctggcatcgagtgagtctagcgacttgcagggagggaacgccatggggaagctcgggcttgagccatag

SEQ ID NO: 30346 - DNA, 834 bp, Zea mays
  Peptide Sequence Number=SeqID_73721
atgtcggggcactccatccccacacatatcaaccgtcctcatcgattccctggcaacagaacagggctcaagaccttggcgtacaatgctccgattgtccccggttgccgccgtgcaacggccgcacttgtacgcaccatagctagcatgggagaactcgtcttaggtccagtgaggagtaaaatctgcgagcaggttcacttagtcaataaggtaaagcttaatctcactactggaggttttagtggcatacttagccatttagaattgggtgtggccaaggtctggagtgaccggggcaaggatcacgtcagcaagacttaccagcggcgatttagctctggtgaagtggtcgacgacgtcggggtggtcacgccggtcacgtcgatgtgcgggtcggtgtcggagatggcaggatttggtcggtcctcacgtgtaggtgggggagctcgtcggcgacgagagattcggcctaaccacggcgggatagctcaatccagtgagttggggagcttcacgggaagtcagggaggttgtaggcgcaaggatttggtaaatggctcacctggtagcccggtctacgtgcggtggcgggcggccgaagtccggcaaggtcgtgctcgctgctctggtggggaagggtctcggctcaagcttggaaaagcctcatggcctctcggggaagctgtccaagggctcgggctaggctgggggtcgacggaagaggctggctacgacggccatgcttgggcagtggtggcaggcggtggcgcttgcctttcgtggcgaactccagcgaccactggctcgggcggggttagggtgcacgagtga

SEQ ID NO: 30347 - DNA, 459 bp, Zea mays
  Peptide Sequence Number=SeqID_73722
atggaggagacacttgatttagttttgactacctttcccacgagggttttccctccatcttgtgggagggtttggctgaccctggagtctcaccctctgcagccgggatggcgttcccttgactccgagactgtcgggttcagggcggactacaccactgaggccgcagcgctaaaagccctgacaaccttctgtggatatcatcctctggagatgatgatgcacccactgggactcttccccgccgagaagagggatgaccccatgtggtgcaacagaaccatgcagagcgacaccatgtcacacctcactgatctcgctcagactactaagatcactctcgacagtcgagaggacttcgtggtcgacgtcttcgaaattggtggaaaaagacctacaggtggaacaattaagccagcgcatcgcaactctagagcagcaggtggaaatccggaataa

SEQ ID NO: 30348 - DNA, 480 bp, Zea mays
  Peptide Sequence Number=SeqID_73723
atggcgagactgctccggcgagggctcgtcggcggcgaggagtccggcctaaccagggcacaattgatcaatcaaatgggccagagagcttcaccagggatcaaggaaggcgggcggctgaagtccggcgaggacgatctcgattctctggtgaagttctgccgggtccgagagcttgggaagcttcacgagctattggcaaagctaaccgagcggctagcacgacttggaagtgaccgaagtgggctggccacggtggccgaggctcgggtggcaatggcgggcggaagagagctcgccggagctaaggaggggcgtctggccggcgaagggcgtgcgcgggcgaacgccagtgggcgctctggcgcctggcacagcatcaagcacgaggcaacgcagagagaggtcgagttcaagcgcggattgactccaaatcttgagattatggccatgatcccattgagagatctcttccactaa

SEQ ID NO: 30349 - DNA, 81 bp, Zea mays
  Peptide Sequence Number=SeqID_73724
atgggaggaggcaagctccagccggacttggggaaggagcgccgagcgccaaggagccaggaaggattatcggatcgctaa

SEQ ID NO: 30350 - DNA, 438 bp, Zea mays
  Peptide Sequence Number=SeqID_73725
atgggaggagcagaggcgccatgggaggaggcaagctccagccggacttggggaaggagcgccaagcgccaaggagccaggaaggggcgcaggctgggaggtgttgtgcagggaggtgcgtgcagagctgttggaggagaacagggagctcagccatggcgctcatggcaacagcggctaccaaggccggccatccaaaatggaggaggcgagcgcctagagcaggggcatgggcgccatggggaggaggacagggagccgatgcatcgcgccatggctgagggcgtagggagcttggagctgctgcgagatgggaatggctgcgcaggggagggacgttgtccttgggaggagccaccagcttggaggaatggagctcggtggccatgggagtcgcaggggaacaggggcgccgcgccatggaagggagctcggtag

SEQ ID NO: 30351 - DNA, 249 bp, Zea mays
  Peptide Sequence Number=SeqID_73726
atgaagttctaccgggtccgagagcttgggaagcttcacgatctattggcgaagctaaccgagtggctgacgcggcttggaagtgaccggagtgggctgaccacggtgggcgaggctcgggtggcaatggtgggcggaagagagctcgccggagctaaggaggggcgtctagccggtgaaggatttgagctagggatcaaggtgaacacgcttggtctttggctcaagggctcaaattcagaaatctga

SEQ ID NO: 30352 - DNA, 219 bp, Zea mays
  Peptide Sequence Number=SeqID_73727
atggaccagattagaaggggacgcgtagttccaacttgcctggccgcggtcgcgtcgtcgtgccccacgggcaagggcaagagtacaatcctcggcgccatagatcttggcgccgagctcggtgccacgtcgacgccgcgtcagctcgtggacgacagcgcggcaggtagctcggcgccaagatctatggcgccgagatgtgtaaactcggcgccatag

SEQ ID NO: 30353 - DNA, 372 bp, Zea mays
  Peptide Sequence Number=SeqID_73728
atgccgagccagctcgctagcggcccgtggcgcgcggggcggcggagtgcgactaattgcatcatgatgggatctggtaccaacatgtataaactcgacaccacccacctcccagggtggccaacacaaatgctttctgcactagtgaatgcaagtgctgtgttcaaaaatcataaggatgtttatttgctagccatacttttagagaacactttaaaggatgttgctggtgaatatacaagaagggaggcgcgcgagctgctgcgcacagatgggagagcgagctgtgggagcgggctgggaacagaacggctccgttccattaattttttggagtgggatggttccggatctgaggagaatattccctaa

SEQ ID NO: 30354 - DNA, 513 bp, Zea mays
  Peptide Sequence Number=SeqID_73729
atggagttgcgttcctccaacgaggaggcggaaaggcggcggataccccccatccgggggcttggaagatgggaagacacgacgcttaagggagaaagaagacatggttgccttacgaaaggagtctccctccttttaaaaggcaactctccctacgtgcgcccccagacgccgcgggctgagtcttctccaacacgctccaaggccctcccctgcgactcgggggctgggtcccgcatgtcatgcaagccagcccagggcagaagaagccaaaccgccgcgcgtgggaccgggaaagggggataccccgaaagggatccttctccgcgaaggaaccgggctccgagccccccattactgatcaggggttcgaaggctggccctccgaagggttcaacagtcgcctcagatcgcgtgggcccgacacccactactggtcaggggttcgaaggccagccccccgaagggctccatggccgcctcaggctactcgggctccgcgcccattactga

SEQ ID NO: 30355 - DNA, 714 bp, Zea mays
  Peptide Sequence Number=SeqID_73730
atgaccatgaagctggatgtcccggcgaggcagaagagccaggacgcagagcagaacggcaggacagcggccgcgggcgtcctcggcattgacgagccgtggagccagccgaaactccgtcaccccggcgacgcgcaggccgacgccgacgccctggtgccgccgctcaacttcgccatggtcgacgacggcatcttccgctcgggcctcccggacgccggcagcttccgcttcctgctctccctcaatctgcgctccgtcgtgtacctgtgcccggagccgtacccggaggagaacgcgcggttcctgcagcagaacgggatccagcttcaccagttcggcatcgaagggagcaagagtggtccggcagtgccggatgccatggtggtgcaggaaccattcgtctacatccctgaagagatcatccgagaggcgctcaaagttattcttgacgcaagaaaccagccggtgctcatccactgcaagagaggcaaggcaagcctgttgcgttccagttggttcagctcagcatcttgcttccacgatactactacagttgcatctggtttccctgacgctgacgcgacgagtgtttttctttcagcatcgcactggctgcgtcgtcgggtgcctgaggaagctgcagaagtggtgcctgtcttcggtgttcgacgagtacctgcacttcgcggcggcgaaggcgaggagcactga

SEQ ID NO: 30356 - DNA, 237 bp, Zea mays
  Peptide Sequence Number=SeqID_73731
atgacgacagaccgtgaaacgcggggaagctcgaaaaggcttcgggttttaagaaacctgataggttgcatcgttaggcaaagtatagaacaactcgtcaccttctatattcttgaatacctgacgaatttccgtggaaaagtgaaggcaaatcgttggtccaaatcaggcaaggaaccgacgggtaacggacgtgtgcagaccgagtcacgaggcaatgaggcattgcagatttga

SEQ ID NO: 30357 - DNA, 486 bp, Zea mays
  Peptide Sequence Number=SeqID_73732
atggctgggggcaggggcgaccagcgtgcaggaaacaggtgctgcggcggccatggaaagaaactcggccaggggctcagcgggagcacctgggaaggggcctggacgagcagaatcttggagctcgcgtccatggcagaggaagggaaggggaggagacgccatggctacctaggcgtcgagaggagcagaggcaccacgagctgggaacgagagggtaccggagggaaagcaggaggccagatccgaccgcggctaggagagcacgccggcgaggcttggtggagctgggagagggcgcctgtgccagaacaggatgaggaccagagggcgcatccatgcgagcaggaggcttggtggcttgcagttggaggcgatggcggatgtgtgatgaacgttgagcacgtgagaggcagaggtaagctaccgacgatcgaagctgggagatcaagcaccttcgttggcttaaaagtgagcgacgactga

SEQ ID NO: 30358 - DNA, 216 bp, Zea mays
  Peptide Sequence Number=SeqID_73733
atgggggcggtccacggcggagcggctcggcggcggcataaatctactccggcgaggaattacacacggcagaaggcattacacgggtcgattggggtgggagaggttctttacctcaaggcgggctccggggactcctcggcggcggcaatggctcgacggtggcccggggcggcggtggcggacccccgcggctgcacggggaacggcgggtga

SEQ ID NO: 30359 - DNA, 122 bp, Zea mays
  Peptide Sequence Number=SeqID_73734
atggtggcccgccgcgacgccgtgggtcgtcaccagagcgcagtcggagaagagcccgttgctgaggatcctggtgagcagcagattgaagtagctgagcaggagctcattgaaggcaagtt

SEQ ID NO: 30360 - DNA, 510 bp, Zea mays
  Peptide Sequence Number=SeqID_73735
atgggggacgcccgcaatccttccgccttgtcgtcagaggaacgcaacttcatggaagttggtacctttcagccatcattcggcttcaaggattttcatcaggcggcccggcccgcatcccctcaccggcggtcacccaagacggtgacctccagttcgatggtggggagaagcgaatcgggccgcgatcttggtcccgccctcagcttcaaggatgttcatcatcctggctggggcgggggccgggctgagccggagctcttccccccgtgcgggccggctgtgaggacctaccggtgcgccttgtcgactgtcggcgttggtggagaggcagatgccgccgtctgtgctgacgtggtggcagccggaggaagcttcccccgcgtcgaggccgtcggcgccgcctacggaccggcccccggctctttggctttaatgtctggttcgcgtcccttgagtggggacgcgaacgagagccttccggtggccgcgtccgtcctgggaccatag

SEQ ID NO: 30361 - DNA, 882 bp, Zea mays
  Peptide Sequence Number=SeqID_73736
atggcggccctctcacagagggttggccacgcggggaaggacgggatggcgctcgcgcaaggccgctcgctccctcccgcgtggacgcttgtaaccccctactgcaagtgcacccgacctgggcgcggggctaaacacgaaggccgcgggttccacctccccacgcatgtctccctccggctgctttttcccccctttcgcgttccgcctcgcgccgacccatctgggctggggcacgcggcgacaattcactcgtcggtccagggaccccccgggggacgcctgacgccgtatcctgacacacgcgcctcagtcggccaggccgaagcgaagactgacaacaagtcacgatcaaccatcgagttcggcctcgggcgcaacaggaagctccgcctcgcccgaccacaggctccagccttgggaggaggtctccgcctcgcccgacccccggactcggcctcgacctcggtctcgggaggaatcgcgtcctcgcccgaccctggcctcgacctcaagagaagtctccgcctcgcccgaccttgggctcgggccgaccgagccaacaggggatacatcattaccctatccctagccagctcaggctgcaaggaacaagaccggcgtcccatctggcttaccccggcgacgggtaatgatggtgccccgcgtgcaacccatgacgcctgtggctctcagccccttacggcagcaaggagatgtcagcaggatccttgccgcactgccagctatgctcctacagggctcaggcgcttctctgacggccacgctatcacgtatacagggctcaagctctcccccgacagccatgttggcatgtacacagcgcttaggcatttctctaccggacacgttagcgcatag

SEQ ID NO: 30362 - DNA, 363 bp, Zea mays
  Peptide Sequence Number=SeqID_73737
atgcatttcctcctgagccctccatcttctgtcgccatcgtcgccgtcctcctcgtgtggaaggttcttttgttatcccgagtccaccgtaaccacgaatcgagccccgggcaatcggagtccgagtcgtggcagatatccgaattgttgcaaagtctgagtccgaatggttgccgtggcggaagtatagatgtccaaacgggccacccggcacggacccggcccgaacccgtttcggcccgtgtgtcagacaaatgcttgatgttcctaaaagcttcaccgatgaacttgacgaacttgaaggtaccgaggaagattttctttgcttgtgtgaagcccatggcgtcatcatatctccagtga

SEQ ID NO: 30363 - DNA, 669 bp, Zea mays
  Peptide Sequence Number=SeqID_73738
atgggaatgcagcagcagaagaacgcgcacgtgcccaagttcggcaactgggacagcgacggcaacgtgccgtacacgctcttcttcgagaacgcgcgcaagggcaagggagccggagccgccggcggcaggatgatcaaccccaacgaccccgccgagaacccggaggccttctccgtggccgcgccgtcgccgccgccgggccgccacgagcgccgccccagcgacgcgccgccgccgccgatgtcgcccaacccctactacgccgccgggtcgccgtaccaccgccacgccgccggcgagccgccaaggagggccgccgggtacagcgtcgaccagtcgccggcgcacccctacagctccgagagcgccgggtacggcctcgtcgccagctccgtcgaccgctcccgcgccaagggcgcctcgcgcggcaacgagacgccgacgaggggctcggcggtgcccaagttcggcgactgggacgccaacccggcgtcggcggacggctacacgcacatcttcaacaaggtgagggaggagaagcagacgacccaggcggggaagccagcggcgtacggcaaggacggcatgcgtaccaacggccccaagcagcacgacgacgacggctacgtctcatcgacgctggttcctctgggtctggggatgtaa

SEQ ID NO: 30364 - DNA, 282 bp, Zea mays
  Peptide Sequence Number=SeqID_73739
atgacgcttcctgttgacgtggtcagtccgtgccctaggttgggcgaggtggaggctcctccgaggtcgaggtcgagtctgtcttccaaggtcgaggtcgagtctgagcccccgggtcggacaaggcggagaccgtcggctgaggccaaggctgagtccgagccttggggtcgggcgaggcagagttcgtcgtcttccggggctgagcccgagtccgagtcctggggtcgggcggagcggagttcgtcgtcttccggggctgagcccgagtccgagccctag

SEQ ID NO: 30365 - DNA, 363 bp, Zea mays
  Peptide Sequence Number=SeqID_73740
atggagaaaggccacgggtcgcgcggcgggacaatggtcacccgatcggccatccccaagcggaagaggacaggcggcacctttggcaggcgaagcaggcgacgcttcacctccgccataatgaccgcgtcaaaaaagggtcagaaaaggggatactccgaaagggatccttctccgcgaaggaagcgggccccgagcccccctactgatcagaggttcgaaggctggcccctcggaagggttcaacagccgcctcagagcgatcgggcaccgcgcccactactggtcagaggttcaaaggccggcccctcgaaagggttcaacggccgcctcaggccactcgggctccgcgcccactactga

SEQ ID NO: 30366 - DNA, 837 bp, Zea mays
  Peptide Sequence Number=SeqID_73741
atggctcgtagaagatcccaaaagaacaagaagacccaggagatcaaggaagaagaagaagaaaatgaccgatggagatcaaacgatgaatccacctctccaagaggtttgtcttcccatttcgattcccacatatgttgtgtggctaatgaaaatgatagcggaagcacaaacgaggatgaggaggaagaaagaagctttgtgcaactctacgctcatctaagccaagaagataaggcggtcatgctcaaacttctagaaagagcgagagagcaaagtgaagctcgtcaaaggatagaaaatgttctctccatgaaaatgctacactttgatgagttgactaaagaacatgaagagctaaagtgctctcatgttgatttagtccaaagcaaatcttcctttgagctagaatttgcaggaacgaaaaatgatacatatcaagagctcaaagaagaaaatgagaggctaaaaatgggcttgacacaacttaaagggaagtgcattgctcaaccttctcaagataaccgtgatcacatggtgaagaagcttgagacgggaacaaccgtggcatgcactaaatcccttgaagaaaatgtcaaggacttgaggattgccaagaggaaggaacaaaagaagaaaaccaatacctcttccaaaagcctcaaccacgcctccataaaaggtaacatccaaggcaacccaaaattgcaacttgtgctagaaagggaagatattgatgttgtaggaaataaagaattatcatgtgcgaaaaatcaaggcctacaacatggaggaaagtcaaaggatggtaacttctatgcttttaagtacaagtaa

SEQ ID NO: 30367 - DNA, 870 bp, Zea mays
  Peptide Sequence Number=SeqID_73742
atggggtgtaccggcgtcgccttcttcttgccgtcgttggaggagcacgtccttgtgggggttggcacccttcagccaccgctcggcttcaaggattttcgtcgtgcaacccggccgcattccctcaccaatgcttcaaggatcttcgtcatccttgctgaggcggaggctgccacgcgcttggctccctggcacgagcggctctggcgctgcttccggtgttgccccccaccgccggtcctcacacccggcgggtgcgcttttggagcggacgccgtacgccggtgcggtgttggtgggcaggtggccgtcggcgctgaggtggtggcagcaagagaaggtttctccgccaacgagaccgtcggcgccatctgcggccggacccccgactctttggctttgatggcttgtcctcgcccctcgagtggagacgtgggcgagggcctcgtcacagcagcgtctgccatgaggtcatcgctgctgctgtttagctgcccgaagcgggggtcgtcgtcgctgctggagtccctcggctcagtcggccttgccactctaggcctctcttgctcagtttttagaaccctcggctactctgcgatgagccgaagccagaggcagtggtgttggcgtggacggaggcggagtcggctcgaaaagagactccatcggcctaggagctggtggcttcccaggccgaggaagatgtggcagcagcagctggagcttggccaagacatccactggcgcggtgctggcgtcctcccttgggtggaggtcctttcacccgggtcgccgtccgaggtcgggccaggttccgccgagggtggaaacaacgccgagggtgctgctgctccccctgccgatgcctga

SEQ ID NO: 30368 - DNA, 759 bp, Zea mays
  Peptide Sequence Number=SeqID_73743
atggccgaggctcgggctacactcccgaggtaccctaggacatttccgagaccggcgggaatgatttgtaatggaatcccaccggagggaggcatcgagccctcagacattgccgaaggggtccgggtccggcgaatcacccgcaggccgcatgagggaacgatcagaccggccgaggcaccacgaaaagcattaagacctcaaaggagtcaaaccactcctctgaggcctcgggggctacacccggcgggtgcgctcgcgcgcacccaccagaacaaggcaaaaccgagaaaggccggtcccctcaccgaaaatgtggcaaaagcctccaagcgagtaccaacactccctttgaggctcgagggctactgtcgggcgaagactgacaacaagtcacgatcaaccaccgagttcagcctcgggcgcaacaagaagctccgcctcgcccgacctcaggctccagcctcgggaggaggtctccgcctcgcccgacccccagactcggcctcgacctcggtctcgggaggaatcgcgtcctcgcccgaccccggcctcggcttcaagagaagtctccgcctcgcccgaccttggactcgggccgaccgcgccaacaggggatacatcattaccctatccctagccagctcaggatacaaggaacaagaccggcatcccatctggcttaccccggcgacgggtaatgatggtgccccgtgtgcaaccatgacgccgatggctctcagccccttacggcagtaa

SEQ ID NO: 30369 - DNA, 645 bp, Zea mays
  Peptide Sequence Number=SeqID_73744
atggccggttctaaggatcacaccaagatctccaccaccaacatcatcaagccggccatggaggcgctcccggctgatgaccaaagaccctttgaagacctcgtaatgcgcgatgagaaggaggtgatgcggctatggaacgaacaacgcgacaaggaagaggcggaactgctgcataaactctccgaacggcgcaaggaggcagcggaaaagtacttgtcacacttcacggtggatcgccaccagaagatcatccgtcaaggggagatcgatatggaatctcccctgcctccacttcagggtcccactataagtgctccaaatctatctcttacaactttcatggatcaacgaggagatcagttaaagcaatatgtagatgaatctattaaaatgcatctacgttcatacgagaaatcaactactcctagctttccatcgcgagagtctaatacagagccacccgcgccaaacacatcggctataaatgggtcacccttgacccagccatcatatggtatgccgatgcacgctttcgtgtcaccatcacagccacaaccactaggcacgcgccctggaccattcggcccgatcacggaccgtccagttctttacgacagacggtctgggtacgagaccacctag

SEQ ID NO: 30370 - DNA, 837 bp, Zea mays
  Peptide Sequence Number=SeqID_73745
atggcggctgctgcgtcctctgctccgcacgccgttggcgccgtcgcctccgccaagcctagattcgtcgcccccgcatgtcgcgtgatacccgtccccagcccacgccccccacccggctcccagcaggcggcggtggtgcccatggcttcgtggctgttgctccccttctcctccttcccgtggcctaccctgcccccacccggctactcctcttgccatggcagcggcagcgatggtggcagagacagcggctattggaggccgactgtcgtcgcaggcgcgcaggtcggctgtgctctccgtcgccgcttcgccggcctcctccgctcaccggctgccgcatactatttccacggtttgattcttgacgagggaaatacctctctcgcacgggtactcagagtggaggacccatgctccgcggtggccaaatggctgcttcatcgtggaggaattgctcctactccgatctccatcgtcctcgctccattggctactccgccgcccgacactgtccacgtcggagtccatgttcggcgtctccacttccacctcctgatccgctacgcgtttcacctcggcagatgtcaaaaccggggggtccctgagccgacgagtgaatgtcgccgcgtgccccagcctagatgggtcgagcacgagggcaagcgcgaaggggggagagcaaggcggccggagaccggcatgagagaggtgggaatcccgtggccttcgtgttcgtcccgcgcccaggtcgggcataaggagaggatccaggtgtacaacgggggtatagcagagtgctacgtgtctagcggaggagagctagcgccctaa

SEQ ID NO: 30371 - DNA, 162 bp, Zea mays
  Peptide Sequence Number=SeqID_73746
atggtgtccgtcgtctaccccctggcccggcgtctaggacgactttacctctgcgagcagccgcgctccgaccgcgacgccatcaggccgttccctgctcggttctcggcccacttgccgcactccgtcgagccccaggctcacagcccctcctcggtctag

SEQ ID NO: 30372 - DNA, 139 bp, Zea mays
  Peptide Sequence Number=SeqID_73747
atgagggctgtcagccagcgcctggtggcgcaccggacattggtgtccgacgacaacggtcggatccaacggtcgactgctacaggcgccaatggtcggctgacgtggcatgctccggacatctactgtgcagtgtccg

SEQ ID NO: 30373 - DNA, 1110 bp, Zea mays
  Peptide Sequence Number=SeqID_73748
atgaagctgtggaaggagacttccaggagttccaagattacgacgagttctaggtgtgggttagcggcaacccccagtcggctgcctgtgaaggccgcgttatctacgtttcttttccgcactttgatttattgtaagaactatatggacgtctcagacatggctcgacttagacacactgcacgaaagtcagtcatccccttcttaccttcccgccttgctgagcgtccgcttcgccgtcccgtggccggacagtccagccacttggagagactacaccaccgcctgcgtgaggagcaggagcgtcgacgacaggagcagcagagctcttccttctcgctccaccaggagatagagtctcttctggaagtagctgctggaggagacccagacgacggaggaggcgacgacagctcgagccacgacaccgacttctctgctaaccctgagccggaaggatgggttgctcgacccatcactcgcgacgctgctcgcgggtgtcacttccatgatgcgctcgacaccctgctacgtcgggcatttgaccggcatacttggtccgtcgagtatcgctgtgtggtctaccagcatagtcgcggggtctacccggaccgctgggaggcaacttgcttggtgcgctgcccggaggacagtctccagggtgcagaggcctgttcagagcactattctatctctgaacgggactcagctgaggcagccatgcaagatgctgcacggcgtgcgctttcgcactactgctcggttttcggtggggcagctgacggtcttgacctgaagtattacccccgccgttcatctggcagcacaggaggcgtgattgtctcacctgtcggtgagggcaatcctaggttgagcagcacagtcaacctagccgccgtgctaaacacggagctggaccatgcattagacgagctgagtagggctcgtgctgagatcgccctgctgcgggctgagcgcgcggaacgtcgttttctggacggtggttcccccgctcccgttgggactcagcacccgtaccgctcacctcagcgtggacaccagtcttatggcaatcccgcctgcaagaccaagataaacctagaaccatag

SEQ ID NO: 30374 - DNA, 1176 bp, Zea mays
  Peptide Sequence Number=SeqID_73749
atggcgaacctagaggccacagtcaaggatttggggaccgatcaaagcgattcccagaagtggaggccggggatcgaagcgaaggtggtggagatgacggaggcgcttaagtctgtccggaatccggtggtacagaaacagatcggagtttcccttctacttcgtcgggtgaagtcccggcggtggacaacgcctctccctccggaagctacgtcaggcgttgctggtgccgatgcaacccgcattcccactccaatcggaggggcgtccgtgccgctgaacaggacgctgggcttctgctccgcttacggcgggggcgacagcattagcagctgctgcgacgccgcggcggacgccgtgctgcggaagaggtccaatgccatgaacgtctctgatgcgacctgcactggcgtcatcaagtccgtcctctgcgcggactgcagtccatttccggctgattcgttcaactcaaactcaaagattcatagggttcctctcctgtgcaactatacttcctcgtcaataagttctgctcaagcaaaagattctgcacgagactactcagccacgagctccctgttccttgccacgccgccgtctgtgccactcgccattctcagtcgccgtgcgtttggactttggtgtctttccccgctgacggcaactgtcctgggttcctcgtcacgctgtcgcgttgctcgcgtcgcccggagcgtcaacccggcggtcctgagctcacgcagtgacctcgccgtccccaccgcctgtcctcattggactattggagccgctcgtgccgcgtcgtcgaccatgtcggagctgcttgcgacgccgcgcagtcgtgcactgcagccccaccgttacacgtcgaagctccttcccctgcttacagcgccgagactcagtcgccaactcgccatcttctcctgcttttcctccgcgcccaagctctccgttcacgacttcacgtacgtgctctgctcgtcgtcgccgttcttcgctcaccgtccatccgcgcatggtactgctcgtcgagccccaccggtgtaccgcgccgcaatcacgccaagtcggagcttgtcctctgctcgatcacccctgcgcctccctgctctgcgtcgattgctgaaggtagaagaaaggagaatcacaagctaccctattgactatgcataa

SEQ ID NO: 30375 - DNA, 687 bp, Zea mays
  Peptide Sequence Number=SeqID_73750
atgggccggatcgtacgtgggcctccgaaacaggacgaggccgcacggtgggaggacctcgtcgcaggcttcgtctggcgtcgtaccgggcgaaggtctcgcaagactcttggccactcggtacaatattacaacggcccgcacaagagccgagggagctattacaagtgcacgagctcccggtgcggcgcgaagaagcacgtggagaaatctatggacgactcagagatgctgatcgtcacgtacgagggttcgcacctgcacggcccacagccgctcttcccgcgtcgacagtggctgtcggttgacctgtccggcgcgggggtagcggcctcgaagacgaagcagcagcagaccaggtcctcctccccggccgcgtcagccacgctcgcaagcgacgacgggggcggcggctggccaccgagcctgcaaataatgacgcgcaacgccgagacgcgaggaggagggctcacggctgatgcaggcgagagcgagacgacgccggggcttcagagcggacgcacgggtgtgaccgcggactcgtgcgacgatggctccaccgcctccgtgccgccgccgccgcagactgctccctcgtttcactgtgactcgccgcctacgacctggtcctggtcgtgccttgactacaccctcgcctggtcccctgaagctcctctgcttcagtag

SEQ ID NO: 30376 - DNA, 321 bp, Zea mays
  Peptide Sequence Number=SeqID_73751
atggttacaagcatcattgtgtcgctgaacagtgaaggaggcatcaaggtactactgcggaccgagaaggacaaggttgtctctttcaagaatgctgctgaactgaaccaaaacttgtcccaggtgcgaccgctggatatcacgcaccccaagttgacggtgctccacaaggtattctctaaccacatccctcaccgccaggaaagcaatctcatggtcagcttttacaagcctccaacactttggaggaagttcgaatgggagccaaaaactccacgcgcaaatgaacacaaagatgtagcacacactatctctcaatga

SEQ ID NO: 30377 - DNA, 408 bp, Zea mays
  Peptide Sequence Number=SeqID_73752
atgtgctactcagtttcagtacaaggtgagatcttgctagtagacaaggatacgaggtgggagatcctccatatcctgaaagaattgaaagtatgcggactctgcgtggacacgagcccggacaaaactcaaaagggaaaaggaacgtcaatctcaggtcctgccggcctccgtcgatccgtccaatgccttgaatgttctttaatttgtgaaccaaaccttagtaaaacgagaaggcgacaagacatatttatcctgtattctatggatcgtggaagggccaacacaacacaagcagttcaagttggaaacatattacatggacgcgcctgtcaacggcgtaatgtcgccgacgggacggaccggaagcagccgctctgcctgtccatgtcgcggctcggcggttga

SEQ ID NO: 30378 - DNA, 1758 bp, Zea mays
  Peptide Sequence Number=SeqID_73753
atggatggcgacgctacggcggagaagtgtctcgctgccgcttccttcccagacaagagcgcgcgctcggaatactccgaggaagacgcccgaggcgatccgcgggcgaccataccgccgccggagaaaggtacgcgtcattccgccgtcgcccgcgaatcgtctgtcttcgtccgcccggcgagcagcagtgggcctcgtcgacgcgactccgccgtcaaccttcgcggaccggcgacccggccgatccgtgcgaagacgccgccgccgttcgtcgctgtccgccggaacgttagggttggggtcgacgtcgaagggaggtcatccaatcgccgacagatctacgctgacccgatctgcgtctttctaggtacaaggtacaaggatgccaaactgctgcaacacttggtcctcaatcttgcatcatcagtggaaactggtgctttcgatattagaagctttctagaagaggctttccgacatttgggtgacgagcattaccttctcaatgctctacttgcaattcgaaaggaggtagaccagatggagcaggatgcacttgagagcaaagcaaggtctgacccagagaaggagaggatggaggaacaaattagccttgcggagcctgtgaggccagtgcctagacaaataactttcaccccaccttcctccccagaactgtatgaggccagtgacaatgactcctacgactcggacagaatggctgacaacaactcaaacacacctattcgacctactggtgccagccccaattcaggtaaccagtgtttccccccacccatgtgggatcctcagatgtggcagggccaaggtttcgacccaacccatccttctacattttctactcctacaaaccatatgaccaatcctacctggtcccagggagctaatgacccatctacatatacctttcgtagtccatggaacccattttttggtatgatcaatcctgggggtcctccacaacaaccatcattcggtcaaccccagtttgcaccacccattccatgtccacagggttctacccatgttcccaaccacactgacccaataacttttgaatccgaagcagaacatagtgtccaggaagtaaacagcccaacgaaaccttcagacacacctacgacatttagaaggacaaaggaacagaacttcaaaccagctaaagacctgttgctttgcaaaacatggctagagattagtagtgacccagtaattagcacaggccagagaaaggaggggttatgggctagaattgagaaaagcccatggagaggcaatgcggggaccgagcctgttcgtagtctaacaccaacaggttctgtgaatgaagtggaatctgatgacggaggttcgaaaggcaagagaccattaggacgtgactcgactaaagcatccaggaagaagtcaatgtccagttcatcccagtctgctgactacctgtcaagactccatgacattcaaattgcaagattgaagcaaagtgaagaaaaatcagacctcaaacaacacaacattgagttcatgaaggaagttgaacttaagaagttggaggttcagtccaaggaaatagaagtgcaggagaaaaaattgatgatggaagataggaagcaaaaggttgaagagctcaacaaactttatgccatggatatggatgctttaccagaagagttgagagctgtatacatggcgatgagaaaaggtttaattgattttttcatcaacaatcctatctga

SEQ ID NO: 30379 - DNA, 1968 bp, Zea mays
  Peptide Sequence Number=SeqID_73754
atggacaaggatcgccaggatcgccagggagctgcacaaaagcggcaggcggccatccggcttgttgaagccaggccgaagaggcagcggttgggtgcgaaggctgcggcccccggcggaggcaagccgccgctgccggcgaagtcgggcgcccctgcatctagcagggtgccggaggcaacggcaggcgccgggggcgccaaatcggcgaaggtggtgccgccttccggcggagtggcggaggtcgcgaaggcggcccaagcgttgccgttgtccggcaaacgcgtcgccgactttgccaccaacattagcgtggacgactttcttgttgggtcggacgaaggccaacttgctatagttgcgcctgtcgcggcgaccatgacggccgccgtagtgccgaaggcgaagggcggggctcttggcgccgggggcgaggcgtcggccttcgcggctgtcagggacgaggcgggtgctgtgtcccgccggttggcggaggtgacggaggcgctgagccaggcgtcccgccggctgaaggaggtggctgacttcgccgaccgtacagcgtcgggggccctcacggcggctgtgtctgccgaagtcgagagacttcggacacaacacgccgacgccgtccgcgaaaaatcggctgccgacagcaagtgtcgtaagctgacggacaaggtggccgtactggagaaggagaaggctgacctccggcgccaactggcgggggagaggagggagaccaacgatgccctcgccaaggagaaggctgcgcaggcggaggccaaaatggcgcgggcggagggcaatattgccagggagcgcgccgagcagctgcaggagcggctcactgccttggagagccgcatggagagggccgaggccgtggcgcgtgcggaggcagagcggacgcgcaaacagctcatggatacatatcgtgagctgggcgcggggaccgggtgtcggcacttcgaggtcttcgaccaagctgatgaagattttgagcaagatatctttaaggttgaggaccccgtagtgaaggaatccgccggagccatctacgaccggctgtgggatgcgtacggtcgcgaggtggtcagggagcgggccgagacggcgagggctcaggcggcgcgtggcgagagggtggacgacttcggggcgttgaacgacgtgatatctgacccggagccagccccggcggaggccgtgcctgggcccgtcctgtggccgaccctggagactgcgggagacgcgtcgggtgcctccgtagccgctgcggccggcgaaggcctgcccccagaggtcgccgaagtcgcacctggtgcctccgcggcggctgcgccgagcgccgtagagcctgcagcggtggcggcggagataacagcggaagcaacgacggagccaacggcggaggctcctgcagcgtcagggccgtcgcaggttcaagattttgggcctgcgcacacaaccgctactactaaaattttggcggcttcgaccgcggaagatggtaatgaatgtggtgggtctgcatctgagtttttggattgtgctgactctgggagctcggttgagtggactgaggagtcgtcggaggaggacttggactactttgcggccttggatgtggctgcggcggaggcttcgccgcacgtcgcgggcgcaggagatgtgccaggtcctagcaccgggcgacgacgacgaagggcggttgcgaagcgtagattcggctgcgcccttaggcggcttctgcgcggtggcttcggtcttttgcgcacttgttgtgctagtccggctgcacccttaggcgacttctgcgcggatagtcttcgcgatagacttcggttttttcgcacttgttgtgctagtccggctgcacccttgggcgacttctgcgcggatagtcttcgcgatagacttcggtttttcgcacttgttgtgctagtccggctgcacccttag

SEQ ID NO: 30380 - DNA, 330 bp, Zea mays
  Peptide Sequence Number=SeqID_73755
acggatctgtgggcttcatcgggtccccgggaatgtactcatggcttcgggaggaaggattggacctgggtgtgccctgaaatgctcatcgtcgtgagactgtcgccgccggtagctccacgccgtgggcagctccactgccccgccatgtacggtaagaccagtgatctcaagttcaccatagcctctttttcgggtagagacttctgggataaagtatcgcgctctaggaggctggtctggtggggctcatcggtcgccgccgtgggggtgtatgctagttgtcgtgtgatccgggccgttgaatccctggcgagcagttcggattag

SEQ ID NO: 30381 - DNA, 318 bp, Zea mays
  Peptide Sequence Number=SeqID_73756
atgtccctgatctcttggtccaactcctcctggagtgttggactggtggcattcctcttctggcttcgaacctctcgaagagaaagagtttcctggtttgggtccagcggctgcagtgcagcggtccctagtgctgaagctttcttcggcggcatgacgaaggtcagtgcttgccgaaggtggtcggaagagttcaccggaggtgtttattcttatgcgaccttcggcgacgaagcagacccccaacagtccgaagacagcagcatagttaacttcaaaattcgatatctcacaaacctactcaaccaaaaatcatga

SEQ ID NO: 30382 - DNA, 1989 bp, Zea mays
  Peptide Sequence Number=SeqID_73757
atgccatcctcttcttcttccgccaccgccacgccgccggccgccgcctcgtctgaggagacgttgagtaacgtgatggtggaggagttgcgcgccggcgactctgttgaatttggtgtgtcacggatgacgtcagcccgtattgaagatatgcagtggttgggctactttggcggcggagtcgctcgtgctccggggacggaggaagtccccgagccggagggcgagttggttgttttcgaggcgttcttcgccgccggactccgcttgcctgcgcaccgggtcttcgaattaaatcaactgccgtacgacggctaccctggtcaggacgaagcagaccgccgcgggaagaaaccggcggtggagaccggaggcgaccctgcgctggcggccgccacctcttcgaaaaagagaaaattagtgatggacaaggatcgccaaggggcggcgcgaaaacgccaggcgaccgtgagggttcacgaagctcggccgaaaaggcagcggggaacggcgaaggctgaggcctccggcagaggcaagccgcctttgccggcgaaggtgggcgcctccgcgcctggcaaggcgccggaggcgacggtgggcgccggaggccccaagctgtcgaaggtggtgccgtccgtcagcggagtggcggaggctgcgaaggcggcccgatcgttaccgccgtctggcaaacgcgttgccgacttcggcaccgagattaatgtggaggattatcttggggggtcggacgagggcccgcttgctctagttgtgcctggcgcggcgatcgcgacggctgcgctagcgccgaaggcgggggtagagacccttggcgttggaggcgaggtgactgccctcgcgctggtcagagacgaggcgggcgcggcgacccgccggctgaagggagcgatggaggcgctgagtcaggtggctgacttcaccagccgcactgcgtcgggggcccttacggcggcgttgtctgccgaggtcgagagacttcggacgcaacatgcggacgctgtccgtgagaagtcggcctccgacagcaagtgccgcaaactggcggagaaggtggccgcccttgagaaggagaaggcagacctccggcgccagctgacggaggagaggagggaggccaacgaagccatcgccaaagagcaggctgcgcaggcggaggccaggctggcgcgggcggaaggcaatatcgctaaagagctcgccggagagctgcagcggcggcttgctgcctttgagagccgcgcggagggggccgaggccgcggcgcgagtggaggccgaacggacgcgcacgcagctcatgacttcatatcgcgagctgggtgtgcggacgggtgacttcgaggtgccggagcgagaggccggacttcgctgtctggagtgggtgcaggaggaactgcaggagctccccactgtcttggcggggttgatgtcgtttacctccctggtcacctgcgaggcagcgatgaacgcgctctctcgcgaaggctgccggcactatgaggccctcgaccaggtggatgaggatttcgggcgagatatctttgaggtcgaagaccccgtggtgaaggagtccgccggggccctctatgaccggatgtggggttcatacggtcgtgaggtggtccgggcgcgggccgaggctgcgagggctcaggcggagcgcggcgagcgggtggacgacttcggggcgctgaacagcgcgctgcctgagccggagacgacccctgcggaggccgcgactggagtcgccccgggactgaccccggtgactgcggaagatgcaccagacgcccctgcacctgctgcggccggcgaaggccttcccccaaaggtggccgaaggcgcacctgatgcccccgcagctgctgtgccgagcgctgaagatccagcggaggtgggggcggaggcagcgacggaggcggcggcggaggctcccgcagcggcagggccttcgcaggtggcatag

SEQ ID NO: 30383 - DNA, 321 bp, Zea mays
  Peptide Sequence Number=SeqID_73758
atggaggaagaagatgagaggattggagcagggggcatcgaatggaggagctatcccggggctaggcgagcgccctacgctagaaggagaaggggagttgatatagagttgtttgagcaagatgacaaggttgacacaatagagattctgcgggagaatgcggattcagattacgtatttggacgtagaccgactatcgagacaacggattcggacatagttcggataacatcacaactgtcgagagtccgaataaaagagtctggacaggagtcgcgagacgagattgactttcgaatttgcattttcttcgagaaataa

SEQ ID NO: 30384 - DNA, 219 bp, Zea mays
  Peptide Sequence Number=SeqID_73759
atggatctcagatccaagagcccatgttacatacaagttcgaagtataggtgtttgctgtagctcaagtccccaaattcaaaagctatttttgaaaaccaaaaatcactttaacattatttggttgaccatgctgagctttccagctgaacttaacttcagctgtgatgagcttcttcagctgcagctgagcttttcagctgagctggacttcagctga

SEQ ID NO: 30385 - DNA, 246 bp, Zea mays
  Peptide Sequence Number=SeqID_73760
atgctgcttcggcttccgtttctagctctgcttgagctgcttcgtctgtttctcttgatgtggatgtcggtgagtcagatctcttctctcactttcggagcacagttggtcctcaatttgaaaaccgacaaagattcgtatgttgctctaattgaagcaagggctaagggttcggtgggtgcaggccgtgaggaaatagaactagatgatactaaaaatttgtatttgagttctgatgaggagtga

SEQ ID NO: 30386 - DNA, 156 bp, Zea mays
  Peptide Sequence Number=SeqID_73761
atgacgaggagtgagagtaggattggtgaacctcagacgctgaagggtgtctactcccttcagagagaagtcgacaggaggttcatgtggaccgcaggtgacgttcgccggatggatgtgcagtccggagacaaaaatagtatctggtgcttgaaa

SEQ ID NO: 30387 - DNA, 192 bp, Zea mays
  Peptide Sequence Number=SeqID_73762
atggtaaatcgttatggtgggtacaagtgcggtcactacacgacggcagtcagggtcagtgaggcattgtatgccaaggcgctaggtgctttggaggacatggttgttggagtgacttggccgtccatcttgccaccgggttggacagtagagtgggaccctacctcggcagaggaggagcatgaggaatga

SEQ ID NO: 30388 - DNA, 360 bp, Zea mays
  Peptide Sequence Number=SeqID_73763
atgactttggagcctcatcccttgcagccgggctggcgttcgttggactccgagtcttttggataccgggctgaggacattattgaggccattgctctccacgggttgacgaccttttgtggctttcaccccttggagctgtccactcatcccaatggtttgttccccgctgaaaaggaggacgacccaatgtggaaggatcgggtggagcatgccaaggatgagattcaggacatggaggccgacgaggatgttgacatcgagggaggagtggagccggagcctgcatccagcctggacactgctggctcagggagacccccttcccccgagtcaagcgttgcctcgtttgctcattag

SEQ ID NO: 30389 - DNA, 249 bp, Zea mays
  Peptide Sequence Number=SeqID_73764
atggtgcgtacaaggaaaactgcacgcaaatctactggacctgttggcgtgcctcgtcatcagctagccccaggacatgaggaaaacgtgcctgccgatgttgttgtaatgggagccagaccatcggggacagtagatgaaggacctgatggggagttggacctttttaggcctcctccttccatgaaccttgctgacgaacggtctcctgcagcaggaaatgaagaaaccaaggatgatgaagactag

SEQ ID NO: 30390 - DNA, 282 bp, Zea mays
  Peptide Sequence Number=SeqID_73765
atgcggttaagcgggttgacggtcaggctgccaacggcgccgatctgcggtggcgagatcctgttccaagcagcatacactggaagagttcaaaactcgagttgtgtgagcttcactggtccatggcgatcacagaacaaacatagcatgatcgtgtaccttgctgagttgtcctggccacgatgcagtggagctcatcgacacatgataaaggagaacccatatggtgccagcagctccacaaacatggacactcagcagcagtgcatggacagcacgtag

SEQ ID NO: 30391 - DNA, 327 bp, Zea mays
  Peptide Sequence Number=SeqID_73766
atgtctgaagataaaaaaattgttgctgaaacgaagctgagcctttctgaggagaagaatcttggctttcttgagtccatagcaaagacgaatacgaagaagattacaagggagattttagaagcggcgggaaagactccgaagattgaccctggtagatgtgcttcgactctggtggaagctgttgccaagatgcctgagattggcttgccgaagcaacagaagctgcaggatggttacccacatactctggaatgtacgttatacctctgccttggcaaagattggttcccgaatgacgcgattgcaaatacagaaaatccgtga

SEQ ID NO: 30392 - DNA, 354 bp, Zea mays
  Peptide Sequence Number=SeqID_73767
atggagttcggtcgaggggccccgcacttcgcgcggccgagaaacatggcgacaccggtggagaggttgtctgctggccagggcgcgggcgtcaaactcctaggaatcgcgcggcacggggagcggctggaggtgcctgcgagcgtagttaggtgggctgcaggggcgctggcgcgaatttggaactgggctgaaaaggatctgttcggcccaacgtccctaaggggatgcagagctgtaatcaccccaaggatgacgaagctgcaaaagtcgttcctaagggagcgtagcagcttaaatgccaccgaaatagaaggtgaagaagctccaaagtcgttcctaagggaatgctga

SEQ ID NO: 30393 - DNA, 393 bp, Zea mays
  Peptide Sequence Number=SeqID_73768
atgccgatttccccttctgaaccggactccgtcaacagcccagccgatgcgctcctaccctcctctgattggctccctgcgtctataaaaattgggacaacccttgtggcctgcgcgctcgccatctcaccccatccacagcgaaaccgagatttgccgccaacagctagtgcgcgattcaccggtgtttggttcgcgggaagcttgggagcgtctcctcaggggctaccgcaagtcaggggtgccctgccgaagtttgggggtgtctgggggtggcttaatttctcgtcggagtcttaccccgccacggaactacgcctcgccgtggacagggcagccgccacattgaaatccggtaaggattcctctatcgcgcttgcgttattcctctga

SEQ ID NO: 30394 - DNA, 1881 bp, Zea mays
  Peptide Sequence Number=SeqID_73769
atggtggcgtggccgagctctctggcagcgatggggtgcggcagcgagttggagctcactggcgggcggggacgtcgagttggagctcccctggcggcgatggtggcgtggccgagctctctggcagcgatgggtgcggcagcgagttggagctcactggcgggcggggacgtcgagttggagctccctggcggacagcaagttggagctccctggtgggagtatgttgtagtattgctaaggaacgggaggcacaaggatgaggctgcaaaggagctacatgtttttttaggcgatgacaatgatgcatttgtatcctggttgtgggatcatctgtcctcaaatttgcacctttatgttcaacctaaagctgcctcttctaaggatgacactagaagcagtcacaatgctgccagaggattgcctgttcacagtgtgataagcagcacacaagttaatcatgaacctgaagctgaaacccagaagacagtgataactcataaaaaaaaagattggggtcatcgaaaaagagattggggaacaatcggtcgaggtcaatcagaaacagttcctcttagaagcgttgtcgacaatgtttctcttgcaaaggagaaggatcttcatgagtcacatgcagatgaaaaggcttttcataaatcacattctgtaagacgaacccgctctcctgacatgcataaccacagaaagaggagcagagaggcagatgtgcggtctactaagagtgcaacacacccagttaatggtgcaccacgtcggcttcttcagtttgctgttcgtgatgctgtcagaactgtgcccccagttacttctggttcagaatcagcttccaagcgactttgttctgtagtgtctacattggcttcagattccacacttgatattactcatattaggttacagaaaacaaattcagatttgagaataccagttgccacagcagcactaagagctgcagctgaggctgctgaagatgctctcaaggatagcttttgtggaagtgtttttagtagattgggcagaatgcccacaataaattctagtgaacaatcacctgatcgtagatcacaagatcttgaaggcaaagaatatgagaatatagataacatacaagctgaaaatcaagttgaattttatggaagaaatcaacatggtggcagtgatgtttacatgcgtgatcggagaacagaggaagccacaggtaaagagtcattagtactggggtacgtaagaggagcttctgaagtacgaagcggaagattgatagctcaggggccacctgctggttcaggaccaagatcatctgaaaagatcctaaatgtttctggtaacactaagacacagaagcttcgaactcatgtaactagggatgcccttgcatttgaccctcaagtgccaatggagaaggtttctggtgcaaggaagtcgataggtcaggggccacatgctggttcaggaccaagaccatctgaaaggattctaaatgtttctggtaacactaacacacagaagcttccaactcatgtaactagggatgaccttgcatttgaccctcaagtgccaatggagaaggttgctgatgcaaggaaatcacatgtgaagattgcacatgctaacgatatgtccatgacaactgataagtccaaatgcttagaggtgtcgtcatccctaaatttaatgttgagtaaaaatgcaccacaggaatttggaaggctagattccaggtctggtgtaggggtgagcttttttgctgagtcaccaggtcatgggttcaaatcagactctttggtggaaggcttgcctcggtttatcctttccctagactcgactcatgtgcgagcttctggcactaggtttacctaa

SEQ ID NO: 30395 - DNA, 438 bp, Zea mays
  Peptide Sequence Number=SeqID_73770
atggatgaggcagagaaggcggtggatgaggacgacgacgagtgcgacgtcgacgtggttgctgcgcctcgccggcaaattcaggcttcagtgctggcttgctgctacgccagtgcatgcggaacgggcacatggaatgcgtgttacggagcggctctgaaagcggccgcgctcgtccgcctgctcatgctgcgcgtccgcggctgggtccgtgttcaggtcccgaccgcgtgcagcagtgcggcggcgaggcggatgtggccgttgtggaagagctcgtcggcagagtacgtggcggtggcagacggcgacaggaagcgcaaagagaagttgaagtccaagtcgaggacgctggggatgtcgttcttgccatgggtgcagcagaaaaaaatgctaatttgccactctcagatttggctcttcatcccgtctctatga

SEQ ID NO: 30396 - DNA, 159 bp, Zea mays
  Peptide Sequence Number=SeqID_73771
atggacggtggcgaggatcggacgttcaaggcgaactttaccagcgagggggtgacgatgctgcaggaccgcgtcaaggagaagctcagtgagctcatgggcgactactccgacgacactcttgccgttcgtaagctgtgggcatgttatggggtttag

SEQ ID NO: 30397 - DNA, 1992 bp, Zea mays
  Peptide Sequence Number=SeqID_73772
atggagtggaatgatcctaatccaggcccagaatccttgacgagcttccaaaccgaagctgttcgaccagacaccgcagggggccacagcaacgacgacgttgaagctggatttgagaagcatggcttggcagtcaccgtaaggccgcctgaggaggaagctcggtcagtgccactaaccccacagcttggccagaagtccagtcctggcagcagcctcgcggagaggatgcaggcaagagctggattcatggtgtcgaagctcaacatgcccttcagcacagcagctggagctgacaattcagtacccgaagttccatcgccctacctcacgattccgcctggcctgagcccagcaacgctgctggagtcaccagtcttcgtttctaattccatgggccaggcctcgccaaccacggggacgctattcatgtttggtagcacaaatgacaatgatcctattagatttggaggtggtcctccttcagttggagatggccctaatgcttttcctttcaagcccttagatctgaaatcctcacactacactgctgaagcaatgaagaccattattaatagtggcggtcctcatgaccccaagctcagccgtcctgcatctggcgccggtgcaggcaatgaacacatatcacccccggatcacggacagacagctgaggaaagtgatgcgagggaagactacccggcaatggctactaccacgccagcagaggacgggtacagctggaggaagtacgggcagaagcaggtgaagcacagcgagtacccgcgtagctacttcaagtgcacgcatcccaactgcctggtgaagaagaaggtcgagcgctcgcacgaggggcacatcacggagatcatctacaagggcgcgcataaccacccgaagcccacgcagagccgccgtccaggcgtccagcccgtgcacccgtttggcgacagtgcgcaggcggacgcagccgacaacctggggtcacaggcaaacgcactggacgccaaccagccgaggcgtgcgggtgttcaggatggcatggacgcgacgtcgtcgccctcagttcccattgagcgctgtgactcgccggcctcgatgcaggtcgactcggcaactcggtttgggtcccccgagggcgcggatgtgacgtctgtgtccgacgaggtgggcggggacgacagggtgactcgtggcagtatgtctcagggcggtgccgacgcggagggtgacgagctggaatgtaaacgaaggaagctggagtcgtacgccatcgatatgagcaccgcgtcgagagctgttcgcgagcctcgcgtggtgatccagacgacgagcgaggtggacatcctagatgacggctaccgctggcgcaagtacgggcagaaggtcgtcaagggcaacccgaatccaaggagctactacaagtgcacgtacccgggctgcgtggtgcggaagcacgtggagcgcgcgtcgcacgacctcaagtccgtgatcaccacgtacgagggcaggcacaaccacgaggtccccgccgccaggaatagcggccacccgggcaccgcggcggcgacaggcgcgggtggcccgcgcaggctggagcacccgtcgctgcgcgacggcctgatggggcacttgggcggctgcggcgtgccgttcggcctgccgccgcctagggatccgctggcgccgatgggcaattacccgacgtatgcctcctccattccccttggcggcgccggccccacgtcactgccgagcctgccggtgccggcggggaccctcagcgccgtcgatgggctgaagctcccgatgctggcgccgtcgtccctgcagcagcacccgctgctgaggcaccggcaggcgatgcaggccgctggcctcgtggcgcccaaggacgacgtgaaggtcgagggcaacgttgccggcggcgctgccccgtcggtgtaccagcagatgatgtgcagcgggctgcggttgcgccagcagatgtag

SEQ ID NO: 30398 - DNA, 834 bp, Zea mays
  Peptide Sequence Number=SeqID_73773
accgaaatatccctctgccgcgtgtacaagcgcaccggcatcgacgacggcggccacgggcatcccgcctcggcgcgctcgacgccctcccgcggcgtcgtcacggcgccgcagcaagacaacaagcagcaggcgtcgtcgtcgtcgacgcccacgccgcccacgaccccgtccaagatgatgcagttcctccacggcgagtgcacgtcgtcgcagcccgcggccatctgcaggaacagtcaccacgccgcggcggcggcgcacagcaataacaaggcggcggcggcgggggcgcagcggcagtcgcagctcctccccacgaagccgtactgcagcggctaccagcagctgtccacagcgagctctgctggctctgccgtgggggcggccgtcgaccaccaccatcaccagcagcagcagcagcaggcgggaacgggagccgcggcggtgtcgacgtcgtcgtcgtcgtccagaaacgcgagctacgcgctcgccgccgcgtccacgtactcgctgctcagcctggtgaacgccgcctccatgggcgggtccgggtccgccgcggccatcgacgagctcagtacgctggtcgggcacgtccacggcgcgccgccgtacttcaaccaccaggccgccgccgcaggcggccacggccacggccacggcttcgtcctccccctgccgacgacgccgtcgtcgcagcagccaatggcggcgctcgggacgctacccctgtccctggccgccatatctgacaagatctgggactggaacccggtcggccccgacgcgacggctagagactacggcagcgccaccggcggattcaagtga

SEQ ID NO: 30399 - DNA, 873 bp, Zea mays
  Peptide Sequence Number=SeqID_73774
atgatgactgtaggcctcgtggtggggagaagcaagtcgggctgcggtctctgccccgccttcagcttcaaggatgttcatcatccttgctgtggcggagggcgagccgagccggggttctacctcccacatgggccggcaagccgcctcttccttcagcattcagaggagagggcgctcaccggccttgcggagggggcgaacttcgacagcgcgggaccggtcggccgcaagcgtcgtcagctgcagcgtgcctggcttgctggctcagctagctctggcgcggcctccgacgctgcctcctgccgcttggtccgggcgtggccgttcgtccaccgcacgggcgactgttgcgccgtgcgcaccgagggatcttacaatacatcgtacgccgcgcgggcggcgttcgtgttcttggattgtcttgtcctcactccggcacgacgcctccgcgcggaggtcggcgccggcccatctgggaggacgctggggcgactgccatttgccggtgcggtgtcggtgggcaggtggctgtcgtcatcggtgctgaggtggtggcagccagaggaggctgtcttcgccgacgagaccgttagtgccacctgcggtcggacctccggctcttcggctttaatggcttgtcctcgccctcgtgtggggacgtgggcgagggccctttcaacagtagcgttggccctgaggtcatcgctgctgttgtttagccgcccgaggcggaggtcattgtcgccgctggtgcagaggtcgttggcgaactgcctggggtttgttatcccgcaggccctctacatagttaccccaagtatgggtatttgttctttgtggctgctgaggcctgaacatttgggtatttga

SEQ ID NO: 30400 - DNA, 273 bp, Zea mays
  Peptide Sequence Number=SeqID_73775
atgcatgaggggagtgcggaggctgtctactgcccgggggatcgatccctttttaaaggcggctctccccactcgcatccccaagcgtcatgggcaaagtctccaccgatgtgctccagggttctcaccctccgcgtgaaggcctgggcccgcatgtcatgcaaccagcgcaacggttactgcgtgcaaggaaaccgcaccgccactcgcgccaatgtcgcgtcttctcgactgcgaaaccagtgccgcgactcgaggcagccctacgcgtga

SEQ ID NO: 30401 - DNA, 447 bp, Zea mays
  Peptide Sequence Number=SeqID_73776
atgggatccggccaacaaccttgccgcaatctacgtgtacctctcaccagccccagctactatctcgcgttctataagactcggccagcgcctctcgtcctaggaatgagaaccctgggcgccgtcaatcgtggccgcactttcctccaccctagtattgcctggagggagttccaccgcacgccactcctctccgcgccaccgcattgccgccctctagcgtccgggggtactcttggaggaccggcggtgctggtgcaaccaagtgtcaaggctgagaaccgacccaggcacggcggatttctcgccggtaacgcgtcgccgcctcgcgtcgtggccagagtcttccacggcataaaccaccacgagcaagccactgtggaatctgaggttcagcaggtagaggtagctgagcaggagctcattgaaggcaagttgtgcccttga

SEQ ID NO: 30402 - DNA, 447 bp, Zea mays
  Peptide Sequence Number=SeqID_73777
atgggatccggccaacaaccttgccgcaatctacgtgtacctctcaccagccccagctactatctcgcgttctataagactcggccagcgcctctcgtcctaggaatgagaaccctgggcgccgtcaatcgtggccgcactttcctccaccctagtattgcctggagggagttccaccgcacgccactcctctccgcgccaccgcattgccgccctctagcgtccgggggtactcttggaggaccggcggtgctggtgcaaccaagtgtcaaggctgagaatcgacccaggcacgacggatttctcgccggtaacgcgtcgccgcctcgcgtcgtggccagagtcttccacggcataaaccaccacgagcaagccactgtggaatctgaggttcagcaggtagaggtagctgagcaggagctcattgaaggcaagttgtgcccttga

SEQ ID NO: 30403 - DNA, 96 bp, Zea mays
  Peptide Sequence Number=SeqID_73778
atgcagataacgatgatatcaacttgggctattgagctgtacttagacaagattaatcacccaatggaggatatcattgtcaccatcataaattga

SEQ ID NO: 30404 - DNA, 519 bp, Zea mays
  Peptide Sequence Number=SeqID_73779
atggcggatggcagcggggaatcggagtcgacggcgctggagttcacgccgacgtggatcgtggcggcggtctgctccctcatcgtggtcatctccctcgcagccgagaggtgcctgcattacctcggcaagacgttcaaggggaagaaccagaaggcgctcttcgaggctctcctcaaggtcaaagaagagctgatgcttctggggttcatctcgctgctgctgacggtgttccaaggagtgatgcagaggacgtgcattcctccggggtggaccatctacatgctcccatgccgtagcgccaaggagcaggccgagctgagccccacggaggcgcacggccatgctgccggaatcttaggcctcacccgccggcgtttgcttgccgagggcgggcctaggacccagcgttgccagaagaagattcgtcaatggaaacactgggaggatgagattcagaagggtgctacagacaatggtagtagtatctcgtttgctgctcatgttttggttagctga

SEQ ID NO: 30405 - DNA, 129 bp, Zea mays
  Peptide Sequence Number=SeqID_73780
atggagaggatagcttctacctgcaagtatattttcattggagcaatagtgggatatattttcaaagttaccaatgatggcgtggtgacggaggaccctttaagtggtcacatgcctcgtcatgggtaa

SEQ ID NO: 30406 - DNA, 144 bp, Zea mays
  Peptide Sequence Number=SeqID_73781
atggtgggatcttactgcaaagctccctgtgatgctcttttcatccttgggaacagaaacaatcctaaggatggaagtgaggaagcgacaaatttttgttgcttttgctccaaggtggtatcaaatgaagaagtagaagaatga

SEQ ID NO: 30407 - DNA, 484 bp, Zea mays
  Peptide Sequence Number=SeqID_73782
atgaaaagcaccaagaaggtttgggtcccgaaagggaaggctcggactcgggctaagacccagaagacggtgaactccgctccgtccggcctagggctcggactcaggctcagccccagaagacggcgaactccgcttcgcccgacccagggctcggactccgccctggcctctaccgaactacctccgcctcgcccgacccaggggctcgggctcggcctcggcaacggaagacagactcgaccccagcttcggaggagcccccacgtcgcccggcctcgggcgcgggcccgccacgtcaacagggagcgccatcatcaccctaccccaagccgactcgggccgcagagaacaagaccgggggacgtcagcaaggactcgaccgctccgacagctgtccctccgccaaactccgttgctcctccaacagccacgacatcacaccagcagggtgccaagatctctccggctgccacattggcat

SEQ ID NO: 30408 - DNA, 396 bp, Zea mays
  Peptide Sequence Number=SeqID_73783
atggagcgctcgaccgggagctctgctcccctgctcctctgcgccgcgcccttgtcttcagccggcgctacctctttttcagcgacgtccagcttcatctccctcaactcccacggccggaactcccgctgccgctcggctctagtgaaagaagctccctgtgcccagcgctccctgctccatcttctcgtgcgcgtgggtgggatgttttcgaaaataaaacttgatggtggatctgtcaaaggccttgatggattcaacatcggaaaagatgtacctctgccaggttctaactttgtgctattgttgatggtgttaagtgccggtgggctcgaccttcttataagtctaagtaacccttctatacttcttattgaggatgatcccttgagctag

SEQ ID NO: 30409 - DNA, 783 bp, Zea mays
  Peptide Sequence Number=SeqID_73784
atgatgaacaaaaacactggcattcaaagtgcccttacaaacggaactccggttccccctccgcaggtacgaacaaccccactccatgggggcgggcctgtggagcaacagaagaccgacgaacggcgcgccgtcacctgctccagcagcggcgacaacgacgacttctgctccggggggccgaacagcggcaacgctgacctcagggtggatgctgctgccaggaggcccccgcccatgccaaaactcgtgaggcaaggatgggcagaaggccgtagagttggaggccctcccctgcggcgcgggggctgggacccgcatgtcatgcaaaccagctcagagcagaagaagccaaagcgccgcgcgtggtgcacacaaccgcccagcggttacaagcgaccccccactttggcccagaccaacgggcggaaggggcaggcggccatgcaggcggcatgcaaccgcgccaggtggacgcgcttctccgactcccaacgcgtcagcatggaggcccaggcccacgcgtcacgcaaccggcgcgccggatgctgcatgcagggaccgggaaaaggggataccccgaaaaggatccttcactgtgaaggaaccgggctccgagcccccctactgatcagaggttcgaaggctggccctccgaggggttcaacagtcgcctcagatcgcgtgggccctacacccactactggtcagaggttcgaaggccggccccccgaagggctccacggccgcctcaggctactcgggctccgcgcccattactga

SEQ ID NO: 30410 - DNA, 939 bp, Zea mays
  Peptide Sequence Number=SeqID_73785
atgcgtccccaccgttgcttcgatgctccagagtttcctcttaagacaacgagcagcccgtggttcctgagtgtgttgtcgaagaccttcccgagcaacaacctggtgaaggcaaccacctggagagactgcatcgtcgcctgcacgaggagcaggagcgttgacgccaggagtaggagcagcaggatcttcccctcgcctcagcaggaggtggagtctgggaggcagccttcccctacacctcagccagagatgcccctataccgccacaaggcatcctggctgttggaggagaccctgatggagacggagacgacgacgtcggtggtagttcgagccacaacacggagctctcggagtagcaggagctggagggatggatcactagacccatcactcgtgacgctgctcgcgggtgtcactttcacgatgccctcgacaccttgttgcgtcgagcctttgaccgacacacctgacgatgatctccgaggtgcagaggccttctcaaagcattattctatcactgagagggatactgtcgaggcagccatgccagatgttgcacaacgtgcactttcgcattactacttgttgtttagcagggtagctgacggcctcgaccctaagtactaccctcgtcgttcgaccggcagagctggaggtgtgattgtctcgcccgttggtgaagacaatcccaggctgaacaacttggtcaacctggtcgctgagctcaacaccgagctagaccacgcccttgaagagttgggcaaggctcgggcggaggttgcagaactgcatgctgagcgcgcaacgcgccactatcaggatggtggttcccccgctcctgtcaggattcagcactcttaccgctcgccgccccgtggtcgttgtgattacggcacacctgactgcacgacccagatagatttggagccatag

SEQ ID NO: 30411 - DNA, 309 bp, Zea mays
  Peptide Sequence Number=SeqID_73786
atgctggtagactacacaatgggtctcctccatcagtcgggatgccctatggtggtgcacggggcatctctggctgaggtgcaggggaaggcgacctctcagactccacctcctgctgaggcaagtgggaagagtcatgctgctcctggtcctgctcctgctcctggcgtcattgctcctgctcctcgtgcaggcgacgatgcagtctctctaggtgactggactgacctaacaccgtgcgatgcaggggacgctccgctagtcgagaaggcaaaaaggggatcacagacttacatgcagtgcacctaa

SEQ ID NO: 30412 - DNA, 390 bp, Zea mays
  Peptide Sequence Number=SeqID_73787
atggcgtcaggcgcgcgtgcgcgtagaggtatcccgcggttcgggccgttcgatctaaatcggacggaggggatcagaccgaggaaacagattgctgcgggcggcgccgctcctctccatgacggtgaggtcgccggagttaaggtaggcgcgggctatggtggctccggggtcgctggagttgggcagagaggaagagggtgccacgacgaactcgatggcggggaagaggccatgaatccacggaccgagagaggagaacggcggtgcgagagtctcgggcgggccgcggtaactccgggttttcaaatccaaattcaaagtaggtttcaaattcaaatcaattcaaacttgtgcaacacttcaaagaatattttaagctcagcatga

SEQ ID NO: 30413 - DNA, 1028 bp, Zea mays
  Peptide Sequence Number=SeqID_73788
acgatgctgactacaccccaaccactgattcagaggcccaatcttcagctgggggcagtgaatctatggacacagaagacattcctcatacacatcctgactacccaattgacaacacaggatggacattcccaaagaggaggttttctatggctgaatactgctcaagtagaactgcgaatcaatatactctgccatctgacacaaatgttcaattcttccacactcagctccagtttgatgttttttggggcacattgatggataccaactttcacaaacatcaggtgattgattggactttcatgctaggacaatcagttatcgaggacctgattcctaagtttgagacatgtggtatgtatcagtttatggggcagagaagtgattttagtgagatggcagtcaagcaattcctagccacagcagaaattgatatagaagaggaatccatcacttggatgacaggattcaagagatattctgccacatttgtagattttgctactgccaacagtctgaattatggcatcatttcagctgggattgatctctacactgaagatatttttgaggactttgtgcaattttatgagccagcaaggctgggatacctaggagatgatgagaaagatcctggttatgatgtaggagcacaagggcttcagacccacattgatacccgctttcagggaatgatgacacatatggaccaacgcctggatgatatgcaatctagttttgatagtaactgggatgcgctcaacactgagtattctgaatttcgcgatcacattcaaactaatgtcactgatcctatcatgaccaggctcaacaatatgcagcagagttttcaggataacatgggagctctgtctagtcaatttgacaacctctctaccaatgacagcatgcaagagatcagtcagaggcagcaacaactccagcaagactttggacagttctcgtctctttttgacaccttcagcactcactactataacatgcatcctccaccaagtgattag

SEQ ID NO: 30414 - DNA, 456 bp, Zea mays
  Peptide Sequence Number=SeqID_73789
atggcttaccggagagctcggtccatgcgcggcggcgggcgaccgaagtccggcgagggcgatctcgggcttccggtgatgttctgccaggtccgaggacttggaaagcttcacgggctaatggcaaagctaatcgaggggttggcgtggcttggacgcgactggagggagctggccacggcggccgaggctcggaaagcttggcggggcggtggcgcggcgtgctcggggcaaattccggtgatctctggcttgggcaagacttgtgagcacgcggggaggctagggacagggagttgtagcgtcaaggtgctagtgtcagaatgcctggtcccgaggtcaaactgcgtcgaaaccgtgtcaaatgaatttggtttgagttcaaaattttccagagcgtgttcaaggaaatttggcacaactttgatatttggacttcttggttttgagttttga

SEQ ID NO: 30415 - DNA, 1086 bp, Zea mays
  Peptide Sequence Number=SeqID_73790
atgtcgtctatttatatagctctgcaggtgaagaaggcaaaccgccgagacgcgcgtactggcttatcggtggaccgagaactgaaaagtgcccgcctctcgctcgcatcaggaaatcaacgactgagtctccacgactgtcggtcacttcggatggcggcaccaccggaggggaatgtccgcttaggcgaggggtgggacgaggacgacgtgctggagccgcagccgctggaggtcatagcgccggatgtcaagtccaagaagcgcaatccggcgcccggagttcgggttgttggtcgccggatctacgatccagagaatggcaagacctgccaccaatgccgccagaagacaacagacttcgcagcggcgtgcaagcaagtcaagaagaagggtccgtgcccagtcaagtattgcctcaagtgcctccttaacaggtatggcgagagtgccgaggaggcggccggcaaggaggactggatctgtcctaagtgcaggggcatctgcaactgcagcttctgtagaaagaagaaaggcgagatgccaactgggataatggcccacatcgccaaggcttccgggtgcacctctgtccatgatctccttaaaaaggggtcagatgtggtttctgctgcacaggcgattctcaaggtgaatggtagtgacaagggcacaaagagatcccgagggacagatgctgctgctgaggtggcgactgaaaaggatgtaaatataggcattgatatcaatacagttatagcagatgaaggagatgaaaatataggtgttgatctcaattcacttccttctgttgataccaagaaaaggcagaagcggcagaagctcaagcacaggacaaagaaggatcctgctgatgcaacgtcacatggagtcaatactgaaccattgcagatggatgggaaccttgattttctcaatagtaaaactgtgcgacccaggggtaccccagtcactaaaattgcaggcgcagagcttgatgacgaggatactggggctgcaattcagtttatagaattctgccgtgcatttacagagatgaaaggatctgagctaaaagaatgctag

SEQ ID NO: 30416 - DNA, 414 bp, Zea mays
  Peptide Sequence Number=SeqID_73791
atggggatgatatgcaagattaatctaatgggtgtgcctctgcaggttgaggatcttctctttaacattaacaagaaaaatgagaagggccacttcagagacagttgtccaaatatggttgaacccacaaatgggaaaaacaaagacaaggcgcttgcaagtttcaaaacttgggatgactcttcaatcaaagatgaacctccaaggacgcgcaaccaacgatcctcatcacgctcatcatggtcatcacacaagtgccttatggcaagagataaaatgagtattccatcctctagtgatgatagcagtagtgatgatgaatgtgagggaaagctctcctcagatgagcttgcggaagccgttaaattttttgaggatgtatgcactaaacaaaaggctcaacttaaacattga

SEQ ID NO: 30417 - DNA, 946 bp, Zea mays
  Peptide Sequence Number=SeqID_73792
atggaggttgcggcgacggcgaagacgacgcgggagaccggggaggacactaccgcggcaggggtgggggctgaggcggcgggaagcacctccaatctcctcgcccccacggacctgagccgccaccgccgccttgccgccggggatcgctcaggaggacaaccatgcatcaagaaggtagagaaggagatcaaggagatggcaaagaaaatcagtgacctttgtgttttgcataaaggtcctctgtcttttcacgatttagctcgtgctcctccctcgaacaccaatcatattcggttgggcgccccgacgcggtcccctgaacaccggtctcaccttgccccaaccctagcttgtcactgccgcctcctcctgttccgtcaccgccccgcccccctgggcgaacccaccgtcgcccggcccagccctacaactcctgctccgccttctttgaagccctcgactcgcttcaccaccgcgacgggcccagcttccatcctaccgagacggaagcgtaggtgggagcgggcgggccagatccgccgcacgtcgccttgctcagcctctccaatggacgtgaccgcctccgtgtgccgggctgccggtcgggcctcacgacggccatgtctgctccgtcaattaacgtcggcatcggcccggcgtcgccctcgtgcgccgtcgtcgtcgcttcggtggccgcgtgacgctgcctcgatggtccctgactccgtgcgggttcacctacagccgctgcagggagagactgggtcgtgtctgcagttggtgactcgtggcccctccctatgtgatgctcgcctcggggtgcccttgtcaccatgctccgtcgatggtgtattgacgaccggctgctactggcctggtgggctccgccatcgcatgggtccaactacagcagctagcgaggagaagggcaggatgttgcgtg

SEQ ID NO: 30418 - DNA, 1176 bp, Zea mays
  Peptide Sequence Number=SeqID_73793
atgggtaacaggattaaccgaacaaggctcactctggtcaccatccgccgctggccgctgccctcgccggccgcgttcgacagcaaccctttaccccaggacgacgagccgctcgctgactgcagcagcagcagcctcctctccccgcagcatgctccgcttcgcattgaccgcctcgtcgtccggccgccaccgaacccggcgctcgcgatgcctcctctggcgccgccgcacggtgagaagggcggcaggcagcggcagggggcggcggcggccccggccccggcccagcggtcggcgtcgttccacgggcgcgggacggagcagcggcaccaccagccgcagaagcagaggcccaagacgctgcccgacctgctcgccggcgtccggggggcgagcttccgctccgggtccccgcccccggacggcgacgcggggcggaggacgccgagcaaggtcctggtcagcgtggcggtgcagcagagcatgtggccgctgcacgtcatggcgcccgccgagtggaccgtggcggacctggtggcggccgccgtcgccctctacgtcaaggaaggccgccgcccgctgctgccgtcgaccgacccggccgccttcggcctccactactcccagttcagcttggacagtctgaacccaaaggagaaaatcatggaactaggcaccaggagcttcttcctgtgcccaagatcttgggctgccggtcaggacgcttcgtcgtcctccggcacagcgaacggggtcaccagtgcggcatcagggaaaacaccggcctggcttagctacatgccgttctggccgaccattcgtcgtagtccccgcgccgccacccccaccatcttcctcctcgcgtcgccgcccaccccggtctattactccttgagtccttggagccatccccaaccccgtcctatcccttcccacgtctgcccccctcttcctcttcacgaagcggccgactccgcgcccccttactgcttgcttccatggtatcgcggacctggtggagaaggcggggtggagggtagccactatcggcgaggaggtcgtcgtttccagtatcggggccagcatgcgcgtcggcacgcgctcgaactcgtcttcttcttaaaactcggtgggtttcaagcgccccccacgttcggtggctccttcggctag

SEQ ID NO: 30419 - DNA, 522 bp, Zea mays
  Peptide Sequence Number=SeqID_73794
atggactcggtcggccatccctttctggctctgtttgcttcgccgcccaatgcataccatccagttcctcgtccgcggccacctatgttttctccagaagctagaggtagcgcactagcgccgaatgcctgcgcacctaattcaatcaggatgcccatccccagtgaggcttctcgtttggaaagcccaaaccacgggacgaaacccgaacgcttcccccgggacgctccccggcgtggaaagaagccctgggctgaggcgccttggcatttggaagcccaacagcatgggaaatcctacccgaccccaggcgttttccacgcggcagagctccctcgcctctcgagtcaaggcggctgttcccagggatctgacggcgacttccgcggcagctccttcgtcccgtcggtgatcaccctccctcgacccctcaccgtacccacctctcgcgcggtcgcgcccagttccaccgcccaaagccaacctcaccagactgaggcacagttggaatggcgtcactga

SEQ ID NO: 30420 - DNA, 342 bp, Zea mays
  Peptide Sequence Number=SeqID_73795
atggcaataaatcccgctcgccgtggccccggggtgctactcctcgtggcgctccttgtggcgctggtcgtctccgggcactgccctgggtgcgcaccacctcgggctgaagcgtcgccggcggaagcacgagatccactctctgatcaaggcagtggtggtcgtggtgatggtaaaccgcagtttcggccacatcctcggccaggcgttgactctgaccccggccacggtttcgaggacatccgggagcagatcttcggttacgccgtcacctccgcggtgacgccgcccatgtccggcttcgcccagaacgtgcgtggtatgggcctcggcgagtcgtag

SEQ ID NO: 30421 - DNA, 129 bp, Zea mays
  Peptide Sequence Number=SeqID_73796
atggaagatctcacggcgacggattcgctctcggctttcccctcctacacggcgatgatggaggccgacactggatctgggttgcggccagaatttcttttagatcttaaattcccatttgggtattaa

SEQ ID NO: 30422 - DNA, 639 bp, Zea mays
  Peptide Sequence Number=SeqID_73797
atggcgcgaccctcaccacgcgacagtgatgatgacgtggtggcagccatcgaatccacggaccaccttctctccgtggacttctctgcctcgcccgagggcgcgacgcaacccggctcgagcgtgggacgggctcgggtgagggcgcagaactttggttctcgggcgggttttggcttgggacagagaacaagggatggaaatggagggggcaggggagattccttaccgcaatgcgagactcgggatctccatagagacggcaacggaacgacggtggcttgggtcgacaacggtgtctccgggactgcacgggcaacgacgattagcgaggacaaagcaaaccaaatgaaggggaattgggggcaagtcccgagcagctggcatcgaggcgaagctcactgtggcaaggacgacagcaggagctcggtggaacggcataatggtttcacgacagcggcaacactgctacgtgctaggtgggggaaaatgggtagggcgaggagtggggcgctatgggtctggggtccttatatgaggccgggtgaggcgcgtgggatgcgggccgtagggtgtgggtggtggttatccgcgcagaacgcgcgaagcgggcatgacctctacagagcagatggttga

SEQ ID NO: 30423 - DNA, 188 bp, Zea mays
  Peptide Sequence Number=SeqID_73798
atggcagtaaatcgcgctcgccgtggccccggggtgctactcctcgtggcgctcgttgtggcgctggtcatctccgggcactgccctgggtgcgcaccacctcaggctgaagcgtcgccggcggtcgcacgagatccactctctgatcaaggcagtggtggtcgtggtgatgacgaatctctagaacc

SEQ ID NO: 30424 - DNA, 195 bp, Zea mays
  Peptide Sequence Number=SeqID_73799
atgtggggccgcgtcgtcaggaccttccctgtcccttcggatttggacgcgacgatctcgcaacaagctccgctcggccgtagttctcggatcacggagaacccgcctcgcctcgcaaaccagcccacaccaccatctccaaccaccgatttgatggggtcggtggacacccatttgcttgatctggtccgttga

SEQ ID NO: 30425 - DNA, 96 bp, Zea mays
  Peptide Sequence Number=SeqID_73800
atgaagaagcaagcaactcagtggcatcatcatcagccttgttggctggctgccttcgtggggatgtacagacgattagtggaagggctcatgtaa

SEQ ID NO: 30426 - DNA, 175 bp, Zea mays
  Peptide Sequence Number=SeqID_73801
atgaaaacgctgcttgtgtctgggaggcaggattgtgagaacgtgaaatgcattacgcgctctccctctagacagccagaagctgacaaagctctcggccgcgtctcagttagtctgattggcctgcgcacgagcgtggagcactactacagcacacctctatacaggcggtctg

SEQ ID NO: 30427 - DNA, 753 bp, Zea mays
  Peptide Sequence Number=SeqID_73802
atgacggatgagaaggactcagccacagaaagacgactagagtctccgcctcgccatatgatggacgtaagtgtaatttcagagagtggttgtatggtcctcggtcccattggcctgagccagaggcaaaggaaaagaaaaaatgagtggacagaagagttgaagtctgatccagtactctgcaaatgtggtattgaatttaagtatggattagttccttccgagcatggtgtgggctatttttgtggacatatggtagattacgatgagcagacaaggaaatgcagttgggagatatacgccaagaaagaagatgtgatgcatacaataaagtccaagagactaatggggcagaagatgagttgtggatctcagctcgttgattcctacattaaagatcgcagacaggagatgtgtaggttcgcggaatcaatgtgttatgacagcccgatgtgtgttgagcggaggagattgaaggcggcaaatgagaagagagcacatgatgcaagggaatgggaggcggttagagccgagaaacagatgttggggaatcttgttggtcgtctgagtgcaaaaattggatgtgtcgtgaactatatcgcagatgaggctcgtgcaagatacgttcaggaaaaaatggcgacgatggaactgatggaggaggaggacacattaaggttgagtgagcttatcgcgctcgatgaggcaggattacatggggaaagaggaggacgacacatcaaagttgactga

SEQ ID NO: 30428 - DNA, 1728 bp, Zea mays
  Peptide Sequence Number=SeqID_73803
atgggcaagtcgccggggaagtggatcaaatcggtgcttttggggaagaaatctaccaagtcaggtcctaccaagtcgaatgaatctaaggctgacaacaacagatactcgaccggggaggaccgcacattgtctgagagttctcctgtgatttctgagccggtactagttaacatccacaagaacgtagctatcaatgggaaggctgcagatgccagtgatagggcacggcaacaagatccgcagagccaaagcgttgttgagtccagatcatcggctccagctgctcagctgggagaagatcaagctgcagcgaaggcacaggcagcctttcgtggttacctggcacgaaggtcattccgtgcattaaaaggtatcgtaagactccaggcgctgattcgagggtatcttgtaaggaggcaggctgtatcaacccttcgcgcaacatggttgattgtgaagtttcaggctctagttcgtggaagaaatgttagactctctggcagtcgcatgcagctcaatgtgaagtttggtcagagtaactttgggggtgttagatcgtctgatgcatggaaagagaagctatcttcaaatgcttatgttcggaagacatgggaacctaaggggaaggggttcgggggtttctcgacccgccttctgtcttcaccaattgttttagaacctcttcacttccagtatgacaagagggatcccaattcaacctataactggtttgagagatggaccataggttgcatctggaagcctgcttttcaacccaaaagagttgctgatgggaaaccactggtaaagaaggctagttatgcaatggaaactcaatcagccaagttaaaacgcaacattcggaagggttctgctgctatcgctgggagtttccatacatctggtgaatctgataaagtaaaaaggaatccaaagaatttctctagcttccctgctgattcagtaccagatagccagttatctgaacttgaaaaggttaaaaggaacctcaggaaggtaactgattcgatggctgaagcctcaaagatatctagttccagggttgattcctcgaaggtatgtaattctacagctgaggttccaaaggaatctaatcctgtggcagaaatctcaaagatacgtagtctcctgaatgggatctctgaccatcaggatattcaatgtgagaatacacgtgaatcttcatttcctcttggaactcaagaagactctgacaatgatcatctattgcgatattcaaatatggatagcttggacttggtacctggtttgaaaagtgatcaggaaattcagctggattcggtttctataggagaaaatgttgatgatcccactgttgttgctccagcagttgaagaaatgtcaccgcaaaacattgatacggaagacaatgttttatgcaagaaagaggaagcaaggtccaaggaagagcacttgtctaatggaagccttagaactagcaagaggaagtcttcattccccaacaaatcagaatatgtagaaaatgggactcacgctactcctgttcagccaaggcagccaagctatatggctgcaacggagtccgcaaaggcgaaattgcgagcccagaattcacccagtctggattctgattcagcggcagaaaagaatggtttcacccgacgccactctcttccttccagtacaaagagtagagcacttaaagctgaatggaagcgctga

SEQ ID NO: 30429 - DNA, 1899 bp, Zea mays
  Peptide Sequence Number=SeqID_73804
atgtgcgcatgggagcgcaagttgcacgatgaggagaggagcgtccgaggattcggtgctgaggctattggaaaccaattgggggtggttccttgtggccttcgtagaaggcgcaagtcagagacccttcgtgctcagtatattgatgtcagggagctcaggatttgtgctggaacatggaatgttgcaggcagacttccacctaatgacttggatatccaagaatggttggatatggaagagccagctgatatatatgttcttggatttcaagaaattgttccactaaatgctgggaatatatttggcgctgaagacaaccgccctgtagcaatgtgggagcatattattcgtgaaactttgaataagatcagcccagataaacccaaatataaatctcacagtgatcctccttctccgtcaaggttcaagccatctgatgatgcttttgttatggaagatgaacttattagtgagtctgatagtgaaggtgatggggaggtgcacccattgaacgaacaagatttggtcgactctgttgatggcattcatggtaacaaatgtgaacctcaaacaattttacaagatgaagagttcagcaggttgccttcagtgaagacttttgacagatccaataacctaagttttaaagaatctaatttggaagagaagatctgccagaagatattaactaaaacattcagtcactcagagaggcttgggatgatttggcctgaaccaccattggatatgtttgcccagtgtcttccagacagcacaaagccatttgcttcaggaaaggttttaagatcatatttgtctttcaagtcggtaaatggagattctggtccatttgctgaggacaattcagttcctgatttttatatgagctgtgcagcagttaaaagaaaaaggccatactttgtaagaataataagcaagcagatggttggagtgtacctatcaatatggagtatttatgttttagcaccaattgtcttccagtctttccattctcatatcactggcatttactttccatcaatacaccaacactacatttggaaaaggggatcaatatcagtaagcatgtccatataccaaacacacttttgctttatatgttgtcacctgacctctggagaaaaggaaggagatgaactaaaaaggaatgctgatgttcaagaaatccaccgaaggacaatatttaatctagtttcgagagtcaacatgcctaaaacgatatatgaccatgaaaggattgtatggctaggtgatctcaactataggatcaacttaccatatgagaagacacacgaactcatatccaagcaggactggaacaaattgtttgggaaagaccagctgaaagtagagctgaagaaggggcatctgtttgaaggatggactgaaggggtcatcaactttcctccaacgtataagtacaaggttaactcagaaaagtacataagtgatgataacaaatctggaaggagaacacctgcatggtgtgaccgaattctttcccatggtaagggtatgagattactgtcatataagacagttgatctcagactatcagatcaccgccctgtgactgctgtgtacatggcagatgtggaggttttctcttcaaaaaagctgcagagagctctgaccttcaccgatgcagaggctgaggaacagctctccttcgaggaagacaatgcttctggaatatacaaccttggactatatgaaagttcaagtgaagtttacaccccattagtaagagccaaagttttcagcaaggttacctggttgaagccgcagccgttgatgcgggcgctgagccggccccggcggaacggactgcccgccgtgtcccggtcattcccaacgctgcgacttcgacgctag

SEQ ID NO: 30430 - DNA, 156 bp, Zea mays
  Peptide Sequence Number=SeqID_73805
atgacggtgcgtttaaatgatggattgatgggtatcagggggccactatacacagatgaaatgaaattacctggtagggccaaggacgagcatggcgctgccgagtacatgatcttctattatgacatggaaaagaaggcttccaataagaattga

SEQ ID NO: 30431 - DNA, 639 bp, Zea mays
  Peptide Sequence Number=SeqID_73806
atgagggctggaaggaaacgatggcgccgacagtccccaaagcaaccgtcgaatccaactgaaaaaagcatcctggtgcgtagcacaacccagcgcggatgtcattccgaccccacggcgaagcctgtagacaccttgctacataggccgcaccgagcgccggtcgcgcgcgccgtactggccgtgggccgcgccggggctagggggctgccggcctacgcagagcagcagagcgccctaggggccacacccgcactgttgtggccggattaccgcacggccgcacggccgcgcgtccgcccccgccgtgccggggtcggggtcgcgcgcccgagccgccgggaaggccacgcccggggaggccggaccgccgcgatgctgcgcgtccgcgcccgatccaatggggtcggggcccaccgcgctgcggggtgccgcgcgggcgttggtgccacgccgccgcgcccgcgccgagcggccgagccgtcctcggaggccgggcagctggcctgcaccgagccgccgtgcagccgcgcccgcgccgtcgaagatccacgcccgaactcgaggatccgtaccgacggttgcgtgggctacgcccgccgcacctatgccctatggcggccgccgctagccagatga

SEQ ID NO: 30432 - DNA, 516 bp, Zea mays
  Peptide Sequence Number=SeqID_73807
atggcggcggtaagcttggctcggcgatggaagcaccgtggcctggcaccctcgaccgtccgcggactccaaatctgcggtgaaggccagatatgggggcgcggatccttctctgttcggcgacccacgatcctccattgttctctgcgcaccgcgacagctcttcggttcatggcgcaagagatggaggaggaggaggtctcggctttgactggattttatacccaaggcccgagtctgaccagtgctaatcctagcggggattacggggattcggtcactggtttgtcgcgcgtttgttacgacctgagaagaaagagccgagccaagattttgcggacgggagttgagaggatcacggtgcttcctgttggggaagaaacaactgacaaggcgacccacctggcagagaccacgaaaccggacgcgcgcgcgagtctgcatgcacttggatgtgtggcgccacatcgggcccacgaagcatggaccagggagaggagatgcccgcgtccatga

SEQ ID NO: 30433 - DNA, 780 bp, Zea mays
  Peptide Sequence Number=SeqID_73808
atggaggagagcacctcctcggcctggcgcgcgacccagcggctgaggaggcgcgactcccgcctccgcctgcgcaccaccgacgactcggcctcgccgtattcacgcggaggacgccctggatggtggatccgaggcgttccatggcctgccctatggcgtcaaggcaacatgctgcgccgaggtggaggccgggttaattatgtggggcgggggaagagggttcgccgacgaacggagccgggcgcgaggtgctgctacgtcgacgtcgaggaggaggaggaggagccgcgggggggagctggatccgcgggcggtgtacctggggttcgcagttggttgtcttttctggtcgctttgcttcagtgtcttcacgggccgccggcggagatgcggttcacagcgtctccggtggtggagcttccggtcggcggcgcggtgctgatgttcgagcaggacaacgactccttcgaggtgggcacctctgtgtggccctcgtccctggtcctcgtcaagttcgtcgagcgctgcatccgcgacccggccctcccctttgccgacgtgccccgcttcccgggaactcgggccgtggagctcgggtccgggtgcggcccggcaggacttggcctctcccgcctcggcctcaccgacatcgcccccgttgaagcagtcaaaaatagctgcaataccaaacatggaggatatcatgtcgtcgatcaggaggcccccgacggcgcctccgagcaggccggaacccgtagccggctgcctgcggtggcg

SEQ ID NO: 30434 - DNA, 1398 bp, Zea mays
  Peptide Sequence Number=SeqID_73809
atgatgcgaccgctgctccgtgacccaaccacgctgctcccgtcactcgccgaggcgtcccacctccgcgcgctccacgcgcacctagtcgtatcgggccgcctcgcctccccgtcccacctcgccgccttccttgcttcgctcgcctcctccaaccacctctcctacgctcgcctcgtcctcccgcagcgtcccgccacgctgcttgcgcacaatgccttcatccgcgcgctcgcccgcgggccacgaccgtgccttgcgttcgccgccttccgggacctcccgctcccgcctgaccactactccctcaacttcctcgtccgcgccgccaccgccctggtggcctcggccgcggaagaaaagcacgtgtcggccgaggtgaacgcgaggctgcaagcggtgtccgcgcacggggccgcggtccgctggggccacgcggcggacccgcacgtccagagcggagtgctctccatgtacgccgcgctgggggacgtcgcctcctcacgggctgcatttgcggagatcgcgtgcccggacgtcgtgtgcgtcacggcgatggtggcggcgctcgctgcaggcggcgacgtggacgccgcgcgcgacctgtttgacggaatgccgcagagagaccacgtcgcatggagcgccatgatcgcagggtacatgcacgtaggcaggtcgagggaggcactgatgctgttcgacgaaatgctgagtgctggcactaccgtcggcgaggcgacgctggtgtctgtgctcactgcctgtgcgcaaattggcacattggatcgtgcgatggaggtgtttgagagcatggctgaaaggaacgtttatacctggacaagcgcggttagtggccttgcgatgaatggcatggggaccgagtgccttcagctgttcaagcgcatggaggggcgtctagacgacgccattagtttcatcaatgacatgccaatggagccacacgaagctcatgtccagctgtctaacatctacgcagaatcgcagaattggaagggtgtctccagggttcgaggcatgatgaaagccaagggagtgaagaaggtgcctgggtggagcaccattgaggttgatggcaaggtacacgagttctatgttgggggcaggttgcacccaagatacaatgagatcgagctgatgcttgcagagatggatcggaggctaagactgcaagggtacactgcgaacaccagagaggttttgtttgatattgaggaagaggagaaagagggtgccatctccttgcacagtgagaagctggcactggcctttgggctgatcgtgttgccagaagacgtggaaattaggattgtgaagaacctaagggttcaaggtagatgcttcagtcaaacctttccaactttatatggttattaa

SEQ ID NO: 30435 - DNA, 993 bp, Zea mays
  Peptide Sequence Number=SeqID_73810
atggtggcgatcgagaaccagagccaggccgcggtggcggcggaggcggtggcggcgccggcgtcgcggatccccagggaggcgcggcgcctgctgcacgagctggcggcggcgtgggcggacgtggccgactgccgcgcgctggaggtcgtgccgctcaagggggccatgaccaacgaggtctaccaggcgcgctggctcactgcaggccctgccggccagaaggaggagcccagggcggagagggaggtgaggaaggtgctcgtgcggatttacggcgacggcgtcgacctcttcttcgaccgcgaggacgagacattgtcagctgccgaccttcgcgatcctgaaatttcagctctggtggcttccaagctgagggagttccacaaccttgacatgcctggtcccaaatctgtgctcatttgggacagacttaggaactggctcagaactgccaagagcttgtgtccacctgaagaagccaaggaatttcggttggacagtctggagaaccagattactgcattggagaacgagtgttcaggtgattaccagtggattggtttctgtcacaatgatcttcagtatggcaatatcatgattgatgaagagaccaacgtgctgaccatcattgattatgagtatgcaagcttcaacccagttgcatatgacattgctaaccatttctgtgagatggcagcagactatcattcatcaaagcctcatatactggactacagcagatatccagatgttgatgagcagaagcgttttgttaagacctacctgaacatttctggtgaggaacctgatgcggaagttgtggagaacctgctccaaagcattgagaagcacacgctcgccagccatctagtatggggcctctggggaataatttcggaccatgttaacgacattgacttcgactacaaggagtatgcgaggcagagattcgagcagtactggcacaagtctgcgatcttaacatcttga

SEQ ID NO: 30436 - DNA, 840 bp, Zea mays
  Peptide Sequence Number=SeqID_73811
atggcgcttttcccccccatcctccttgaggaaaggcgacgcaggggcgctcgggggctgctctcgcaaaacccggctccggccaaaccgttgacaacgtcaacataccagcccgagaacttgggactcgaccgtgcacccgggctacgaccagctcgcatgagggaacaaccagaccgaccgaagcatcgcgaaacagtgaggctgacagcagccaagtccggcctcaggcgccataggaaactccgcatcgcccgaccccagggctcggactcgggcttggccccggaagacgacgaactccgcctcgcccgatcccagggctcggactcgggctcggtcccggaagacgacgaactccgcctcgcccaaccccagggctcggactcgggctcagccccggaagacgacgaactccgcctcgcccgatcccagggctcggactcgggctcggtcccggaagacaacgaactccgcctcgcccgaccccagggcccggactcgggctcggccccggaagatgacgaactccgcctcgcccgaccccagggctcggactcgggctcggccccggaagatgacgaactccgcctcgcccgaccgcagggctcggactcagccctggcctcagccgacggtctccgcctcacccgacccaggggctcggacttgacctcggcctcggaagacagactcgacctcgacctcggaggagcctccacctcgcccaacccagggctcggaccgaccacgtcacaggaggcgccatcattaccctaccccaagctaactcaggctacggggaacaagaccggcgtcccatctggctcgccccggtaa

SEQ ID NO: 30437 - DNA, 1161 bp, Zea mays
  Peptide Sequence Number=SeqID_73812
atgccgaagatacatacatgtttaggccccgacagccacaatgaacagacaccggcactcaaggtgccattacaaatggaactccggttccgcctccgcaggtacgaacaaccccccacgattggagggcctgcggagcaacagaaggccgacggatggctcaccgccgcccgctccagcagcggcgacgacgacttctgctccgagcggccaaacggcagcagcgatgacctcagggcagatgctgctgccataaagccctcgcccacatccccactcgagggagaggacgagcagaaggccgtagagttggaggtcagtccgcgggcggcaccgactatctcgtcggcggagaaacccctttcggctgccgcggcggaaggtggcaccgggagcagcgccgaagccgcccggaccggagagccggacacgcggcagctgggctggtggtcaccgtcttgggtggccaccggcgaggggatgcggccgggctgcctgatgaaaatccttgaagccgaacgatggctgaaagaccagcgggtgaaaaggtggaccgccatgcaggcgacatgcaaccacaccaagtgggcgcaccctttcaactccaacgcgcccagcatgggggcccgagcccacacgtcatgtaaccggcgcgccggttgctacgtgcaagatactgcaccgccactcgcgccactaccgcgcctcctcgactgcggaaccagtaccgcgactcgaggcaaccctgcgcatgacccaacagtgccacccaggcacatcggtcacgagccagtcagccgcgggagaaggcgcgacggtcgatatggccagaaatgggccgacattaatggcggtggcaggcgagcaaaagcagcggtcaagtcggaccgggaaaggggataccccgaaagggatcctcctccgcgaaggaaacgggccccgagccccctactgatcagaggttcgaaggctggcccctcagaggagttcaacagccgcctcagagcgctcgggctccgcgcccaccactggtcagaggttcgaaggccggcccctcagaagggttcaacggccgcctcaggccacacgggctccgcgcccactactgatcaggggttcgtaggctggccctcgaagggttcacagccgcctcagacgtag

SEQ ID NO: 30438 - DNA, 852 bp, Zea mays
  Peptide Sequence Number=SeqID_73813
atgaggggggttttcaccttgagttatggcggtagcggtccggccacgcggaggcgaagatccacggcggaaatcaaactacggcgagcaattccgcccgcaccgatcgtccgcagtcaccgcgtctttccacaccacgtctgccacagcacccatgaccacccaaagctcccacgagacggatggggacaaggaacgctgattccgagcagtggctggatcttgcgccgcgctatggttgagacagttgacggcgaaggattgtgggggcgagaagctcaagggagccctgggttgggcgaggtggaggcccctccaaggtcgaggtcgagtctgtcttccgaggccgaggtcgagtccgagcccctgggtcgggcgaggcggagaccgttggctgaggccagggctgaggttagggctgagtccgagctctggggtcgggcgaagcggagttcgtcgtcttccggggctgagcccgagtccgagccctggagtcgggcgaagcggagttcgtcgtcttccggggctgagcccgagtccgagccctggggtcgggcgaagcggagttcgtcgtcttccggggctgagcccgagtccgagccctggggtcgggcgaagcggagtccgtcgtcttccggggctgagcccgagtccgagccctggggtcgggcgatgcggagtttcctatggcgcctgaggccggactcggctgctgtcagcctcgctctgttgagtggcgcagcagtcggagcggcgcaggcggcgctgtcctcttgtcagggcggtcagtggagcggcgaagtgactgcggtcacttcggctctgtcgactgaagggtgcgcgtcaggataa

SEQ ID NO: 30439 - DNA, 834 bp, Zea mays
  Peptide Sequence Number=SeqID_73814
atgggtccaggactctactccgacatcggcagaaaggccagggatctcttgacagggggcttcaatacgggccagcagttggtcctcattacccactgctccaatggaacccggatagcagcttcaagcacaaagagtaacgagttcatcattagtgagatccaggcccagctgaagaataagaatgtcacagtggatgtcaaagcaaattcagaggctaatctctcaactacagtcactgttgaggaacttggtgtactaggcttgaaaaagataattaccattccttatccacatccagcatttgggaggcttgaaatccagtacttgcatgattatgctggtatcaacgccagttctaccatgaacagaaaacctttggttaacctttctgctgtatttggcaacaaagctattgctgctggtgctgatgttgtgtatgatggtgctactggggatttcactaagtacaatgctgggttgagtttcaccaatgcagatctcaatgctgctgtgaccttgaacaacaaaggggacagcctcactgcgtcctactaccacttggtggacacagagaagaacacagctgttggtgtggaggtggcccgcaacttctcaaccaaggcgaacagagtcacctttgggatgcggcatgctctggaccctaccaccactgtgaaggcgcgctacagcagcaatggaatggccagcgccctcatccagcacgagtggagacccaagtcattctgcaccctatccaccgaggtcgacgtcaacaggtttgatttcttgcagacccccaagtttgggctatcactggtcctcaagccctga

SEQ ID NO: 30440 - DNA, 456 bp, Zea mays
  Peptide Sequence Number=SeqID_73815
atggaggttggtgatgacaacagtcttatacgtcggagaggtctcaatcgcctggtacccgagagggtctgtggtggtaggaccctcgaggtgttgctcaacctctctattttggcgagcgagtgcattagtggcaatgccctcttgctcccagacgagagcggccgcccgctcactctccctgacagcaacgactatagccttggtggcagcgagggacgcaacgagtgtggagtgggttgcagccacctcatggggagaaggggggggcatgtagggccgaagctggaggggaagcccacacccaagtgctatgtgcccgccctaacgggcgatagaacaacgatggccggtagtcatagggcgacgacactatgcggtgatggcgagacagtgaatggtggcatatccgcgatgccggtgaacatagggatgacaacggtgatattggcctag

SEQ ID NO: 30441 - DNA, 531 bp, Zea mays
  Peptide Sequence Number=SeqID_73816
atgccggggaggagatccgagtcagctgctgccacagcgtgcgcgaccgtcaggagagtggaggggaacacgtccgacggtggtgaggatgctcgcgctagggacagcggcggcgacggctgggactcgcgccattgccggtggggagccgagtcgcgcaatgttttcaagttgattaatcgccctagtcgtcgcgtgcgcgaggggaacacggtcgacggtggtgaggctagtggtggcgaggtcgcgcgcactggggacaacggctgggacgcccgcgcccgcacatgtggggagcagagccgtgtgtgtgccagcgggaggcgcgacaacggtgtggtggctcgtggcggcatgtccggccgcgcccacgtcgtggaagtcgaggacactagccggatccagctctgccctccttcgccataccatctctgcactatagccggaattcgctatgaaggaccttgggcctctaaggctgcttccagcaacgcctcggctacggatgcggaattcacgatgtatacgtga

SEQ ID NO: 30442 - DNA, 411 bp, Zea mays
  Peptide Sequence Number=SeqID_73817
atggcatggcatatgacgatactagacacagacgtggctaagaggggaggagatttggggcatgtattgaagaaatctgaaggctctagttctcagccacaaaacacttcacctgaggatacaggtttgagtggcaaacatatatcagggttctatgaggaataccccatccttaaatcagagtatgttcagaatcttgttactgtcactgtgaggagagacattgaagcgcataaaagacttgtggaatttgacactgatattcctggagaagttatcattcattggggagtttgcagagacaatactatgacatgggagatcccaccagaaccacatccaccaaaaacgaaaatattccgacacaaagctcttcaaactttgctgcagttatttattcccctttactag

SEQ ID NO: 30443 - DNA, 741 bp, Zea mays
  Peptide Sequence Number=SeqID_73818
atggccgacaccgacagagatctcaaagcgttgttgagattgctcattaaacaactcgatgaaggtttcaaacagttgaatgatgcttctccaagaacaggcagctacggaccagaccagcactgctacgtccgactagcagccttgctgcttctgcttgctcgtgctgccgttcggtgccggactcggcggccgatgagatggactgacgctactgtccgtgaccgccgcgccttcttcccccacaccccgtcttcggatctgcgaccgtcgcgcccccagccgtctgcttcaaccctgggctgtgggggcgccttcgccggtgaggtacctggtgggggcagcgatcatgatgagcgacgtggtgctttcctccctccatgtcctcctccgcgccgagcgcgccctccgcgaccggccgaccgcgacgtcggcgaggtccacatcccgctgtccgagctcctctccggcgcccccgacggccccgtccccgccaagttcgtcgcctaccagatgcgcaagatctcctccggcaagccccagggagtcctcaacctctcgtacaagctcggcgagttcgccaacggctacgcccccgccccgccgcccagtccgcctacgcccagcctccaccgaccgccgcgtacccgcctccttcaggcaaggctgatgcctacccgcctacccgcctcccgccgcgtacccgcctccttcaggcaaggccgactgaaagggaattag

SEQ ID NO: 30444 - DNA, 678 bp, Zea mays
  Peptide Sequence Number=SeqID_73819
atgcccgagctcagctcagaccgacagtgggacagactcacagattgggcaggacatttggagtattcttcagttcaggtccctccaattcccaccatgatctcttggccaaccatctaccatgttcttgaagaaacggttcccctgtatgtagctatgatagtggcctacctatccatacaatggtggaagctgttcacgccagagcagtgctccggtatcaacaagttcgtggcgaagttttccatccctttgctctctttccagatcctctctacaaacaatccttacagcatgaacctgaagctcatattctcagatgtcctacagaaatcgctctccttgctggggtttgcagttgcctctagggtgtgctgcgaggagaagtttgattggctgattacaggtttttctctatcaacgctgccaaataccttgattgttggaatcccattgctcaaaggaatgtatggcgatgaagctgtgaagctgctaagccagatagttgccttgcaaagcctgatttggtacacacttctgttgtttctgtttgagtttcgggctgctagaggaatggctatcacaacatcatctgaagctataggtaagaacctcctcactgcatttttgaagatcgacatctcaatttgcttctgctctacagttcgaattacttaa

SEQ ID NO: 30445 - DNA, 195 bp, Zea mays
  Peptide Sequence Number=SeqID_73820
atgagggagggggtgagggcgagcggggttctggctcaagtggccgggggcggggcggttgcgagctccacgcgcgacgtgggcgcggagtctgcggcagcgcgcagctctggcggcagttacgcggagaagacggggctgacaggccgggcccgcgagcagagagaggggaaagcaggtgacaccttcagatag

SEQ ID NO: 30446 - DNA, 1131 bp, Zea mays
  Peptide Sequence Number=SeqID_73821
tgggcaggtacgacgagcgtcgacttctcgctggcgcagcttgtgcaggtgatcgtcctgcttgccaccggaggcctcaacggcggcggctacatggcatccaagtacgtcgtgctggccatctacggcgccatcctggtcatacacgggctaatgaacacctggcatggttcggccatctcggagcgttctggaacaccgcaggttgccgttgcgacggagagggcgagcacggagttcatcttcacgcatttgaacacagacaatggcatgggcgtccacggcaaggcctacatccttgccttggggctgctgatgagccagtactcgctcatcggctatgacgcatctgcacacatgacggaggagacgaagaacgcggactggagtgggccgatggggatcgtcacctccgtcgctctgtccagcgtcttgggatgggtctacctggtggccctggcgtcgctgatgacggacatcccgtacctcctggaccccggcaacgacgccggcgggtacgccgtcgcgcaggccctctacgacgctttccgcaggaggttcggcagcggcgtcggaggcgtcgtttgcttggggatcgtcgccgtcaccaccttcctctgcggctccgcgtgcgtcaccagcaactcaaggatggggtatgccttctccagggacggagcggtgccattctcgcacgtatggtacaaggtgaacaagcaggaggtgcccttgaacgtcgtctggctctccgtgtccgtggcgttcgccatggctctcacgtcgctggggagccaggtggcattccaggcgatgctgtccgtggcgaccgtcgggccgtacatcgcctacggactgcccatcgtcttccgcgtcaccacggcccggagatccttcgtcccggggccgttccacctcgggagatacggcctcctcgtcggctgggtcgccgtcgcgtgggtggccgccgtcaccgtgctcttctccctgcccgtagcgtaccccgtcgccgaggacaccttcaactacgcgccggtcgtcgtcgtcggcgtgctgctgctcagcgtcggctcgtgggtgctccacgcccgcttctggttccaagggccaatcaccaacgttgatgtcgcctaa

SEQ ID NO: 30447 - DNA, 1192 bp, Zea mays
  Peptide Sequence Number=SeqID_73822
gaatctgtacaaatttccagttgatatgcagttagactatgagagtgatccccctcttgacgatacaaaagctattgagaaggagtcatcacttaatgttgctgtttctcaactcgcaattgacttcgatagagactctaatttatgtttggagcgattttcccgtgcaaggaaagcatctgtagtctctactggttctcttaagcttgacctcgctctcggcgttggaggattaccgaaggttgcattattactgattaaagtagctcaacagggtagaatggtggagatatatgggaaagaagcatctgggaagacaacactcgcgcttcatgttattaaggaagctcaaaagaatggagaaaatgccttcaacccttcatttgctgaatctattggcgtagacagtgaaaggctcttgatagcccaacctgattctgctgaaaattctctaagcattgtaaacactcttgttggtggttctgttgctgttgttgttgtggacagtgttagaacaaagaggacatcaagtaatcctgggatctacaaggaggtgccttgcggtggtaatgcactaggattctatgctgcagtcagaatgaggacttcaaggagagaactgcgctatagtgaagatgaggctaccggcgtaggtatatcagtgcagatcatcaagaacaaattggctccagcgaacctgaagaaggaagccggcatcgacatcacattcggtaaggggatctgccacgagtcggagatcctggagacggcttcctccgtcggagtgatcctgaaagacgggtgtgggtattggatcaacaacgagttcctggcaggcaaggtggaagcggagaagttcctgcgtgaaaacgctgcagtggcagatgagatctgcaataccgtgaggaacgagttcttgcaaagggctgacttgtcatcacacggcttgagggacggccaagaattccaaactgtgcgccgtgcgcggatacgtgttctgtccacagcaagcgaagtggcgtgcaagcgcccctgggaagggattggcgaagcggaggaagcagtcatcggtgcggcaaatgacaaagaaggtttggctgcaacagcaggagatgggccgtgtcgggccaaaaggctgaggaagtgcaacccaaaggtctttgggccggcgtggctaaacagcacaaagtaa

SEQ ID NO: 30448 - DNA, 1113 bp, Zea mays
  Peptide Sequence Number=SeqID_73823
atgcaggcggcaaaccacactaagggggcgcaccctttcgactccaacgcatccagcgtggaggcccaggcccacacgtcatgtaaccggcgcgccggttactacgtgcgagaagctgcaccgccacttgcgccagtaccgtgccttctcgactgcggaaccagtaccgcgactcgaggcgaccctgcgcatgacccaacagtgccaaccgagcacatcgatcacgggtcagtcagccgcgggagaaggcgcgacggtcaatatggccaaaagtgggccggcagtaatggcggcggcaggcgggtggaagcagcagtcaagtcggaccgggaaaggggatactccgaaagggatccttctccgcaaaggaagcgggcccccctactgatcagaggttcgaaggctggtccctcggaagggttcgacagccgcctcagagcactcgggccccgagccctcctactgatcagaggttcgaaggctggcccctcggaagggttcgacagccgcctcagagcactcaggctccgcgcccactactggtcagaggttcgaaggctggcccctcgaaggggttcgacagccgcctcaagccactcgggctccgcgcccactactgatcaggggttcgtaggctggcccccgaagggttcgacagacgcctcagagcacgcagagcgagggatgactctgggtacgttcgatacacaaccaaggctcgggctacgctcccgaggctcgggggctgctctcgcaaacccggctccggccgaaccgttgacagcgtcaacataccagcccgagaacttggaacctgactatgcacccgggctacgaccagaaaacagcgccgcctgcgccgctccgactgctgtgccactcgacagagtgaggctgacagcagctaagtccagcctcgggcgccatgggaagctccgcctcgcccgaccccagggctcggactcaacctcgaccccggaagacggactccgcctcgcccgaccccagggctcggactcagcctcgacctcggaagacggactccacctcgcccgaccccagggctcggactcagcctcgacctcggaggagcctccgcctcgcccgacctag

SEQ ID NO: 30449 - DNA, 123 bp, Zea mays
  Peptide Sequence Number=SeqID_73824
atgggcaaggaagaagtcaagacacacaagtgcaagaaggcctttgagagctcaagcgatgaccttaatgaagatgcttacatgttcatcaaaagcttcaagaagtttgtcagacattgttag

SEQ ID NO: 30450 - DNA, 285 bp, Zea mays
  Peptide Sequence Number=SeqID_73825
atggcagtggagaagaagactttttgtattgtctccctgacaggcctgatacttagcaatgccctcagggcacagaaggatgctgaagacgaagggtgcgctatagccctgagcaaccttcgttccgaagtaattgaactgaggaacgaagatcctgctaaagcgtcttcgggccctcagctaaaaggagacgacgaaattaaaaagatggctgaagctattatggacgaagtcgtcaatcggctcctgaacgaggctgcagaagtcgttttgagagaagattaa

SEQ ID NO: 30451 - DNA, 468 bp, Zea mays
  Peptide Sequence Number=SeqID_73826
atgggcaagagcaagaagggtggtagttcttcgcatcactccggcgacaagcggaagcgtgagccgactcctccctcggaggttttcggcgactcggagtactcggaggaggagttctcctccgagtcagagggctcaccggtccgtgcctctcccccggtgtcgtctgatgactcagacgactcccaagggatcgccgcagaggtgtggacctacatccgcgtcgtcgagcgcgtcgggctcgagggctcggatgagtcggagtactcctcggacgaggagaactcctcggactcgttcgaggagggcggcggcggcgatggcggtgacggtgacgacgacggaggcgatggtgacggcggcgaaggcgacaacaagggcggtgatggcgacggtaaaggtggcagcggcgacggcgacaatggcagcaagggcagcagcagggacagtaacaaggccagtggctag

SEQ ID NO: 30452 - DNA, 1020 bp, Zea mays
  Peptide Sequence Number=SeqID_73827
atggcgattacgcaagactttgctcctttggctgttggggcaattgttgttggagttcttgcctcccttctgtcaggtgcgcagtcccacggcgtgtgctacggcatgacagccgacgacctcccaccgccgagcgaagtggtgcagctctacaaatccaacggcatcgccaacatgcgcgtctactcccccgtcggcgaggtgatggaggccctgcgcggctcgggcatcggcctcgtcctcggcgtcgccaacgaggacgtcgccagcctcgccacgtgcgcgccgtgcgcggcgtcgtgggtggaggccaacgtcagaccctaccaccaggacgtgaacatcctgtacatcgcggtgggcaacgaggtcgacgcggccgccgccgcccagaccatcctcccggccatgcggagccttcaggccgcgctggctgcggcggggctcgccggcagcatcaaagtgtccacgtgcgtgaggctcgacgtggtcaccgacaccttcccgccctccagcggcgcgttcgcgcagccctatatggtggacgtcgcgcggttcctggcggccgcaggcgcaccgctgctcgccaacgtgtacccgtacttcgcctaccggggcagcccgggcgacgtgggcctcggctacgcgctgttccagccgggcgcggcggtgagggatggcggcagcgggctggtgtacacgaacctgttcgacgccatggtggactccgtccacgccgcgctggagaaggccggcgcgcccgacgtcagggtcgtcgtgtcggagagcggctggccgtccgccggcggggcggccgccagcgtgcagaacgcgcaggcgtacgttcagaacctggtagaccacgtcgcccagggcacgcccaagaggcctgggccgctggagacgtacgtgttcgccatgttcaacgagaaccagaagcccggcgagccgacggagaagaacttcggcctcttctatcctagcaaggctccggtttatcctatcgttttccgacgctga

SEQ ID NO: 30453 - DNA, 870 bp, Zea mays
  Peptide Sequence Number=SeqID_73828
atgggtcccacatttaaggccttctgtggtccaaatgtttcaagcagcaaaaatgtcaatagaactggcaaacatgctgctctaagttttgtcaaacgagtactagtgcgatgccaaaactacgaagaggcggggacaagttgctttgatgagcctattttcaaggacatgtttttatcagcgacgtctcacagacgcagtctagatactgcttcacaagataacaatacaacagcgagaccagtccacagggccggtgcaccagacgcttcgcgaggaagcagtcacccgacggacctgtcgtttgcaaaggaggatccctggacaaacaacgtaaagcagcgggaactgttgctggacgaggttgtaggtagcataacaggaggagctctgagaacctcctcctccgtccttggtatctccctcgtcagcaatacgaaagggaagagaagcgagagggaagggaaggggcacaaccgagacagcctcaggtccggccgtccgtcgccgtccaacgcaaagggtgaaaggaagaacaaaacaaagctcagacagaaggcagccaacatctctgctccttcaggaggtctacagcttccagcgaaaacaacgcctcccagcagtgggaacggcaaggaggagagcgcagcagcagcagcagctgctgctgccaggcatggtggtgatccggcggcgaatgcttcgaatgacgccgaaatgcccgacctggctaacctcgagctgccaggactggacgccgactttggcggctggttgaatctggacgacgacgacgccctccaggacctcgacctgatgggcctcgagatccccatggacgacatcaacgagataaacctcatgatatag

SEQ ID NO: 30454 - DNA, 2517 bp, Zea mays
  Peptide Sequence Number=SeqID_73829
atggcgaagattgataaactttgtcccaatattgtgcgaaaacgttctcgaggagacagttcatctaatgaacgatctagtgtgttatcatctggaggagttacccctaaaaatgttcctcagagccatttaaatgcagatgatatggaagctgggcttcagagagaagagaggacaaagaatgcaggacaaaataggagaatacgtacatccatggtggagggcaagcttggtgcagtggtgagagctgtctcaccgagtctccaggtcgcaggccttatttggcaatgtggcttagttgctgtttttagcatgatggatgcaagaacagctggtccatcaagaggccccggacctactgataggatctcagatcctggtaaagccaccaatggcagttctgcagttccagaagaaaaaatcagaggtttggcaactactatcgatggttgggaaaagccaaaaatgaagaaaaagcgttctaccattaaggcagacatgtcactggctggtgttttgaggactgttgatgtagaccgagagtcaaaacaaggcatgcagcacaagtttactaatgacggtagggcgagaatgacaagttctagtttcaggtctggaactgttgcatctggcacaaccaaagcagatttgctttctacacaaaatggtcttgttatgcgacccttaaataggagtgatcaagacaatggtttccatcctactaacaaaagggaacgtcaagctgcattagataaagaaacgcccaacccgagaaccattaacaagcctaatgaagacgacagtggatgtaacattgcatcattaccgaaggcgaatggatctgcgcggggaccccgatcaaattcagggtcaatattgaagtcatatccaaacattcatcgatcacaagctagttctgatgattgggaacatccgtctggtacaaataagttaatttctgctggtggatctggcattcataaacgtacaaaatcaacacattcattatctcctccgatccaatggggtgggcagaggcctcagaagatatcccgttcagcaaggaagtcaaatttagtccctataatcactactgatagtgcactggtaccaggttcgctggacagtcctgtcaatgaagattgtgcaggtttaccgaggcgtgcatctgtaaatagccttcaacaaacaaaacgaggagatcatgggctctcaactggacctgaaggcaatgagcctgtagttgctgagaaaaagctaagggacaagggcaaaagggctggtgaactggatgatgggcatggctctggttttcagaagattgctatgcttgggcatccttccaaaaggaataagttgcctgctgatgaggatattggagatgctttaaggagacaagcaagagttgtcccgggttttactctgaccaggcctgggactcctgtatccattgacaagcttgaaaatgctccgattacaaaacaaagaagtgtgaggacagtctcagagagaactgagagtaaatctgggagaccactgatgaagaaaatatctgagcgcaaaagtaatgcacggcctaggcatacaagtagcagtgtgcagtcagactctcctgtgcaatctgaagatgatcatgaggaacttcttgcttcagcaaatgctgccctaagatctgcttgtgcaagcacgttctggcggcaggttgaacctttcttcgcatttttgactgcagaagacatcacatatcttagtcaacagatacatttaccagatgattcctcttcaagtaggtcaatggaagggggtgaatgccaaaaatataagggtggtcttgaatacatttcacacccctcaactccagccgctagcaacaaagatgatcacgctgctcttccaaatggttttggcttgaatcagttggataatgacataggggttggctgggaggcaagctgcattgaacctatcctcgatcaacttgtccatgggattggggtaccaggatggtcttcagttggccaaagacttattcaagcattgattgatgaagataggatcgatagtattaccaacaacacttacataagcgagggctatgcatttgatacacatgaaattcattttgatggaggaggatggaagcctcactcaaataattataagttagaacctttagcgaattttgaagcttcaaggaggggcccaaatggtctgacaatggattctgactggaaatataatgatgtgtcaaatagaagtggcaatgtcatggataaaaccaaggtgtggcctgagtttcagtacagtgagatgtgcttcaatgataggattatcattgagctgagtgaagttggtgtatctattgaacctgtgctttattacttattgatatgcacattctgttacaatgatggtgttacttcccatcgccttactctattgcgccatttcccacttgattctgcttctatccagctcaattgtgccatctgcctgatttcgctgctgttcgcttga

SEQ ID NO: 30455 - DNA, 744 bp, Zea mays
  Peptide Sequence Number=SeqID_73830
atgactctgggtacgtccgatacatggccgagtctcgggctacgctcccgaggtaccctaggacatttccgagaccggcgggaacgatttgtaacggaatcccaccagagggaggcatcgagccctcggaccctgtcgaaggggtctgggtccggcgaatcacctgcagaacccgaccacgcacctgagctacgaccaggccgcatgagggaacgatcagaccggccgaagcaccacgaaaagcattcagacctcagaggagtcaaaccactcctccgaggcctcagtggctacacccggcgggaaaacagcgccgctcgctccgctccgactgccgtgtcaaccacccaggcaaagactgacaacaagtcacgatcaaccaccgagttcggcctcgggcgaaacaggaagctccgcctcgcccgacctcaggctccggcctcgggaggaggtttccgcctcgcccgacctcaggctccggcctcgggaggaggtctccacctcgcccgacccccggactcggcctcgaccccggtctcaggaggaatcgcgtcctcgcccgaccccggcctcggcctcaagagaagtctccgcctcgtccgaccttgggctcggatcgaccgcgccaataggggatacatcattaccctattcctagcccgctcaggctacaaggaacaagaccggcgtcccatctggcttaccccggcgacgggtaatgatgacgccccgcgtgcaccatga

SEQ ID NO: 30456 - DNA, 786 bp, Zea mays
  Peptide Sequence Number=SeqID_73831
atgtctaagtacttgaagcggttacattttgctctggcaaaaacccagtatatccccttacaaacgggactccggttccgttcccgcaggcccaaacaacctccacaccagggggcccgcgggatgacgaactccaagcggctcgccggcaaccgctccggcagcagcgacaacgaccttcgtctcgggcggctagatggcagcggcgatggcctcagagcaaatgctactgctgaagggccttcgttcgtgtccctcatggaggacgagaaccagccattaaagccaaagagccggaggcttggagcgcaggtggcgccgacggtctcatcggcagagacaaccgctggtgcaagaggaagcctcacctctggctgccaccacctcagcaccgacaacagcggccccctgccttccaacaccacgccggcgaacagcggtcgccctgaagcgcaccggcaggtcctcactcccgtccttgccacaagaacgagaacggggccatcccagaacacgaatgccgccctcgcggcgtacgacgtgttgggcgaccccccacccccaatagccggcggcgcagcaaggaccggcggtggggggcggcaacggaggcagcgccagagccgctcgtgccgaggagccagacgcgcggtagctgccagcgccacaggcggcgaacgcccttctccccaaatcactgagggaaggagcgggccgctgcctatgcagaggcaggccccggctcagcccgccctccgcctcagcaaggatgacgaaaatccttga

SEQ ID NO: 30457 - DNA, 537 bp, Zea mays
  Peptide Sequence Number=SeqID_73832
atgatctccgcctcgcccgaccccagggctcggactcgacctcgcctcggacgacgatctccgcctcgcccgaccccagggctcggactcgacctcgactccggaagacggtctccgcctcgcccgaccccagggctcggactcagcctcaactccggaagatggtctctgcctcgcccgaccccagggctcggactcgacctcggctccggaagaaggtctttgcctcgcccgaccccagggctcggactcgacctcgacctcggaggagttaccacctcgctcgggccgaccacgccacaaggggaagccatcattaccctacccctagctagcccaggctacggggaacaagactggcgtcccatctggctcgccccagtaaaacaagtaatgatggcaccccgcgtgctccatgacaacggtggttctcaaccccctacggaagcaaggatacgtcagcaaggatccgacagccccgacagctgtgcttctacagggctcaagcgctcctccgacgaccacgacgccaaatga

SEQ ID NO: 30458 - DNA, 2004 bp, Zea mays
  Peptide Sequence Number=SeqID_73833
atgaggaaaaagacacaactttatatcacaaagacaaagtgttcaggcctcggcgaccgcaaaagacacacacatgttcaaaacaaactgctccgacagaatcaagcatcgcccgggggaggagcggcaccctcggcttcatctccgacctctgcatcgactccaccctcggcggaatccgacccggcctcgaacagcaacatggtcggaggatctccacctcgaaggaagatgtcagcaccgcgcctgggccatcgccgccagggtctcctctacgaactcggcccaagcagacggccggaccggctgctccgtagcctcagccagctgtcccctgaggacaccagcccggctcatggcctcggcagcccgactccagggttggtcccgccagtggacgacctggccaggtcccagccactgctgcaacacctcgtcggcctgggaagccccgacagccacaatgaacatacgccagcactcaaggtgccattacaaacgggactccggttccgttcccgtgacaacgacctccgctccgggcgaccaaacagtagcagctatgacctcagggcagacgctgctgcgacaaggtcctcgccctcatctccactcgaggggcaaggacaagctatcaaggccacagagctggaggactggagcgcagatggcgctgacgaccccgtcggcgacgaggacttctccggctgctgccaccacctcagcaacgacggtggcgtccacctgttcgccaacaccgcaccagtgagcggtggccgccccaaaagtgcaccggcaggccctcactcccgtccttgtcacgagaacgagaatgggaacgtcccagaacacggttcgcttccccctgcatggctggaggacgcctcctccgcagagctggaggatggtttccacccccagaagctggaggaagaagcgagacgccggcccacgccaaggcgactctccccgctcgtgtcctcaagccgtcgcggactaagtcttcaccaacacgctccaaggtcttccccctacgacacgggggctgggtcccacgcgtcatgcgagctgccccaggacagaagaagccaaaccgccacgcgcgcggagcgtgtaaccgcccagcggttacaagcattccttcgtcttcgcccaaaccagcgggtgaaagggcggaccgccatgcaggcggcatgcaactgcaccaagggggcgcaccctttcgatttcgacgcatccagcatggaggaccaggcccacacgtcatggaaccggcgcgccggttactacgtgcaaaaaactgcagcgccacttgcgccagcgccgcgccttctcgactacggaaccggtgccgcgactcgaggaaaccctgcgcatgtcctagcagtgccaaccaggcacgtcggtcatgggtcagtcagccgcgggagaaggcgcgacggtcaacatggccaaaagtgggccggcagtaatggcggtggcaggcgggcggaagcagcagtcaaatcatctgcaggctcacgtccccacttggaacagcgagagagctctctcccacggcgtgaagacgacgcgcccgtgttccgttcctcgaacggctcgcgcatacgcaacggctgccccgcgaatcactcgtcctatcgcattaactctgcggcaggacaggcgacacctttggcaggcgaagcgggcaacgcttcacctccgccatatagaccgtgtcaaaaaagggaccgggaaaggggatactccgaaagggatccttctccgcgaagggagcgggccccgagccccctactgatcagaggttcgaaggatggtccctcggaagggttcgatagccgcctcagagcactcgggctccgagcccactactggtcagaggttcgaaggttggccccccagaagggttcgacagccgcctcaggccactcgggctctgcgcccactactgatcaggggttcgtaggctggcccccccgacgggttcgacagtcgccctag

SEQ ID NO: 30459 - DNA, 852 bp, Zea mays
  Peptide Sequence Number=SeqID_73834
atgagtgagatattatgtgccaaacaagcaaaaggtgcaaatcatgtaacaagccgaagtccagctcagtctggcacaccggactgtccggtggtgcaccggacagtgtctgggcatatctgccattggaactcacatacaagagacagccctaggtgccaggaagagatctgcaccggatttgtgccaatattcgcaagtttgcgatctcagcaatcttttgaacaagggcagaaacacacctccacgtgttcgacgcgccctgaactcgccagagcacgcccggcgcccgaccgcgcgcaccccgcgtcacgccaagccgagcccgtgccattgcccgcgcccgcgcctataaagccagccaaggcttcaaccgtacgcccccgctcgctctcgacctcaccggagcgcaagatcaccggcgtttgcccggcgcacagcgtgccagcggccgcccgagcacccaccaccagcgaggaatcgggctctgcctcgccggagacaccagatcaaggtcatcggacttcacccgaccgccggcgaacgtggaccaacctccacggccggagcacccgccgccgacaagctcgcccgcctgcgcacgtggaccggccgattccggccttcaccgtcgtcaagtcgtacctcgccgtgaccacaaggacttcccggagccaacccgcccttcgccggacctccctcgccgccgactgtaatctcactgacggggagtacatcctcatgccggagcaaggagttgctcaggaggtagcccaggatccagcaccagagcctaccatcgaggatctgcctgccccagctttggaaggcaagccccggttttatgcataa

SEQ ID NO: 30460 - DNA, 972 bp, Zea mays
  Peptide Sequence Number=SeqID_73835
atgcaggcggcatgcaaccgcaccaagggggcgcaccctttcgacttcgtcgcgtccagcttggaggcccaggcccacacgtcatggaccgggaaagaggatactccgaaagggatccttctccacgaaggaaacgggccccgagcccccctactgatcagaggttcgaaggctggcccctcggaagggttcgacagccgcctcagagcactcgggctccgtgcccactactggctggcccccgaagggttcgacagccgcctcagagcacgcggagcgagggatgaccctgggtacgttcgatacataaccaaggctcgggctacgctcccgaggccaaggctccacccaagggacacgatcccgcctcgcccgagcctggcatcgggcaaagacagccgaccccggaggattcacgtctcgcccgagggaatacagcgccgcctgccctgctccgactgccgtgcctcgggcgatctgggaagctccgcctcgggcgacataggaagctccgcctcgtccgaccctagggctcggcccccgtctcggcctcggaagatggactccgcctcgcccgaccccagggctcggactcaaccacgacccggaagacgacgaactccgcctcgcccgaccccagggctcggactcggcctcgactccgaaagacgacgaactccgcctcgcccgaccctagggctcggactcggccttgactccgaaagacgacgaactccgcctcgcccgaccccagggctcggactcggcctcgactccagaagacgacgaactccgcctcgctcgaccccagggctcggacttagcctcggctccggaagacgacgaactccgcctcgcccgaccccagggctcggactcaacctcgacctcagaggaatcgccacctcacccaaactcgggcccagaccggccacgtcgccagggggccatcattaccctacccctagctag

SEQ ID NO: 30461 - DNA, 258 bp, Zea mays
  Peptide Sequence Number=SeqID_73836
atggcgatgcacctggggcgccatctcctcggaggcattctccgaagggagagcttctccattgatcggatgtccctgagaagccagaacagcattgtcaggagggttagcttcaggttgcctgacgaatctgatgtcttcatcatcccggcgcgcaaagatcctgatgagtactccactgatgatgagtccacagaggatgtaagtgaagaagttgatccaaagaaactagtcaagacggctagaagaaatgagtga

SEQ ID NO: 30462 - DNA, 484 bp, Zea mays
  Peptide Sequence Number=SeqID_73837
gcccgacctgaggcaaagacgggtagtccaaacggattcaccgcttcgacaggaggggatcgcctggcaccttatcctgacacgcgtgcctcaatcggcaaggtcgaaagtgaccgcagtcacttcgccccccttactaaccgttctgacaggaaaacaacgctattcaccccgctccggcaactgtgctagccaccagggaaagactgacaacagcaagtcacgacctcccctgagtccggcctcgggcgcaacagggagctccgccttgcccgaccctgggcctcggcctcagcctcggcctcgggcgaaggactccgcctcgcccaaccctgagcctcggcctcaacctcgacctcgggagaaggtctccgcctcgcccgaccctgggcctcggcctcggcctcggaggagtcgccgcctcgcccgacctcagccccatatcaactacgctactggggacccatcattaccctacccctag

SEQ ID NO: 30463 - DNA, 459 bp, Zea mays
  Peptide Sequence Number=SeqID_73838
atgaacgcgctgtcccgcgaggggtgccggcactatgaggtcttcgaccaagctgatcaggatttcgagcgtgatatctacaaggttgaggaccctgtggtgaaggaatccgcgggagccctcttcgaccggatgtggggtcctcacggccgggaggtggtcagggagcggtctgagacggcgaggggtcaggcggcgcgtaacgagaaggtggacgacttcggggctttaaacagcgtgcagcctggctcggagtcgaacccggtggcggctgtgtccgaggtcgccccggcgccggccccagagaccgccggaggcgcccttgatgcccccacagccaccacggccggcggtggctcgtcgccaactgctgcgccgagggctgatgatcctgcgaagatggcggcggaggcggcagtggaggatcctacgagggctgggtcttcgcaggtggcatag

SEQ ID NO: 30464 - DNA, 381 bp, Zea mays
  Peptide Sequence Number=SeqID_73839
atggcacccaagaaagctagctcgaaggctgacgaggctgcgaaggcagcactgctggccacaaaaaagggcaaggccctcgcactcacccactccacccaccaagaggctactgaagacgacgctcaccgcaccagcgaaggcgacgctcaccgcacctgcagccctgaaggacagccgcaacctcccccagacttcgctccaccagagggcatggacttcaccgaggacggcgaagagctcgagcaagagatcgcgctaatgcagcgcgaaggccacttcggcctgcaacaagggccacccctgcaacagcgcgcacaagtcgaagacctgcatttcccctaccacgaccgcgccatcccacacgtcgcgccattctaa

SEQ ID NO: 30465 - DNA, 576 bp, Zea mays
  Peptide Sequence Number=SeqID_73840
atggtccacatcgtcgagcaccatgatttcatgcccgaggacttcctggtagaggaagaggctgcgtcttccacacctcgggccaccaacctccctgtgcctggtgctgctgttgtgcactctgcgcggcagcacactcctgcacagacatccaaggcatctagggctgcgcctggggcgctgtttgcagccagggaattgctgcgccaccctcctagctccacggcctcgccgggggccatgaagcagtggcatgacgatgtcgatcgtttgctcgacatggcgcactctggctcagctaggcctaggcctcggtcgtcccagcgtcaacatgaggcgtcggcgtcagtgcgctcgccctctgtgagggccgcaccgactgaggacctacgggcggatctcaaccgcaggcgtgcgggagaagacaccccagcctctctggaaagtgagaagtgcaaatcaaggcaaaagggcgagagactccaagttgtggatattcctcgcaaacgggataagactctaaaggaaaagaccgttgtattcaagttgatcatcggatcacttgaaaggggttga

SEQ ID NO: 30466 - DNA, 903 bp, Zea mays
  Peptide Sequence Number=SeqID_73841
atggtctattgccaaggagagagagacccaaaaactggtatagaaccaactgatctaatcctttggatgagtactcattgtaaaaatggggaatggtcggaagaggcttcacgtggtatttatgagaaggcatgtgagaaaattgttgagaaagtatatcaagatgatggatttgatctgacgagagaagaggaaaatgcaattttccaaacatcattcaaggaaacaacaggatgcaaggcaaataggcttcatggtcatgggtacctatcaagatatccaacaagaagacaagtgatggattcaaaattcctcgaacaagctcgtgcaacggctgcaaccaaccaaaagaacattgaactcgaaacccaggtccaactattaaatgaaaaacttgcaagtgaggttgtagaacgagaaagaatagtgcaagaaaaaatgcaagcactgcaagaagaagaagaaagaaaaaggcaactacttagagaagaaatgaggaaggaaatggttgctgcccttactgcagcacaacaggccaaccgagaaagcatcactccagtcgatcctcctttagtgatcccaactgaaacttttgaactcatcccagctgatcctcttgcaccaacaccaagaagtgaaaacaatgtttgtactccagacacaaacaataagaaagacaatgtgccagcgaactatattagctcttacgctctaaagaatgctgtgacaagacgtgtgcaggcaaggggcaacaaaagaagtgaatgtgtatggaatgcaaatgttcatgtacaatctgttcgttgtcatcgcgatattgttgtcatgataaccatcacttgcatcaatggaggagatggaggggtacacggtggaccaaaaaagcttccactcatttgctag

SEQ ID NO: 30467 - DNA, 591 bp, Zea mays
  Peptide Sequence Number=SeqID_73842
atggtgcagagggttacccggtccacgcgctccggcgaggttacgaactccggtgagcgtgagcgtactgttttggtggggctggtcctcggctcaagctcgggaaagcttcacggcctctcgaggaagctatccgagggctcggatcgagcggagatgggcgggaaagggttgggccacggcgagcgccctcgggcggctctggcgggtcgcggggaggtcgccggagctgcgggcgggctcaggagagttaggcggggtgcggagggggtaacagggaaggtggtcgtgcatgggggtgggctttatagccattcgcgggcatggcacaggcgtgggcatgggggtggcttagggcgcgcgggggtgcgcgtgcgggcgtgctctggcgcgttcccgagtgtctgcccacgtcgaacacgtggtggtttacttctgccagtgttcaacggcctgtttggtcgccttagcgtgcagatctcagcaaaaacccatgtacggtctcttctctgcaccaaatcctatcttttccatggctccatttgcctaaagggatttgaattagggtttgagcccttctctcctctttag

SEQ ID NO: 30468 - DNA, 735 bp, Zea mays
  Peptide Sequence Number=SeqID_73843
atggtgtacataaaatcgaaacttggatattctgggagggacttcttgttttacaagaaacgatgtggcattgatcgatccaggctattggcacttgattacatccaccaagaagaggccatgctatctgataacgtggatgagagaaaaataagttttgtgctcacaaaagatccacccagtgatctagaggtaagcataactcccatcaagcgtccaaggcagcgaacaaatgttgacgaagaaactatagaagtgtcgactgatgcatataaggagtggcttgcaatactacaacatgataatccagaaatggataacgatggagtcttcaaaaaggaggggcgtggtacccttaagggtatagcagcagctaccaagcgaatcaagaacggcgatcacaaacttaagattgaattttcatctaagcttggaggtcccgtaggaccaaacactcgcacttttggggatgaaatcgtattgtttacaaagaaaaaggcaccactcattggagtgaaaaagtggaaagatatagagctcaatgttagatcttctatagcatctgacgtactgcgaaggtgggagtttccaagaaatgaggacgcacatgaaaagatatggttgttggggtcgtgcttcggtacgccgaaggtctcacacgaagaagcagcttcggccaaagtcgtttctaagagatggccgaaggtcccttttcatggagcttcggcgttttaa

SEQ ID NO: 30469 - DNA, 459 bp, Zea mays
  Peptide Sequence Number=SeqID_73844
atgaagatatggtcttgcgggaaaatctttgaaaattctgggcgacacaccttgggagtggctgctacggagggcccagcccccgagggtggtgttgggagcgacccagcccccgagggagttggggcaggctccctttctactgcttccatggacgtccacgctggatcgccaccggtccaatctgaggacgccgtgttgacacacttatctgctgctcttgctggtctggtcactttagaggccagtgacccagacgccaggagtctgccacctgttgacgaggctgaggttcctccaagtggtgccttcgacatcattcccgttgacatcccctcatcaagcaatgtatcaattctttctactatgggccttcctttgttcctctccaatcttcagctttggctcggcgatgctctgatactgaagagaagtatacctagagtcaggccaacttga

SEQ ID NO: 30470 - DNA, 390 bp, Zea mays
  Peptide Sequence Number=SeqID_73845
atgccgggggatgcaggcgccgaccatggagggggatgggtatggagcaccgcgacgctgcggcgctgcgccgagggtgaggggcgtcggcgtttggccgggaagcgtcgaggcctagaaggagatccaatcatccaagtctcattttctccaccatgctccaccgccacatgcctattggaatgccgctgcctcctcgaccatcgcatcaccaacatcacaacccgcatcgccgacctcacaacccacgtccttctcctcgtggcctacacgaccctccactcgcactacagtaaccacggcgacaatggcatgtggcgggctacacattcgggtgctccttccaggcatccaacttactccctccagcttcggtcccccgcgctatga

SEQ ID NO: 30471 - DNA, 444 bp, Zea mays
  Peptide Sequence Number=SeqID_73846
atgaacaaaacctctggcattcgaagtgccattacaacggaactccggttcccctcacaggtacgaacaaccccactccgagggggaaggcctgcggagcaacagaagactgacgagcggctcgccgccgcccgttctaaccacgacgacaaccacccccgccccgggcagcgaagcggcttaggcagcagcttcggggcaggtgtcacgacaggagggctctcccccgcagaggacgagaaccagccattcaggtcgggagacggagacccagggctactggcgccctacttatcccggcatggctggaggaagtccccgtgggactcaaggatgccattctcccccaggcgcggggggaagaaaaaggcagccgacccatgcgggggcagccccccgactcgcctcatcttccatcttggcctggatgacgaaaatccttga

SEQ ID NO: 30472 - DNA, 250 bp, Zea mays
  Peptide Sequence Number=SeqID_73847
gtttgtgattctgtctggtccgacaatcccaattatcggtgaaggcgatgaagaggccaatgacagaccagactatgattggaggatctcacctattgaaccacaggttgtgtatgcaagtggtggaaaagctcatggaagcgtggaggttcatcgaggcctgctgctcgtagctcccgtcgctccactcaagatccagcagaagtggagcaactacgagaagaacttaggcgacatcaggattacttga

SEQ ID NO: 30473 - DNA, 168 bp, Zea mays
  Peptide Sequence Number=SeqID_73848
atgaggatgtggggcaactacggcggcctgactctttctctcaccctttgtctctcttccacctaccggtgtgcgcgtggacctgtcgccaaaggtgcgaggaagacggctggtgcgtgggcccatgtgaaccagtgggagagttccgcgcctaagacggacgcctga

SEQ ID NO: 30474 - DNA, 177 bp, Zea mays
  Peptide Sequence Number=SeqID_73849
atggcgcaaaacaaatcccccaaccaccaaaaatggccgttggaagtgtgctgtcgcatggcgcaccggacagtccggtgcgtcagccacgtcagcagaccgttggggttcgaccgttggagctctgacaggtggggcctctgggctatccggtggtgcaccagacaggtccggtag

SEQ ID NO: 30475 - DNA, 909 bp, Zea mays
  Peptide Sequence Number=SeqID_73850
atgtatactctgatcccgcgctgccacctccagccagtccaccggtcgccgccgccctgccaggcagcaacgacgacgtcatcggcgccgccgtcgccgtcgccatcactgtccatccggttccgccccgaccaggacgagctgcggtcgacgtggccgcagcgcgcgtggacgctggcgggcacggcggccatcctctcctccctgtccacgtccgcctccctcgcggcctcgggctccggctcgcccgcggagccaatcgccgcggcgctggcggcctactccctcgcagacctcgccacgggagtctaccactggttcgtcgacaactacggcgacgccgccacgcccgtgttcggctcccagatcgccgcgttccagggccaccaccgctacccgtccaccatcacgctgcgggagacatgcaacaacctgcacgcgctagcgcgcggcgccgcgctcgcgctcgcccccgtcgacgccgcgctctccgccacgggcgcgccagccgccgcgcacgcgttcgtcggcgccttcacggcgtgcgtcgtgctgagccagcagttccacgcgtgggcgcacgagaagcgccgcaggctgccgcccggcgtcgaggcgctgcaggacgccggcgtgctcgtgtcgcgcgcgcagcacgccgcgcaccaccgccagccgtacaacaccaactactgcatcgtcagcggcatgtggaacgggctgcttgacagatacaaggtgttcgaggcgctggagatggtcgtctacttccgcaccggcatccgcccgcggtcgtggggcgaaaccgacgcctcgtggaaggaggacaccggcgctgaagctgccgccgccgccgccagtaatgctggtctgttacagacagcgggcatcagctctgactctgactga

SEQ ID NO: 30476 - DNA, 468 bp, Zea mays
  Peptide Sequence Number=SeqID_73851
atgggcaagagtaacaaacgcaagcgcgagccgactcctccgtcggaggacttcggtgactcggaatactcagaggaggagttctcctccgagtctgaggggtctccggctcccgtctctcccccggcgtcgtctgatgattcagacgactcccaggggattgccgcggaagtctggacgtacatccgggccgtcgagcgctccgggctcgagggctcggatgagtcggagttctcctcggaggaggaggactcggacggcggcgagggcgaggatgacgacgacgacgacgacgacggtggcgacggcgatggtgacggcagcggcagcagcgggggcagcggcggcggcgacgggagcaagggcagcaccagaggcggcagcagcacaggtagcaccagaggcggcagcagcaagggcagcaccaggggcggcggcggtggcagcagcagcaaggccagtggctaa

SEQ ID NO: 30477 - DNA, 279 bp, Zea mays
  Peptide Sequence Number=SeqID_73852
atggattccgcgctcgttgtgaccatcctttccccgaggatctcgctgctcagggtatataactaccgacgccgctcctttccgaagccatcacagggaaatcaaacgtcgccgccaacgcccttgcctctcgttgccgaggtcgaggtccgctgtgttgaagtcagcttccacgggatctggttcgtgggcgcgctagaggaagtcgcggcgccgctgcgtgcgttggacaagcctcgggtgacgaattgctcgtcggcattctctacgcctcgctaa

SEQ ID NO: 30478 - DNA, 675 bp, Zea mays
  Peptide Sequence Number=SeqID_73853
atggcggcatggctgctgtccgagcagggaaacaagggcgccggtgatctgctgttctgtgagagttggagcttgggagagggagagcagaggcgctgtgcggggaagaagggcactgttgctgggtggccatggagcaggaaagtggaggtcggccaatgggacttcaaccgtggggcgctcggctgctgggctgctcgccgtggacagcagagggaggcgccatggttggagcagaggtacccgcgcccaaggagaagcctctgcgcgcaggggaacagcagggaaaaaggaagcttggccatggcgctagaggtacaagaaagggttggaggaggcgagccaatatgggagcagggagggagctcgtccatgggcgatggtgggctcgcctgcccgagctggggggccggtccggccaaagaagagcaggggcgagagaagctcgtccgcgccctagacagccgagggaacgacctgctggctggaggaagaagaagggggagccagctggaattttctgggcgccatggctggccgacggggaggagctcctgcgcgctggctgctgcgtgtgggagaagaaggcaaggaaaggaagtggcggctaggaaaaatgcaggggtgggagtgaaaaaatggccaagtgcaagggagagggatccgtatttatag

SEQ ID NO: 30479 - DNA, 258 bp, Zea mays
  Peptide Sequence Number=SeqID_73854
atgacctcccctacaccctcggccacttcaccggagcgatctcgccgccggcactgcttaaaaatactgagcaccctagtatacaagattaattcaagttttgctattaaaaactatatcttcccaaaacttagaaaattaagaaaagcaatagaagttaatgaacagaggatgaacatatttttcctagtctacttaagtaatgaggaacctaggaaaaatacaaagaaccctagtccagagcaaatccaaggttaa

SEQ ID NO: 30480 - DNA, 678 bp, Zea mays
  Peptide Sequence Number=SeqID_73855
atgcccgcgcgtgccctcgcctccaccgctacgatgcccgtgcctctgcacccgcctcctccgcccccgcgacgcaacatcattgcaaacactctagcagtgctagaagccatggctgcacacaatgtgaggactctcatctactccagcacgtgtgcgacctatggagagcctgacaagatgccctcgctgaaggaacttcccagcattatattggtgatatctcagagttggatgcattggaaggctttgctaaagggaaagcagtattctaacatggcatgttcctaccttgctttcttatttgtctgtgttgtctcctgcatgttctacacaaaatctttgtatgcccacaatctttgtattctaacatcgataagtgcccaaaaatctttgtatgcttctaaacagacctttggtattgttgtacacattggattcaataccacttctgttgtccccggagttccaatgttctacatgggcgatgaatatggtcacacaaagggagaaaacaacaatacgtactgccatgaccattatgtcaattatttccgttgggataggaaggaagaacaatcctttgatttgtacagattctgctgtctcatgaccaaattccgcaaggaatgtgaatctcttggccttgaggacttcccgacttcagaacggttgtga

SEQ ID NO: 30481 - DNA, 387 bp, Zea mays
  Peptide Sequence Number=SeqID_73856
atgttggccccctccgagaggcttccgtgggttcctgtgctcggcagcagcgacaagatccgcgtcagcggcgtcgcgctttgcttgcgccttcttcttcatgccccgctgggcggacgcctcggggacgtcttcctgttggagtccctgaggctgcttgtccttctagaagatggcttcgaccgcctcctgaccagaggcgaacttggtggcgatgtccatcaattcgctcgccttgttgggagtcttgcgccccagtttgctcaccaggtctcggcacgtggtgccggcgaggaacgcgccgatgacgtccgagtcggtgatgttgggcagctcgggattcccctagctgttggcggcagcttcggagatcccatgagttcctag

SEQ ID NO: 30482 - DNA, 474 bp, Zea mays
  Peptide Sequence Number=SeqID_73857
atgccgtcgtcgctagcgcctagggaaatccgccgtcgcgaccgctggcacatcgccgtcgtgcgcacctcatggggccgccgccgcgtgcgtgccctcaggatccgatgccgcagcgtgtccctagattcgccgtcgcgccataggaatccgccatcgcgagcgtgtccccagatccgccgtcgcgcctcagagatccgccgtcgcgagcgtgtccccagatccgtcgtcgcgccacagatgctggagcggcggtggcggtggccatcgcagagacggacgggacaaccgccgttgtcaccgggcctagggtgcgctgccgtcgtccgtctgcttcaagagcgccgtcatcgcttgctcgcctacctcggagcgtcgttgtcgctcgttcctggtggagcgcggccgtcggtcgcctgcctcgaggtgacaccgctgctggcccccagaatcaccgccgctcgcacgccctag

SEQ ID NO: 30483 - DNA, 444 bp, Zea mays
  Peptide Sequence Number=SeqID_73858
atgagggaacaagaccggcgtcccatctggctcgtcccggcaacagggctcaggcacttctccgatggccacgttatcgcgtgcacagggctcaagcacttctccgacagccacgttggcatgtacacagggctcaggcacctctctgccagacactcaccgccgtgtgggacccgcatcgttagcatcgtctcttcctcaggttgttgcgagctgcgcgcagatctcgccttcttccccccattgccggagttctcgggcggccgtttcaaccgtcgctgccctggcactcgggcgctggatggtacttcgccggtgggtgtccaccgcgggtgggtctcgcgccgctgtcgcagtggaagggatgagggtgaaggacgtgcaccgttggatcgggcgcttgcggccacgattaactctggcgtaccgattcgggccagttag

SEQ ID NO: 30484 - DNA, 750 bp, Zea mays
  Peptide Sequence Number=SeqID_73859
atggcgctagcagctctgcggaggaggcgtcctccagccatgcgggggaaggcgaactgctgcttcctagccagggtgcagctatccgtcctccatccgggcagcggtcgtgccatgcacaggcggctgttgtcgccggtgctgaagcggcggccgccgttggtgaggcttcccaccgcagcggtggtttcttccgtcgacgagaccgttagtgccacctgcgctccggacctccggctctttagctttaatggctggttctcgtcccccgtgaggggacgtgaacgagggcttttcagcagcagcgtttgccctgaggccatcgctgcagctgtcttgccgcccgagacagaggtcgttgtcgctgacggtggagcggtcgccgacaagccacctagagtttgttatcccgcaggccctctgaaacttcggccgctctgcgatgagctgaagccagaggcagcggtgttggcgtggacagaggcggagtcggctcgaaaagaggcttcgtcggcccgggagcatgtggcttcccaggccgaggaggtgcgaaagcggcggctggagcttggccaggtcgtccgcgagcgggaccaatcccggagtcacgccgccgaagccgtgagccaggctgaggtcctcgggggacagctggctgaggctacggagcggctagccgatgcgttcgctcgggccggaaccctggccgtgagggcccaagcacggtgccggcgtcctccttcggggtag

SEQ ID NO: 30485 - DNA, 1326 bp, Zea mays
  Peptide Sequence Number=SeqID_73860
atggcaagccttgtgctgttgttgctcatcttactcgtgcctaccttatcgttgccagctgctcattgcaatgacaacgtcggattccagctcaagctgacccacgtcgacgcgggcacgtcctacaccaagctgcagctcctcagccgcgccattgcccggagcaaggcccgcgtggccgcgctgcagtccgccgccgtgttgccgcccgtggtggacccgatcacggcggcgcgcgtccttgtgacggccagcagtggcgagtacctggtggacctggccatcggcacgccgccgctgtactacacggccatcatggacaccggaagcgacctcatctggacgcagtgcgcgccctgcctgctctgcgccgaccagcccacgccctacttcgacgtgaagaagtccgccacgtaccgcgccctcccgtgccggtcgtcgcggtgtgcctcgctctccagcccctcctgcttcaagaagatgtgcgtgtaccagtactactacggagacaccgcgtccaccgccggcgtcctcgccaacgagacgttcacgttcggcgcggccaactcgaccaaggtcagggcaactaacatcgctttcgggtgtggcagtctcaacgcgggcgacctcgccaacagctccggtatggtcggcttcggccgtgggccgctgtcgctggtgagccagctcgggccgtccaggttctcgtactgcctgacgtcgtacctctcggcgacgccgagtaggctctacttcggcgtgtatgcgaacctcagcagcaccaacaccagctccgggtctccggtgcagtccacgccgttcgtcatcaacccggcgctgccgaacatgtacttcctgtcgctcaaggccatcagcctgggaaccaaactcctgcccatcgacccgctggtgttcgccatcaacgacgatggcacgggcggcgtcatcatcgactcgggcacgtccatcacgtggctgcagcaggacgcctacgaggccgtgaggcgagggctggtgtcggccatcccgctgccggcgatgaacgacacagacattggcctggacacgtgtttccagtggccgccgccgcctaatgtgaccgtgacagtgcccgacttggtgttccacttcgacagcgcgaacatgacgctgctgccggagaactacatgttaatcgcgagcaccacggggtacctgtgcctggtgatggcgccgaccggtgtgggcaccatcatcgggaactaccaacagcagaacctgcacctgctctacgacatcggcaatagcttcctgtcgttcgttccagctccgtgcgacattatatag

SEQ ID NO: 30486 - DNA, 165 bp, Zea mays
  Peptide Sequence Number=SeqID_73861
atgaagcacgaacttgttcgactagcttatcgtttcaagtttgagaaacaattcaagaagccttgcaaggaatggctagacataattgaaaccatgtgcaatggaatacttggttgtcattgtaacaaagttatagagctgtgtgaggagtgtgactttgattaa

SEQ ID NO: 30487 - DNA, 111 bp, Zea mays
  Peptide Sequence Number=SeqID_73862
atgtcgccgtggccaagacaactcagcaaggctctagtttctgtagcaaacttggagataaatgttgggggagtaacccttggtaaggatcatgcccttgaatatgcttag

SEQ ID NO: 30488 - DNA, 1860 bp, Zea mays
  Peptide Sequence Number=SeqID_73863
atgagacataaacttccttattttcatcccaaaatagaagaatttctcgctaggaatcgaacatttagggcctgtttggatcaccaccgccgatcccacaccgcgccacacttggcgtgccgcagctgtggcggccgaatcgaccgccgcagcttaggtgaggtgtggcgccagaggttagggtccaaacaggcctttggacccattgccgtctcaacgccaccctgcccgcggggcggtgtaaaacaatgcgcacgcgccccgcgccgccaagcggcacgcgccaactcgaaaagggaaggacgaaacctccccaccattccaatgtttcgaaattcgaatttcacatgcccagagaaatcccccggaatcccttcggcagtggtcgccataatttggaaatccaaaaccacccacgccgcgcggccagggctcctcccctcgctccttttaaattttgaaccccatctccgttcgagcatcaaacgaatcgcgcacgcttccctgactcatccaatccacgcacaccaacccccattctcggccgccactcgccgctccggcaagtctccagagatacgcgtgcggtgcgacggcggtatggacgcactcccggatggcgtcgtgcagcacatactctcgcagctcagcaacgcccgtgacgtggccgcctgcgccgccgtcgcccgctgctggcgcgactgcatgcccttccttccgtcgctctatttcccgcgtggcgcctttgagtccgtcggcgtcggaccggcgtcagccgtggccgcggccgacgatgtcatcggtcggatggtcgatgccgccgcgcgcctcgaggagctcgtagtgtactgccccttctccgcgtccctgctcccgcactggctcgcggcgcgggccgccacgctgcgcgtgctcgagctgcgcgtggaatccgccgccgacgacaagtcgggccacctggactccatcggggtggccacgagcctcgaggagctcaggctgtgggcgctcaggatgacgcgcgcgcccgcgtggggccagatggagcggctccgcgtgctggaggtcgtcggcgccgtgctggaagacgccgcggtcaacggcgccgtcgccgcctgtcccaatctcaccgatctcgcgctgctcgggtgcgagtgcgccggagaggcagtcatctcgctcgcccatctcgagcggtgccggctcgatttcgtcggctccggcaacacttctctcaggtttgccgcgccgcgcgtctcgtcccttgaggtccagggcttctcattgatctatctgcaaggtggcaaccgtctcaaacatctcacaatctccaagaacactggtagtgtgtatcatgtggagatggggaagctcccggagttggaccatctctcgctgcgcggcgtccagtggagctggggcgccatcagctcggtgctgcagtgcgctggcgaggtgaagcacctggtgatgaaggttgagttctgtggtgattatgacacgctgcagccattcccggagctcgacctcgtggaattcttcaacagccacccgaagcttcacaagttcgagatccacggcgccatgttcgcggcgctgtgtcagaagaacagcctgaagaagttggattcaaggttcgtgattcctttcttggagcacgtgctggtcaccgtgcggtcacccctgaatgctgagcagaagctggacaccctcgagtcccttgtcaggtacagcgtgaggctaagaaggatggtcattaggatctcgcagatgaagaattgccacggtgccgctgatgatttttttgcggagatttgcaagttcgcttacatgaacagtgggagagtgtgcatagagtag

SEQ ID NO: 30489 - DNA, 783 bp, Zea mays
  Peptide Sequence Number=SeqID_73864
atggcgcccgccctggacctagttccggccgagctcgacttcaactcgcgcccggccctagcttggtctctagctccctcttgtgcatctcccggcgtcgctcacccctacgtgagtcccgccgtcgagcttgtcatctgccacagctccactgcgtcgttgtctccatgccacgtcgccatagagctcggttcgtcgcgcctttccggctccgccttggcctcttgcgcgctctttagttggtggccaccgtctccactggaacaacaccgatccgcccgccttgccatcaatctcgtcggcgctggtctccctggtactcgtcccatcgacgccggtcgcccagcttatcatccccatctccctgccatggtcgcgcccaggctttcctttgcctctcgtgctcggctcccaggagcgggtctcctcaccgtgaactctggtgctggtcgtcgtcgcgcccggggttttgacagattaaattattggcgagctatcgttgctctcgctcttcgttttaatatttctcatcagtttggtatgcttgcgctgtccatgtgggctggtgacgtacacgtgttcgccgatttgggggaaacagtgaacgttgtcgcttttgttaataccaagtcgcactgtgatgcgccgaagatcctaaagaaagagaacaccttcggaagatcctctcaggagcaagcgccgaagctattacctattgagcttcggcacaatgacagatctcaagacgaagggccgaaccgacttaaagatggattgacttaa

SEQ ID NO: 30490 - DNA, 498 bp, Zea mays
  Peptide Sequence Number=SeqID_73865
atgacgaaggttgatcctttgtcgaaggttgtggaagaccttcggaaggggaaggcccccaaaagctggcaggactacggttacatggacgccaatgctcacggactagatcctaaggacgcgctgacttccatagagactagagtcaattcggacatgctacagacgtgtgatgtggcacgtgtgactcggctctcgcatcgacataaggagaaagaactaccctacgataaaacaacgcacctcaggaggaagagtcgtcttctagctccagaactctctgtaatcgtatccaccgagcaatacaattacccaagcacacaaagacgcagggcattatgtgtttcagtggcccaaacttgtataatcttttgcgttccgtcgtgccctgcacgaaccatcaagctgcaatcgacttcatcgtcctcacaaaagcactacgcggtatatcctgtagtgcgccgttggtaccaaactccaaagatgacatgccagtag

SEQ ID NO: 30491 - DNA, 213 bp, Zea mays
  Peptide Sequence Number=SeqID_73866
atggacgtcgtcgggccacccgtctcctatctcccctcgccctcatcctctagctgctgccccttcctattcctggtggctgagtcttattccatggatgctggccgtgctgccctccttggtgctcacctctgccccctgcgttggatggcctgttgctcctgccctagattatcctcgtgcccggccacggtacaacaacaacaaccatga

SEQ ID NO: 30492 - DNA, 474 bp, Zea mays
  Peptide Sequence Number=SeqID_73867
atgacaaccggtggtggagtgacgagctccggcgaggtcggggtgacatggctaggcgcgataaaggattgggagagcttggagaagaccaaggaagcaacaatgagctctagtgatcacaatggaggccttggcgtggacggagggacaccaggggtccctggccatggacgatggtgggtcggcggcaacagagagtgcggacagagggacatgggccgtcgaggatctcgtctagtgtccatgtgttgttgctttgaggagcgccatgtgcccgagctggtggcatcatcacggcatcgtcagtcttgttgtggacctccttccttcttcgagggcctgagccttggttggttgatgagatcgtgggcccgctacatcagcagtgatgtagatgtcagcctcgtgaaagagttgttcggtggtcctcagagccttttgaatgatagctcgaacaaagacctcattgtgtga

SEQ ID NO: 30493 - DNA, 249 bp, Zea mays
  Peptide Sequence Number=SeqID_73868
atgaaagtacagatggctatcaccaggaagactacacacaagagcaccggtggacgcatctgcattagcactagagtctttcccccaccctccccacctgaggatggaccttctcacatcatagtggatgatatctctgaaggctttgatgaggagatcaaatacacaaaatttgagaatgaggagcccatggaggttgaacaggctgatgatctgtcgatgtggaacttggatgctgagcttcagtag

SEQ ID NO: 30494 - DNA, 1389 bp, Zea mays
  Peptide Sequence Number=SeqID_73869
atggaggacttgagcacaatgaccccaataattgtgatcggaaaaattgcggcatttgaaatgttgcgaaagatggtggtggggctccggatcatacatagtaccatttcgaattcccagcgaagttatgtcgtgatcttatggtccaaccgtaccggcacttttagcatcgtacgttgcccgagaagggttacgatgcagcttcatatccttagaggtatgaaggcagaagtcatccttgcatttgcagtcatttgcactcatgagtttgatattattttacttgctgagatgtgtcatctcactcttgcattactcaatgcagatcccggggtgttacaaacgggtcaagaagagccaacttcttcaaggccatatgcttttgcatgtgatgaaaagaagaaaggcaagaagaaggctcccactccaagctcctcaagtgaagaagaggaggaagaagaaagtgatgatgatgatcaaccctcaacatcatcctccgagcacaaagaaacgatccgacgtgtcggaaaggtaatggggatgattcgcaagattaatctaatgggtgtgcccctggaggtcgaggatcttctctttaacattgacatgaaaaagcaaagaaagagaggatgcttcacatgcgaggagaagggccactcagggacaactgtccaaatatggccgaagccacaaagaggaggagcaagggcaaggtgcttacaagtgtcgacttgggatgactcttcaagcaaagatgaacctccaaggacacgcaaccaccgatcctcatcacactcattacggtcatcacacaagtaccttatggcaagagaaaaatttgaaacatttgcaaatttgaattgtgatctaacaactaaaattgagcaattagagtctaatgcttcatcctcaactaccgatgatagccttgtcaaaaagaatgaaaaacttaaggctaacgaccaagttcttgttgggaatgttgttatagaaacatgtttgaatgaggttgcaaaggagaatgagcaattaaggccagaagtggctcgccttggcaaggctctgtatgacaagaaaggcaaagccaaacaaatccaacctcctcaggataacaccactaagggagtgaacaagcctatggagggagaaactgttatttgtaggctatgccacaaggaaggacacaagtcttaccaatgcaagatgaggaccagggataagcaaaagctcaagaaaaagccaacaagaaaaatctccaatacctacatcaacaaggtggacaaaaaggtcgctacaccatatttgattaagaagaaaaagaatggaaaggtgatagcgatcaaggccaacaagcaagccaacaaaggaaagggggccaaacgcatctag

SEQ ID NO: 30495 - DNA, 168 bp, Zea mays
  Peptide Sequence Number=SeqID_73870
atggagcttcccaagccctcagaccgagcgcaaccccaccggagacgccagaccaccctcgccggacttcctccgctcaccggagagtgtggaccgggtattgagtttttaagaaaaataatgattaaaaataatagtacatatgcaacagtgatgagaaaaatttag

SEQ ID NO: 30496 - DNA, 1431 bp, Zea mays
  Peptide Sequence Number=SeqID_73871
atggcggcagcaggcgggcggaagcagcagtcaaatcgtctgcaggctcacgtcccctcctgggacagcgatagagccctctcccacggcgacaggcaacacctttggcaggcgaagcgggcaacgcttcacctccgccataatgaccgcgtcaaaaaagggaccgagaaaggggatactccgaaagggatccttctccacgaaggaagcgggccccgagcccccctactgataagaggttcgaaggctggccccttggaagggttcgacagccgccttagagcactcgggctccgtgcccactactggtcagaggttcgaaggctggcccctcggaagggttcgacagccgcctcaggccgctcgggctccgcgcccactactggtcagaggtttgaaggctggaccctcggaagggctggccccgaagggttagacaaccgcctcagagcacgtagagcgagggatgactttgggtacgtccgatacatggccaaggcttgggctacgctcccgaggagcgattctgtaacgaaatcccatcagagggagacatcaagccctcagaccctatcaaacgggatcgggtccggcaaatcacctgcaggctcgggggctgctctcgcaaacccggctccggccaaaccgttgacagcgtcaacataccagcccgagaacttggaacctgactatgcacccgggctacggccactggtaaacccaatcagcacaaagctgcaaaggcctgatgggcgtgattccggtcaaggctccgtccactcaagggacacgatctcgcctcgcccgagcccagcctcgggcaggaacggtaaaccaaggcagattcacgccttgcccgatggtctcctcaagcaacagacgcaccttcgactcacccgaggcccagctcgggcaggcttcgcggagaagcaaccttggccggatcactacaccaaccgaccgtatcgcaggagcattcaatgcaaggatcgcctaacaccttatcctgacgcacgctcctcagtcgacaaggccgaaccgccaagaccggcctcaggcgccataggaagctctgcctcgctcgaccccagggctcggactcaacctcgacctcggacgacggtcttcgcctcgcccgaccccagggctcggactcaacctcgacctcggacgacggtctccgccccgcctaacccccggggctcggactcaacctcgacgccggacaacggtctccgcctcgcccgaccccagggctcggactcagcctcgactccgaaaggcggtctccgcctcgcccaacccctagagctcggactcaacctcgactccggaagacggtctccgcctcgcccgacccccgagtccggactcagcctcgacctcggaaatggaaaatcagggaaattgatttcaaaaatgaatttttaa

SEQ ID NO: 30497 - DNA, 1863 bp, Zea mays
  Peptide Sequence Number=SeqID_73872
atgccgacctcttcttcttctgctgccgctacgacgccggccgacgcgtcgtctgaggagacgctgagtactgtggtggcggaggagttgcgtgccggcgatacggcggatttcggtgtgtcgcggatgtcctcggtccgcgtgcaagatatgcagcagcttggttactttggcggcggagtcgctcgtgtcccggggacggaggaggtccccgagccggaaggcgagttggttgcgacgacttcgtacggcggacagccatcagtcgaagtcttcgcgaagtactatttcctgcactggcagaagagggtgatcggaaatgaagttccccagtttgggtcctgtacatttacgccgaagaccggcaagacctcgatggaggtagttgagttggttccttgcgcccgcaacaagtggggcaactggcatgagttttggttttatgtcatggagggcacaatcgaagaccatccggggctccccgtgtccgagatgtgctcgcattattacttagcatacccgccgtttgaagtggcagagaaggatgcggacgaaggggcccttcggtgcgccgccggcctgagcagcgggcgcaatttggttgaggagtttgtggcgtacggggtatggcctttggcgcatggctgggcgttgggcgaaatatgccctcgccagatgccttcccatggtgggaaactggtgcgaagtcccgccttcgcgctggatctgcatagccgcgatccggccgcctttgtgcgtgaggcggaggatggggcggtgcagatcgtcggtcagtacgtgacgaagacagagggccagcatagctgggatattcgcgggtccaatgaccgcttgaacagggttttcgagttgaaccgtctgccgtatggcggttatcccggccaagacgatgtggatcgtcgcgggaagaaaccggtggtagagactggagacgaccccgcgccggcggccgccctgtcctctaagaagaggaaactaggtattgctatgggaggtctgggggtcgaagaagccacgggggctgcgaaggctgctgcccccggcggaagccagccgccgctggcggctaagtcggccgtccctgcatccagcagggcgccggaggctgcaaaggcggctgccgccggtggttccaagtctgtgaaggccgcccctgtgtccagcagggtgccggaggctgcgaaggctgcccgagagttgccgccgccgggcaagcgcgtcgccgacttcgccaccgacattagtgtggaagattatcttgttgggttggacgaaggccaacttgttgttgttccgcctgccgtggtgaccgcggtagctgccgtggtgcccagggcgaagggcagtgctcttagtgccagcggcgagataccggcactcactgccgtcagggacgaggcgggtgctatgtcccgccggctgaaggaggcactaagtcaggcggttgacatcgcagaccgcgcggcgtcgggggccctgacggcatttgtgtctgccgaagtcgcgagacttcggacgcaacatgccgacgccgtccgggaaaagtcggccgccgtcagcaagtgccgcaagctggtggataaggtggccgcgctggagggtgagaagactgacctccggcgccaagtggcagaggaaaggaaggaggctaatgaggccctcaccaaggcgcagtctgcgcaggcggaggccaatttggcacgggcggagggcagtcttgccaggcagcgcgccgagcagttggaggagcggctcagcgctctgcagacccgtgtggagagggccgaggcctcgacgcgctcggaggctgagcggacacgcaaacagcttatggattcataa

SEQ ID NO: 30498 - DNA, 618 bp, Zea mays
  Peptide Sequence Number=SeqID_73873
atggccagtcgacgttgtggccgagcagggaggctccttgagcaccttgcagaggtccgacccgggagaggctcgccattggagctgaggggagagggtgcagggaggggcgccgagcacagggggcagagggaggcaccggacttcctgctggacagccaaggggtggcgtggcgtagggaggaagggcgctgggatggcaaagacacgacgtcgtgcaccaaggacagaggagcagggagaagcgacggtctattaggggagctcggccatgggaaatggccctcgcgccatggctggagagcacctgctcgaggctggaccagaggaggtctcgctggggaaagcgtcggcctgctcaacctagggcagaggcatggagcgcctaaggaaaccagcaaggagggagctcatggggagatatcctgtgccatgggaggagagggaaacgctggggagctcgaccaacgaggttgttggccgaccatggagacatcctactgccgagcgccatggagggagctggagatggcgtggggaacagtgggagagatgcagccgtgtgggagaagaggaagaaggttgtggcggctagggaaaataaaggggtgggaatga

SEQ ID NO: 30499 - DNA, 936 bp, Zea mays
  Peptide Sequence Number=SeqID_73874
atgaacgcgctctctcacgaagggtgccggcactatgaggtcttcgaccaagctgacgaggatttcgagcgcgatatctacaaggttgaggaccctgtggtgaaggaatccgcgggagccctctacgaccagatgtgggggccctcacggtcgggaggtggtcagggagcgggccgagacggcgagggtctgtgtgctgtgtctcaggcggcgcgtggcgagagggtggatgactttggggctttgaacagcgcgctgcctgacccggagccgaacccggcggcggctgcgtccgaggccgccctggagccgcccccggaaactgccgaaggcattcctgatgtccccgcagccactgcggccggcggaggcccgtcgccgactgccgcgccgagggctgaggatcctgtgaaggtggcggcggagccgacagcggaggatccctcggcggctgggtcttcacaggttcaagattttgggcctgcgcacgcaaccgctactactaattttttggcggcttcgaccgtggatgatggtaataaatcggatgggtctgcatctaagttttctgattttggtgactctgggagctcggttgagtggactgaggagtcgtcggatgaggacttggactactttgcggccttggatgtggcagcagtggaggcttcgccgcatgctgcggatgctgaagttgtgcctggtccgagtactgggcgtaggcggcgaagggcggttgcgaagtgtagagtgagtggggcggacgacggtcggcttcgtgtgagtagagctagcaggcaggaactgttgtccttgccggccgctgtgagtgcaggtgagggggagctacgaagtctttttgcgggtgaagagcttaggataatgttatttaattatagggagatgggaattattccgaaggttgagccgatgtag

SEQ ID NO: 30500 - DNA, 342 bp, Zea mays
  Peptide Sequence Number=SeqID_73875
atgacgtcggtctgttacgtcaatctgctggttgtgtacgcagttagccccgatggtgattccagccgtcgtcggcatccttcacgtcctcgcacggttcgtcctagtgctccagatgtagcacctccgagggtctctggagcaaaatttcctagactccccagtcgccaggactacgggttgatatccaaaaattctagggtttctttggtaaagctggcacagcgaagggcgtctgatccaacggccaaaaggccatcgtcttcctcccagatcgagcgcacctacgccatcccagccgcgacggacgccatcgccggacctccggattctgcgatctag

SEQ ID NO: 30501 - DNA, 702 bp, Zea mays
  Peptide Sequence Number=SeqID_73876
atgaggcctcggatctgggcctgggagcttcggggagtcgcactggtggtgctcatggttgttccgggcgcgattgtgggcaggcgacaccgcaattcctcgccgtggtccaacgccaccgcggacccgccctcctccgtgggcagaaaatcccactgcgtgattgtagggagccccaaccacgacgccatcctcctccctgatttcccatgggcagcaagcagggagctcgtctcctcctctcctcccccacggcgcccctttcttccacctctggccggcgccctgcgcagcatctccctcccccaagctccagcgcgcacacgacaacagcaacaagcatattttactccctctgctatccatggcgagcagcagcccaacaccatcttcccatggtgctgctacctccaagtggagctcgggcacccattcacctctggccacgcgccctgcacagcgcccctcccctgctcagccgctcccattttccagccatggagcacctcccagcatctccccgccatggctcgcgactcagcttcctccctgcttgacaacagtagtgtcgtgttcgccatcgacctctccttcgtgtacacctcctcgcagcagcgcaaaagtagcaaccgcgacactcccctccaccccgcactcgccacgctcaacaataatgcctacccattcatcgacctcgcgtag

SEQ ID NO: 30502 - DNA, 669 bp, Zea mays
  Peptide Sequence Number=SeqID_73877
atgaaaacaaaattaaaaaaagagaagacctctaccactattgggcccaaaatcccccgctcggcccactcaaccttgcttccctgcgcggcccagctatccgatgtcgcgcctacactcggcctcatggtgtctcacaggcgacacacttacgggtgggcccttctcgtcggcacccctgatcattcaagcgcgcgtccctggtggctgcaatgtgggccccatatgtcaggagtttcttctttctccgcttccatcgtgtcgcgcctgcgtccagaaaatggggtcgtgccgccggagctccctggaggttccactcgatccgaataccacgtcgagcttccaggctacatctgcggcccctgtgcgctggtacctcccatcccggcgccttgcaacgggcttgcgcgattcgcgcaactgactcaacaaactccgcaaaacgcccgtcgccactgggatcggtgcaacagggattggaagaacaacctcagacctcaggctgcctctagctctagccgcgaccgcattgggatacctgggcaccggctcggccttctctggcacaactccaccgggatggaacgccgccaccaccactactgggttctgggggggggagaatatgaagcgttaaccgttggattggatatctgcgggcaggattaa

SEQ ID NO: 30503 - DNA, 408 bp, Zea mays
  Peptide Sequence Number=SeqID_73878
atgggttctctcattccttttattgagcataatgatgcgaatcgggctttaatgagttctaatatgcagcgccaagcagttccactttctcggtccgagaagtgcattgttggaactggattggaacgccaaacagctctagattcgagggtttccgttatagcttggaaactaccaagctggagtacgaccgccggtgttaagccggaggaaggagaggatgaggccaagtcatcatgccccttatgccctgggcgacacacgtgctacaatgggcgggacaaacgatcgcggtctctcgagggtgagctaactccaaaaacccggcctcagttcgcattgcaggctgcaactcgcctgcatgaatcaggagtcactccgactcgccggacagccatagctttgtga

SEQ ID NO: 30504 - DNA, 795 bp, Zea mays
  Peptide Sequence Number=SeqID_73879
atgcctaataattaccttacccgtccctgggtggctgccttcttccagttcaaaaatccaccgttggatttgcataccctactgtacaaggaagacgtcacgcagctgaccgcggcccgcatccgctacgccaacgctgcgacgggcacgggcagcgcgataaaatccgccgcggccgcctccacccacctcgacgctcgcttctccaaatccccccttcgccttgcgagggggcggaggggaggtggtagtggtagggtatacaggagtgctctgcccatggagaaggcggggcaacaacgccatgttatcggcggcggcggcaagaaggcgcccgcgctggggctgcagaagcagaactcgtggtcgccggacatcgagcgcgacgaggcgtgggagcgccggcgcaggggcatgcgccgcgggggcacggcgctgcgccgcgcccgcagcgtcacggacgacgacctcgacgagctccgcggctgcatcgacctgggcttcggcttcgagccggcgcacgccgccgcgtgcgcgtgcgcctgcgcctgcgccgggaggaaccgcctcctggagacgctgcccgcgctcgacctctactacgccgtccacggcggggcggcggaggcgccgccgtgctcgtgcggcgccgcgtcggaggcgtcctcgtccgaggagtcgccgctcggcagccccatgtccatactctctccaggcgacacgccggagacggtgaagatgcggctgaagcagtgggcgcaggtggttgcgctgtccatgctgagccgccactga

SEQ ID NO: 30505 - DNA, 675 bp, Zea mays
  Peptide Sequence Number=SeqID_73880
atgggtagtgcatatatgatggagctggaagctgaagtggcaaaacttaaagagctgaatgatgaattgcagaaaaagcaggttgaaatgttggagaagcaaaagaatgaggtaatcacttcccattttgaagaagctgcttttgcttcggttacatgctatactctcttttggtttattactggcagcgaacttggtcctggagaggatgagacggcaagttgggccaacggcaaagagaatttgtctgcggaggacattgacaggtccatgattttgcaaccagaaatcggcaaggtattggcaggtgagcctgcaagtccattccgggcatcgtcggtggtgctcgccggtcgcgtcgcttttgttgtgcttgattggaagggaatcagcgagtgccttcaatcatacgacggtacagacgtatgcatggtccctacacgtgcagtgtcggaggaatctgtcagaccagttggccgtcttggcccgtgtaacgcatcgaagaaccctgaactgaaggcatctcacggcgctcgtggaatcggtcctgaagacgcctgctgcattccgttgattgttaggcaggtgctggaccagggccaaagcagtgcagttcaacagactgcacccagcatcgcggcactgcttgcaattgccaatgtcatctgccattga

SEQ ID NO: 30506 - DNA, 333 bp, Zea mays
  Peptide Sequence Number=SeqID_73881
atggctttatacgaattagcggtttttgatccctctgatcctgttctggatccaatgtggagacaaggggtggcttgttttggctttggtgcatttcatgtaacgggtttatatggccctgggatatgggtgtccgatccttacggactcactggaaaagtacaagctgtaaatcctgcgtggggtgcagaaggttttgatcctttcgttccgggaggaatagcttcgcatcatattgctgcgggtactttgggcatattagcgggcctattccatctaagtgtcaagtccgcctcaacgtctatacaaagggttacgtccggctttttctga

SEQ ID NO: 30507 - DNA, 1050 bp, Zea mays
  Peptide Sequence Number=SeqID_73882
atggctaatgatcaagtaagccatagactgttggatacttttggtaaaaaagatagagaaattcttgattatttaacgccagatcgaatcgtgttcaacggtcattggaattgtttctatccttccattcttcaagataattcagatttgttggcgaaaaagcgaagaaataggctcgtcgttccattacaatatcatcaagaacaagaaaaagagcgaatatcctgtttgggtatttcaatggaaataccctttatgggtgttttacgtagaaatactatttttgcttattttgacgatccacgatacagaaaagataaaaggggttcaggaattgttaaatttagatataggaccctggaggaagaatatcggacccaagaggaagagtataggactcaagaggaagaatatcggactcgagaggaagactcagaagacgaatatgagagcccagagaacaaatataggacccgagagggagagggcgaatataaaatcctagaagacgaatataggactctagaggacgaatatgaaaccctagaagatgaatatgggatcctagaggacgaatataggactctagagaaagactcagaggaagaatatgggagcctagagaacaaatataggactcgagagggagagggcgaatatgaaatcctagaggaagaatcagaagaagaatatgggagctctgaagatggctcagagaaggaatatgggactttagaagaagactcagaagaagactcagaggaagactcagaagacgaatatgggagcccggaggaagattctatcttaaaaaaagagggttttattgagcatcgaggaacaaaagaatttagtctaaaataccaaaaagaagtagatcggttttttttcattcttcaagaactgcatatcttgccgagatcctcatccctaaagaacaaatcttcgaagcgcgttcaattgattcactatcgccgaatctcgaaaggagaattgaggattggaatgaacgtataccaagaattcttggggttccctggggattcttga

SEQ ID NO: 30508 - DNA, 229 bp, Zea mays
  Peptide Sequence Number=SeqID_73883
atggccgggtttcgggcgtccgcgccggcccagcccaaccaccagcaggcagcagccgacaactggatctgtgatgggctgatggtgatccccaattccccatccaccggggccgtgcagtcgctgcgtggaaaactcgcccggaccgggggccctcgcagagcggcatggtcagtgcgtgattggtcagcacgatcgggccccttccacaccgactccgacgtggaag

SEQ ID NO: 30509 - DNA, 408 bp, Zea mays
  Peptide Sequence Number=SeqID_73884
atgatggtcctcgcctcagttgtcaccacaccgttcgtcattctacttcctttctctcttcccttatgcctccacctccatgcaacccaattcttggcagagggcataggagcaggcgccttctccccgtattcgtctgacaccagcctcgacaccgactcgcacagtggctattgcacgtgcgcaccatcgtttttcgccgtcgtcggacgtcctgtttgtcttcccggccttcgccctgttcttcctctgcaacctgctgcccccatccacgatagcaaccgcgagccgaccgacgctcgtcgacgcgggtacggggcgagtcggtcatgctcctatcctttctccatgcgtgccgtcgaggaggacatggtggcgcatgctacgcttaggttatcttggcgatga

SEQ ID NO: 30510 - DNA, 776 bp, Zea mays
  Peptide Sequence Number=SeqID_73885
gagcagcagggctcttctttctcactccaggaggagatagagtctgtgaggagctactcccctgtgctccccctggaggcgcccctgcaccaccactaagcgccccagcccctggagtagctgctggaggagacctagacgacggagatggcgacagcagctcgagccacgacaccgacctttctgctgaccaggagccagaaggatgggttgctcggcccatcactcgcgacgctgctcgtgggtgtcacttccacgatgcgcttgacaccctgctacgtcgggcacttgaccgccgtacttggtccatcgaagaacaatctctgggtgctgaggtctgctcggagcactattctatatctgagcgggactcagctgaggcggccatgcaagatgccgcacggcgtgcgctttcgcactactgctcagtgctcggcggggtagccgatagtctcaatctgaagtattacccccgccgtccatctggcagcacaggaggcgtgattgtttcacttgtcggtgaggacaatcctaggttgagcagcacagtcaacctagccgccgtgctaaacacggagctggaccatgcactagacgagctgagtagggctcgtgctgagatcgcccagctgcgggctgagcgcgcggagcgtcgtcacctggacgatggttcccccgctcccgtcgggactcagcacccgtaccgctcacctcggcgtggacaccagccttatggcaatcccgactgcaagaccaagatagacttagaaccatag

SEQ ID NO: 30511 - DNA, 87 bp, Zea mays
  Peptide Sequence Number=SeqID_73886
atgcgacagcagcctccaccaaatgagccgttggtggaggctgctgtcgcatggcgcactggacagtccgaatttgcaaaacaatag

SEQ ID NO: 30512 - DNA, 507 bp, Zea mays
  Peptide Sequence Number=SeqID_73887
atgtggacgtgggacaagcagactccatcggagactggccttcgccttgcaatggagagggcgaagggcagccgcgccgatcgtctcgcattcgttggcgtagcgaggcgacgaagacttcgcgagaagggtagcgtcttcgtcttcgccccaatatttaatcaacaaaatcaaaagctaaatgctcagcattgggtacccggaaaacaggggacccaaagaaggcccgaaggtcgcctaaagacaacccacgaactgggcggcccgcctgccaaacagctcgacgggaaggaccaaaaggccaccctaaggcggcccgccaagccgaccaacccaccaaaaaatgtctgtcgagcaacccagcgacgcgaggctgtcgaccaaccactagtagaaaagggctcaaagcgtgcagtgtgttttcttaagaagcacccctgccgaacacaaatgttattgtcccccggttctagaaaccacgacactcagcctcagactatttcttga

SEQ ID NO: 30513 - DNA, 762 bp, Zea mays
  Peptide Sequence Number=SeqID_73888
atggcgatgccccatggcgtcgccatgcatgccaccagcggccagcctgctaatctctctgtgctcgaccgcactgcatgggcatctgaaaggtacgctgtggtgcctggccagggaatccataagatcgaggggcaaggaatgaaccagcagcatagtaacaatgtcccaagcagcaagagggcaacacaatgtgtgctacgtgagggaggcaaagcaatagccctaaattggcagattagtgaggaggtggatgacaatggctatgaagaaggaggcggttcctccgacgaagatgagcaagaaaccgtcgacttgggcggccttccggtccctgagaccggcagcccgtccggagagggcaaggagctgaagaaccacctcctgaacaagtacagcggctacctgagcagcctctggagggagctctcgaggaagaagaagaaaggcaagctgccgagggacgcccgccagaagctcctccactggtggcagctgcactacagatggccctatccctcggagctggagaaggcggcgctggcggagtcgacggggctcgacgcgaagcagatcaacaactggttcatcaaccagcggaagcgccactggaagccggcgccgccgacgatggcgctaggcacaccagattacaggatgggccagcacggcggcggtgcttctagcagctcggcctccgctggtctccgcgtgcaggggcagtacttcaccggcggaagctcgtatccccgtggcccgtga

SEQ ID NO: 30514 - DNA, 750 bp, Zea mays
  Peptide Sequence Number=SeqID_73889
atggtggggcgaatttggcctgcggaggcctatggcggtcggtccacggcgcagtggcgggtgcccacggcggcgaagccgccgatggcgcatgacgaagaggttgaggaccttggtgatctagacagcacgctgcccgaggcatcgggggtggagctggcgccgccagccgatgcaggcgagggcccctcggcgacccccgcgtcgactggagctgacgaagaccccgcgctagccactacgctaacgggtgcggacgcctcgaaggtggtggccgaaccagctgacgaagaaccaaggccttcgcaggttccgacgtttgggcctgcgcaagcaaccgctgctgacaatactgattttgtggtggcctcaaccgtagtgcctgccgatgataatttgtttggctctgtgtctgagtgttttgagtctgatggtgaatctgggagttcgttttcttggacggtggagtcctcagatgaaggcttggattattttgctgcgttagatgtggctgtagcagagggtggtgccggggatcttcctagtgtgagtactgggtataggcggcgaagggtggtggcgaaacacagtgtgggtgaattttcgcgaagtggtaggcgccgtcgtatggggatggagtgtggccgtcttcgagtggaccagattggtaaacaagaatttttgtcctcgccgattggggcgagcataggtgaaggggatctgcgaaatcttttgagggtgacgaattga

SEQ ID NO: 30515 - DNA, 579 bp, Zea mays
  Peptide Sequence Number=SeqID_73890
atggagcttatcaaaggtgaacttgggaggtttgccatgaagaggggtgaagagccaactgaaatgtacaataggctcaaaaccctggggctgcacgacttctcgtcaggtttagcccggtggcttatgtcatgggccacaagcagtgggtctccacctgagcgggaagtggagggcaaggcccgcacacgtgtcagtaccggacccctgcacacacaagggtcctcctcgttccgggaccctgctggagtttggacctacctggaggctccggacttatatgtatataggggtccggtgtccttctgtggggtccggacttatcgagatgtggtgtctctccttgccacgtggcgccctttggcccgtctcacctggtggggtcaggcgccatcctccgcgtggctaggagacgttgcatgggtgcggcgtcttcatgctgtaggagagggtacccctgatttagggtaccgacagtgccccccggtcccgcctcaggggaggatatggggtgcgccggtgttctctggagggatccgcgtcaaggccgtctcttccggcgacttcatcgtcatatga

SEQ ID NO: 30516 - DNA, 384 bp, Zea mays
  Peptide Sequence Number=SeqID_73891
atggggatggggaatgctttcccatccccgtttacccgtcaggaaaggaattttccgatttacattcccgtgggggaagaaccttcttcatcctcatcccccaaatggaggaatttcccacggggaataagggatcagggccccattgccatctctacctgggctggagggtggcgcgcaggacgtaacacgggagcgatgggatggggaatgctttcccatccccgtttacccgtcgggggaggatttttcccatttacattcccgtgggggaagaaccttcttcatcctcatccccaaatggaggaatttcctgcggggaatcagggatcagggccccattgccatctctacctgggttggagggtggcacgcaggacgtaa

SEQ ID NO: 30517 - DNA, 1377 bp, Zea mays
  Peptide Sequence Number=SeqID_73892
atggagacttgcgtggccctcgggggaaggatgtcttcgcccgaggtccgggagtcttcggcgcgaatgctgaaggttaccgggggtcgatggccaaggaacgttctgattccccgtgcggccggcgaggacatgtttacatctcgtatggcccgtgaattgaagatttttccttatgggcggaatattgctactgttgtatcagcagtgatggacaaggatcgtcaagttgcggcgcgaaagcgccgggcaatcactaggttcgaggaccctgtgcgcgaggtgaagcgggcgcggggaggcgctaagtccgctgcccctggcggcgttaaaccaccaccggcagcgaagcctaccgtccccggacccagcaagtcttcggcgggtttgagggtcgccgcttctggcgtgggcaagccgccctcgactgaacccgcgaaggagcgaaggctgccgtcgccggtgcgcaccgacaaagcggcggcgggtggtgccgattttgatacggacatctgcgtggatgattacctcgttggtgagagtttttttagactaggtcttgaacaagattatggtgcagggtcgaatgcgggacagctggctattgtcccgtctacggtgatggccacttcgcccgcgacgacggttggagcgaagggcatttcacgggacccatggtccaaattctgtgccagcggcgagatttcgtcggtcgccgccgctagggatgtggcgggcattgtgtcccagcagctgaagcatgcggccgccttcgccgaccatgttgcgtcgggcgccttgtcctcggagttcgctgccgagaggcaacgactcgagggcaggatcaagcatctccgagcgcggcatgtggatgctgttcgggataagtcggctgcgaaaaacaagagccgcaggctggcagagaggctggcggctgcggaggccgagaaggaggacctcaggcgtcggttagcagaggagaggagggacgcatactcagcttgtggtcgcgagctgggcctccgcttccttggatggctacaagagaagctagaggtgctcccgaccattgttacgggcctcatgtccttcgcctccctcgtcacctgcgagggggccgtgaatgccttgtcccgcgaggggtgcgggcagttcgaggccttcgaccagtctgacgaaggcttcgagcgtgaaatcttccaggtcgaggacccggtgatgaagcggtcggctggggctcttttcgataggatgtggggccctcacggccgagagactgtccgggagaggtctgaccgggtgatggatcaggcagaactgggtgaagacacagccccatcaatcaagcatagcagaaaagaagtcttcagctgctga

SEQ ID NO: 30518 - DNA, 870 bp, Zea mays
  Peptide Sequence Number=SeqID_73893
atgaggacgtgggacaagcagactccatcggagactggccttcgccttgcaatggagagggcaaagggcaggcgcgccgatcgtctcgcattcgttggcgtagcgaggcgacgaagacttcgcgtgaagggtagcgtcttcgccttcgccccaacatttgccctccgagggaccagtttgactgagtcatctgatacctcgagcgatttggcagcggtggagttacagccgggtcacacggtggagttcggtgtgtcgaggatttcctcggttcgcgtgcaggatatgcagcagttagggtattttggggacagtgtttggcgcgtcccgggggcggaagaggttcccgagcctgagggcgagttagtcgtttttgaggcattcttcatcaccgtccttcgcctacccgcacatcgtttcgtggcagaggtcctgcagaggtttgaggtcgagccttccgtggaggtcttcgccaagaattactgtctacactggcaaaagagaaagattggaggtaaaattgcacagtttggatcgtgcaccttcatgccgaggaccagaaagacttcggcggaagttgtggagttagttccctgtgctcgcaacaagtggggcaactggtgggattattggttttatgttacgggaagcgaagtcgaagacctcccagggctccccgcggccgtgatgtgctcccattgttatgtggcattcccacaatttgaggtggcagaggatgatgaggatgaaggggccctcccgagcgctgcccgcatgagcagcgggcgtgatttggttgaggagttcattggttatggagtgtggcccctggcgcatggctgggtgctgggcaaagtatgccctcgctag

SEQ ID NO: 30519 - DNA, 312 bp, Zea mays
  Peptide Sequence Number=SeqID_73894
atggcggtcagggagcatgcaatgatcacgagttatatgtgggctgagagatgggaggctgtcaagaagctcaagaacaagattggtggtcgagggctccgtgagaacactggctatagttggatcgaggtcagaggcaaggttcatgtctttattgcagataaccggaatcacccagactggaacagaattgcagagtttctggatgatgttgccagaaggatgcgagaaggccatgatcctaagaaaaagtatgctctgatgggtgtcgatgatgcagtgcatgacgaggcactatgtgggcacagctga

SEQ ID NO: 30520 - DNA, 627 bp, Zea mays
  Peptide Sequence Number=SeqID_73895
atgcaggaggcgtgcagctgcaccacggttgtgcaccctttcggcttcatcgcatccggtgggttggcccctcggaagggttcgacagccgccccagagcactcgggcttcaagctcattactgatcaggggtttgaaggctggcccctcggaagggttcgacagccgcctcagagcactcgggctccgcacccactactgatcaggggctcaaaggctggcccctcggaagggttcgacagccaccccagagcacgcagagcaagggatgactctgggtacgtctgttacatggccgaggctcgggctacgctcccgagtcacttcaccctttcgctgaccgacctgacagaaaaacagcgttgctcgccccgctccgactgctgtgccacccaccagggtctccgcctcgcccgaccccagggctcggcctcaacctcgacctcggaaggtggtctccgcctcgcccgaccccagggctcggcctcaacctcggcctcgggaggaatcgcgtcctcacccgaccccgacctcggcctcaagagaaggctcaagcacttctccgacgaccacgttatcgcctacgcagggctcaagcacttctcctacagccacgttgtcatgtag

SEQ ID NO: 30521 - DNA, 858 bp, Zea mays
  Peptide Sequence Number=SeqID_73896
atgaacatgattgacttcgagggcaagaaagtcctggttcggccaaatacagccgataaaggcaaaggcaaggaaacaatcatcggcaatgctgatgaaagtgcattcatcccttttgtgagttttggtgatttggataacaacacatttaaagggaggattagggttgaaagagacctggctctttgtgggcgcctcaacgaggaagtagggcaccttggtgatgttgatcctagggcaatagatcttgccatgagaatcgccgaaaggatgttcctcaaaatgaaggaagatgagacaaagaacaagattgaagaagaagaagatgatcgatggaaaccaaacgatgaatccacctcttcacaagctaagcaagaaaaatcggatgagctgcttaaactcacgaaaagagcggaagaacaaaagaaatgcttcatagcagaagacttcctcatcagaaaaatcgaagacttagagaagttgaccaaagagcatgagaagctgaagtgctctcattatgatttggtccaaagggctcggactcgggctaagtcccagaagacggcgaactccgctccgcccgaccctcggggctcggactccgccccggcctcagccgtcggtctccgcctcgcccgacccaggggctcggactcgaccccggccacggaagacagactcgacctcggcttcggaggagcttacacatcacccaacctagggcgcagaccaaccacgtcaacaggaggcgccatcatcaccctaccccgagctgactcgggccacaggaacaagaccggcgtcccatctggctcgctccaccagataggcaatgatggcgccccgcatactctgtga

SEQ ID NO: 30522 - DNA, 813 bp, Zea mays
  Peptide Sequence Number=SeqID_73897
atgccgacgtcgaccttcaatcactcggcgctgcctctaaagcgccgaccacgtgttcgattgctcggcattacttctaaaatgccgacgccgaccttcaatcactcggcgctgcctctaaaacgccgaccacgtgttcgattgctcggcattacttctaaaatgccgacgccgaccttcaatcactcggcgctacctctaaaacgccgaccacatgttcgattgctcggcattacttctaaaatgccgacgccgaccttcaatcactcggcgctgcctctaaaacgccgaccacgtgttcgatcgctcggcattacttctaaaatgccgacgccgaccttcaatcactcggcgctgcctctaaaacgccgaccacgtgttcgatcgctcggcattacttctaaaatgccgacgccgaccttcaatcactcggcgctgcctctaaaacgccgaccacgtgttcgatcgcttggcattacttctaaaatgccgacgccgaccttcaatcactcggcgctgcctctaaagcgccgaccacgtgttcaatcgctcggcattacttctaaaataccgatgccgaccttctatcattcggcatcgcctctgagacgacggtcttgtgttcgattgctcagtgttacttctaaaacgctgatgtcaatcttcacaaccgctcggtgctgtttctactatatcaaaagaatcgattcaacatttagcaaaaccagtgacgagtcatcaaaaagaggagataaacgacaactttcattgaagggaaaatcacaagtagcaaaccaactctttatgagttga

SEQ ID NO: 30523 - DNA, 513 bp, Zea mays
  Peptide Sequence Number=SeqID_73898
atggcacaggtgctgcgatcggtgggtgcgcggagacggggcggacgacgacggcgagggtgtggacgggcgcggctggtcatgggcggcgcggcggcgatgcagccacgggcgccgctaggggccacgggtgaggtggaggcgggagctccgcctcgcccgacctcaggcctcggtctcagcctcggcctcgggagaaggtctccgcctcgcctgaccccaggcctcggcctcagcctcggccttgggagaaggtctccgccttacccgaccgcaggcctcggcctcagcctcggcctcaggaggaggtctccgcctcgcccgaccccaggccttggcctcagcctcagcctcgggaggaggtctccgcctcgcccgacctcagcctcgacctcgggaggagtcacaacctcgcccgacctcggcctcggcctcaggagaagtcaccgcctcgcccgacctcggcctcggaccgactacgctacaggggatgcatcattaccctacctctag

SEQ ID NO: 30524 - DNA, 72 bp, Zea mays
  Peptide Sequence Number=SeqID_73899
atgccggatgaaggcggttcgtccggcggcgctcgtgcgagtagattggtggcggcgcgtgtgcgagcataa

SEQ ID NO: 30525 - DNA, 623 bp, Zea mays
  Peptide Sequence Number=SeqID_73900
atggcgccgtcttggtgtcgtgatttatggggcggatgccacctaagcgcgtggattcgagacctcggcgccataaattacggcgccgtgagccacaattcccgtcggtcgtgctgcgcggccgacggggataaggtaactcctgccggctctgcttgttggccaacggagactgataattttaagggagtccctgcccgaccaaccgaaagtcgcccatcatcgcccatccttgctccagcctcgccaccgaccccctaccacaccccgccatggtccggcctcgcctcagccacccggcctcgccccctccatttgtcggcctcgccctgcccccagcggcgcccccgctattcctcgagcttggccttgaccctggcccgggcggtgcccccgtgctccggcctcgccaccgaccccctaccacaccccgccatggtccggccttccctccgccaccgagcctcgccccctccatttgtcggcctcgccctgcccccagtggcgcccccgctgttcctcgagcttggcctcgaccctggctcgggcggtgccccctgtgccccggcctcgcccctcaccgtgctccgcagcgcctccaccattccacggcacggggccac

SEQ ID NO: 30526 - DNA, 190 bp, Zea mays
  Peptide Sequence Number=SeqID_73901
atgtttaatgagcatgttgctcaaagtttctggtacgctcctggaatcggtcgtaatgtatgcttccctctgcgagagttaatagaggagcaccccttgccatcggtacacgcgagaaacactttccgtctccagtcagccgacgatgaggtatttgcatccggtgactctgccgcgacagagagcgaag

SEQ ID NO: 30527 - DNA, 477 bp, Zea mays
  Peptide Sequence Number=SeqID_73902
atgtcgtcgtcggcggcggagacgccgcgggagcacgtggagagtatccggcggaagcgctactacatcggccgcggcgagcaaaacccgctggcggaggacttgcaccaggccacgaactacctctcgcaggagctctactccaaggacgtgcacttcctcatggagctcgtgcagaatgctgaagataacgaatacccttctgaagtagcaccttctttggagtttctgattacatcaaaggatattactggatgtggtgcatcctcaactttgctcattttcaataatgagaggggattctctgcaaccaatatcgagtcaatttgtagagtcggaaaatcaacaaagaagggaaacaggcatcggggttacatcggagagaaagtactccatatgatgccactccatcatgggaatgtattccgtggaatcgtgaaaaccacctcaaaaactgcatcaagaagttctcaataa

SEQ ID NO: 30528 - DNA, 846 bp, Zea mays
  Peptide Sequence Number=SeqID_73903
atggcgtgtctgtcaccgtcgtcgtccggccggcgcctgtcggagctgctggaggagaagcaggagcccttcgtcctggacttgcacctgctcgaaaagggctgctgctcctcgcgcctcctcgacggctacgactccgcgctgtgctggccggccgccggcaacgacgccgcggccgcgctcaggcgcctggccagcaagaagaacaaggcggccaagctgaagcccgcccggcagcatgctgccggcggcctcctccagctcttgctctccaagatcctccgcggcagcagcgcggcggcccagcgccagcggaagcccgccgcggccgcgctgcacttctccggctccttgaagctgccggctgccgtggcgccggcgtcgtgctacgtggagctggacgccgtaaagaccgccgcctccgacgtcgtcgtcgtcgtcgtcaaggcgcaggacgccgccaccgcggggcgctacaacgactccgactgcgacgacgatgagaagcagcagctgagccccgtctctgtcctggaccaccctccgagcacctccacctcaggggacgccgacgccgacgccgacgaggactgctactacggcggctactgcgtcagccccaagagctgccgcgacgacaggtccgccgccaccgcctactgggactgggacgcgcacacgggggagctggcacgggcgtctcagctggtggcgtccgagctcccgacctccaggctagtcgccgccgacgtggggcccgagcgccgcgacgtccgcgccgaggtagaggcggccgtgttcgaggcgctgatgcgggagctcgtcgtggatctccggagctgctga

SEQ ID NO: 30529 - DNA, 741 bp, Zea mays
  Peptide Sequence Number=SeqID_73904
atgacggatgcggagaaggaggtagcaacagaaagacggatggactcaccgcctcgatgcgattgtggagaccgtgctgtcatcgacgaagactatgagaagcagttctgttgtccgaacattgattatccatacgggtggcgtaagtgtcgtttcagagagtggttgtatggtcctttgttccattggccagagccagaggtaaaggaaaagagatacaatcagtgggcggaagaagagatcaaatttgatccagtactctgcaaatgtggtattgaagctaagtatggattagttccttccgagcttggtgttggatatttttgtggacatatggtcgattacgatgaggttggagacgaggaaatgcagtttgggaagagctacgacgtcaaaggagaggagattggaagcggcgtaaactatttggccgatgaggcgcatgcgagatatgttcaggataaaatggcaacagttgagctgatggaggaggaggaggacgacacatctagattgagtgagcttatcgctctcgtagaggcaggattacatgaagaagaggaggacgacacatcaaggttgagtgagctcatcgcactagctgaggcaggattacgtgctcaagaggaagaggatgagtttatgtctcaggccgccaaagaggtagaggtggcttattacaagaagaagtctgatgaggctgaggctgaggatgagctattctcccaaagctgcagatga

SEQ ID NO: 30530 - DNA, 351 bp, Zea mays
  Peptide Sequence Number=SeqID_73905
atggctggtcgcctgtcgccggcgaccgtcgtgctgggctgctggcttgctgccttgccttgcctgggcttcgggctcgggttttatgcccagtgctattgggaggaggtctccgcctcgcccgacctcagcctcggcctcgggaggagtcacaatctcgcccgacctcagcctcggcctcaggagaagtcaccgcctcgcccgacctcggcctcggaccgactactctacaggggatacatcattaccctacctctagctagccgcctcaggctacgaaggaacaagaccggtgtcacatctagattactccggccacaagtaatgatggttccccgcatgcatccatga

SEQ ID NO: 30531 - DNA, 621 bp, Zea mays
  Peptide Sequence Number=SeqID_73906
atgaacaaggaaaaaggtaaaaattcaattagtcatgttgtttgcactgatcatctctctatgtcatccaagagcaaaaagggaagaggaaaaaggaggtgcttcaagtgcaaggaattaggtcacttcattgcgtcttgtccacacaaagacaaggatgaaggaatgaggagatgctttggatgcaacgataaggaccatatgatcacttcatgtccgctcatgaagaatcaaagacgtgcaccctccaagatgaccctcactaagcaaaaagacaaacaacaagtgtcaagtcaggttgagcgacgcttctgctacatgtgtggtgagcatggtcatctacctaacatatgcccacgaaagaatgaccttacgaattattgggtccttgggcctttcgtgaggccttttacttctttagtggacccaggggatatctatcccccacagttcctaaacagggtatatctcttgaatcattcaatgggtagcttttcatttgatatatccaccatgattaactctcttggtaccaagtctcaaggtggaaaagggaagatgagcaagaaatggagcgatcaggacttgggtacctccacaagtcgagtaattggtatctaa

SEQ ID NO: 30532 - DNA, 1977 bp, Zea mays
  Peptide Sequence Number=SeqID_73907
atgacgactcaaggaggtttgcagccgacaagcaatgaagctaatatgtgcaccaacgacaatggtagccaacttggtacacggattgtggacgagattatggccgggaagaacgtcttctttgatcttcctgacaagttgactggtgagatatggaccttgaaattccattgcattggaggacaacctggaaaagaaattgtcacagtaaatattgataaagcttatgttgccttttacaacatggtgtacataaaatcgaaacttggatattctaggagggacttcttgttttacaagaaacgatgtggcattgatcgatccaggctattggcacttgattacatccaccaagaagaggccatgctgtctgataacatggatgagagaaaaataagttttgtgctcacaaaagatccacccagtgatctagaggtaagcgtaactcccatcaagcgtccaaggcagcgaacaaatgttgatgaagaaactatagaagtgtcgattgatgcatataaggagtggcttgcaatactacaacatgataatccagaaacggtattgtatgaacgacaaagcaatgatgacctaatattatcagatgaagaaattcatggcagcagcaaacctactgctaattggccatctcatgctagacgtcataggaaaagagatcctgatgttattggtatatatgtagataacgatggagtctttaaaaaggaggggtgtggtacccttaagggtatagcagcagccaccaagcgaatcaagaacggtgatcacaaacttaagattgaattttcatctaagcttggaggtcctgtaggaccaaacgctcgcacttttgtggatgaaatcgtattgtttacaaagaaaaaggcaccactcattggagtgaaaaagtggaaagatatagagctcaatgttagatcttctatagcctctgacgtactgcgaaggtgggagtttctaaccaatgaggacgcgcatgaaaagatctggtctattgctaaggagagatacaaaggatggcgatcaacgttaagctcaacatacaaggcatacaatagttatgctgaaaggatgaaaaacaagcctgaagatgtagacatcgtcgagtggcattacatgatgttgtattttggatctgagaaattccagaaaataagcagccggaactcgaaaaaccgtcagaaacaaagaacgaagcatataatgggttctagaactttttcccaaataagctttcaacagagagatccagaaactggtatagaaccaaccgatctatccctttggatgattactcattgtaaaaatgatgaatggtcggaagaggcttcacgtggcatttatgagaaggcagctgagaaaattgttgagaaaatatatcaaacagaaagatttaagctaacaagagaagaggaaaatgctattttccaaacaacattcaaggaaacaacaggatgtaaggcaaacagacttcatggtcatgggtacctatcaagatatccaacaagaagtcaagtgatggaatcaaagttcctcgaacaagctcgtgccacggttgcaaccaaccaaaagaacattgaactcgaaagtcaggtccagttgttaaatgaaaaacttgcgtgtgaggttgcagaacgagaaagaatactacaggaaaaaatgcaagcactgcaagaagaagaagaaagaaaaagacaagtgcttagagaagaaatgaggcaagaaatggttgttgcccttgctgctgtagcacaacagttttgtttttgtaatcctgaatatgataataggtacaatccgcaagtgcaagcgagaagcaaggtagatcaacttaagaagctctatcaaagtgtgtttaaggctggtgctgcagctgccttctctggtagagatagagtagaacgcttgctgctgcgtgcttcctgttgctgcgtgctactgtttgtttcttgccgctgctag

SEQ ID NO: 30533 - DNA, 420 bp, Zea mays
  Peptide Sequence Number=SeqID_73908
atgggcaagaacaacaagcgcaagcgtgaaccgactcctccatcggaggagtttggtgactcggaatactcggaggaggagttctcctccgagcccgaggggtctccggctcccgtctctcccccggcgtcgtctgatgactcggacgactcccaggggatagccgcggaggtctggacgtacatccgagccgtcgagcgcgccgggctcgaaggctcggatgagtcggagtactcctcggatgaggaggactcggacggcggcgacgagggtgaagacgacgacgacgacgacgacgacgacgacggcgacgacagtggcaggggcggcggcgacggcagcagggacagcaccaagggcgacagcagcaggggcagcaccaagggcggcggcggcggcaggggcagggccagtggctag

SEQ ID NO: 30534 - DNA, 120 bp, Zea mays
  Peptide Sequence Number=SeqID_73909
atggctggcataccgggcgcaagagccgctctggtgcgaggcgccaactccggccccgaccacgagttccgtttccgcggccctgggggggatactcttggcggcgaggggcctcgctag

SEQ ID NO: 30535 - DNA, 2847 bp, Zea mays
  Peptide Sequence Number=SeqID_73910
atgtcgtcctcttcctcttccactgccgatacaccgccggtcggcgcatcgtctgagggcacgctgagcaacgtggtggcggaggagttgcgtcctggtgacacagtggaattcggcgcgtcgcggctgtcctcggtccgcgtgcacgacatgcaacaacttggatattttggcggcggagtggcgcgtgtcccggggcggaggaggtccccgagccaaaaggcgagttggtcgtcttcgaggcctttttcgccgtcggtcttcgtctgcctgcgcaccggtccaccagttgacaccgaatgccgtggtggccctggcaaagtatgtctgggcgacgacttcgtatggcgggcagccctctgtggaagtcttcgcgaagcattattgtatgcattggcagaaaaaagaaaattggacataaggttgcacaattttgggtcttgcacatttacgccgaagaccggcaagacttcgctggaagtcgtggaattggtgccctgcgcccgcaataaatggggcaactggtgggaattttggttttacgttttcgagggcacagtcgaagaccatccagggctccccgtggccgtcatgtgctcacatcattacgtggcgtacccgcagttcgaggtagcggaggatgatgaaaacgaaggggcccttcggtgcgctgtccgcatgagcagcgggcacgaccttgttgaggagtttgtcgggtatggggtatggcccttggcgcatggctgggcgttgggcgaagtatgccctcaccagatgccctctcgtggtgggatgctggtgcgaagtcctgccttcgcgctggatttgcatggccgagatcctgccgcattcgtgcgtgaagcggaagacggtgcgacgaggattgtgggtcgttatgtgccgaagacagagggtccgcggagctgggatatccgtgggtccaatgacaggctgaatcaggtttttgaattgaaccgtttaccgtccggttgttatccgggagaagacgccgccgaccgccgcgcgaagaagccgatgggtgggaccgaggaagggacttcgcaggtggctgccccggccactaagaaaagaaaattaggtactataggggggaagggggtgtctgataattttgctgtagagttgatggggacatgtgcggcccccggaggaaggatgtctttgcccgagctccgggagtcttcggcgcgaatgctggaggttactgggggtcggtggccaaagaatcttccgatcccctgggcagagggcgaagacatgtctacaactcgtatagctcgtgggatgaggattttcccttacggacggtatattgctgctgttgtgtcagcagtgatgaacaaggatcgccaggatgctgcgcagaagcgccgggcggtcatcaggctccccgatcctatgcgtgaagcgaagagagcgcgggggagcgcgaaggctgccgcccccggcggtagccagccgacgctggccgcgaaaccggccgcacccggatccagcaaggtgccggagagcacgaaggccgtcgttttcggcggaaccaagtccgccacgggcgaagctgcgaaggtctgggagctgccttcgccggggaaacgcgttgtcgactttgccacgaatattagcgtggacaactatttcgtcaggtcgggcgaggggcaactagttgttgtcccacctgcggtggcaaccacggcgtcaaccgcggtgcttggggtgaagggtggcgctttcagcgctggcggcgagatttcggcggccactgccgtcaaggacgaagcgggcaccatgtcccgccggctgagggaggcgtcgcagcagctgtcgcagcagctaagtcaagcggccgacttcgccgaccgtgtggcatcaggtgcccttactgcagatgtgtctgccgaagtcgagagacttcgggtgcagcacgcggacgccgtccgagagaagtcggctgcggagagcaagagccgcaggctggcggagaaggtggccgccctggagggagagaggactgacctccggcgccagctggtggaggaaaggagggaggccaaccaggccatcgccgaggcgcaggcggaggccaaattggcgcgggcggaggggagtctcgccagccaacgcgccgaggaatgggaggtgtggttcaacgctctgcacggctgcatggagagggccgaggcctctacgcactcggaagttgagcggacgcgcacacagctcgtggactcataccgcgagctgggtgcgtggactgctgacttcgaggtgcccaaccgagaggcgggccttcgcttcctcgagtggctgcaagaggaattgctggcactcccgaccatcgtggagggtttcatgtcctttgcctccctcgtcacctgtgaaggggccatgaacgcgttgtctcgcgagggctgtagacactacgaggtcttcgaccaaacagacgagagctttgaacgtgagatctttaaggccgaaggccccgttgtgaagcagtcagtgggggcactttttgataggatgtggggggcgcatggttgtgaggctgtcagggagcgatccgaccgggcgagagagcagatggagcgcaccgaggacgtcgaggacttcggaggtctaaacagcgcaccgcccgaggctgcggagggcaaaccggtgctaccctcggatgctggtgaaggcccatcggacgtgcctgtgcctgctgctgccggcgaagaccctgtgtcggcccctgtgccgacggtcgaaggcgcacaggaggtggtggcggagctggcggtcgaaggccctatggccgcggacgcgcccacgcaggtggctaagtag

SEQ ID NO: 30536 - DNA, 1137 bp, Zea mays
  Peptide Sequence Number=SeqID_73911
atggcgcctcctgttggcgtggcggtctatgccctaggcagggcgacgtgggggttcctccgaagccaagcccgagtccgagccctggggtcgggcggagcggagttcgccgtcttccgggtcttagcccgagtccgagccctggggtcgggcggagcggagttcgccgtcttccgggtcttagcccgagtccgagccctggggtcgggcggagcggagtttgccgtcttccgggtcttagcccgagtccgagccctggggtcgggcggagcggagttcgccgtcttccgggtcttagcccgagtccgagccctggggtcgggcggagcggagttcgccgtcttccgggcggcgctgtccttctgtcagactggccagtggagcagtggagtgacggcggtcacttcggctctgccgggggcgcgtgtcaggatagaggtgtcaggccacctttgcgttaaatgcccccgcaatttggtcagtcggtgcggcgatttagtcaaggttgcttctgagcgaagccaaggcctcgggcaagccggtgatgtgtccgccataaaaagggggcctcgggcgagacggaagtctctcgagctttatgctgatgggggttaccagctgagaattaggcgtcttgagggaataaataatgtttcatataaagagctcaaggaagaaaatgagaggctaagaatgagcttgacacaactgaaagggaagtgcattgctcaaccttctcaagataaccatgatgacatggtgaagaagcttgagtcgggaacaaccgtggcatgcacaaaatctctcaagaaaaatgttaaggacttgaggaatgtcaagaggaagcaatgttggaacttgctctctgtcgcaaggggatccaacggggcgtcttgtgttaaggacgcatgtgccctcagacacctaggttatccccagaatattcccataaagcggggttacagactgtgggatgacttcgtcataggtcttcgttcgatgtcgtatggggcgaagggtgtccctgcccgttgtcttgtctccgttggaccaacgactacggcgaaggcctcgagcgaagggtggcgtcttcgccttcgccccaacatttgcccttcgagggaccagttcgactaa

SEQ ID NO: 30537 - DNA, 291 bp, Zea mays
  Peptide Sequence Number=SeqID_73912
atgcggacgtttagtcttcgtttttttcccaacccctccctccccccgtcgagcctgccgccgccggccgtgcgtaccacccctaccgtttctgttttgaggctttccgcaaagcgctctccgccggacaaaatgatgcgtctacgacgctttgcactgcatacttgcgtttgcctgagggctgcggccggcgtgtctaagactgcactgctgactgggctggaccgggggccacgcgaggacgccaagggggagctggtgggactgaactcgctgtcgctgggaaagtga

SEQ ID NO: 30538 - DNA, 781 bp, Zea mays
  Peptide Sequence Number=SeqID_73913
atggcgcctcctgttggcgtggcggtctatgcccctaggcagggcgacgtgggggttcctccgaagccaaggttgagtttgccttttgttgccgtggccgagcccgagccaaggggtcgggcgaggcggaagtcgttcggccgaggccagggcgggagtccgagcccctggggtcgggcgaagcggagtttcgtcgtcttccgggtgctagcccgagtccgagccctggggtcgggcggagcggagttcgccgtcttccgggtcttagcccgagtccgagccctggggtcgggcggagcggagttcgccgtcttccgggtcttagcccgagtccgagccctggggtcgggcggagcggagttcgccgtcttccgggtcttagcccgagtccgagccctggggtcgggcggagcggagttcgccgtcttccgggtcttagcccgagtccgagccctggggtcgggtggagcggagttcaccgtcttccgggcggcgctgtccttctgtcagactggccagtggagcagtggagtgacggcggtcacttcggctctgccgggggcgcgtgtcaggatagaggtgtcaggcaacctttgcgttaaatgcccccgcaatttggtcagtcggtgcggcgatttagtcaaggttgcttctgagcgaagccaaggcctcgggcaagccggtgatgtgtccgccataaaaagggggcctcgggcgagacggaagtctctcgagctttatgctgatgggggttaccagctgagaattaggcgtcttgagg

SEQ ID NO: 30539 - DNA, 627 bp, Zea mays
  Peptide Sequence Number=SeqID_73914
atgtcttctcgctcccttatgcgtcgcgtctttccaccttccaagcccccggatgggggcccggctgtatccccccgccggtggtcacccaagacggtgaccaccagttcctgggtggggagaagcaagccgggctgtgatcttggtcccaccctcagcttcaaggatgttcatgatcctcgctggggtgggggccgggctgagccggtgctctacctcccgcgcgggttcgtgggtcaccctctcccgcggcgttcgggggagagggcgctcactggccctgcgggcggcccggacttcgacaacgcggggccggtcgacggcgggcgtcgtcacctccagcgtgtcgggctcgtcggcttggctcccggcagcccctcccgccggagggcggctgccgcgccccgaggcctcggaccgggctggcgcccttggaagatggttggccgaggcccctggggtaaccggccgagccgcctgctcgggccggattcccggagaagtccctggaccgcgtcgccgtccgaggctaggtcggacctcgctgaaggtgtcgtcgatgccgagggtgctacagcccccttccagcgtgaagacccgagcctgcaggagcagattgtcttgtag

SEQ ID NO: 30540 - DNA, 933 bp, Zea mays
  Peptide Sequence Number=SeqID_73915
atgacggtggcaggcgggcgggagcagcggtcacgtcgtcggccaggctcacgtcccatccgggggcagcaagagaaccccctctcacggcgtgaagacagggcgcccgtgatccgttcctcgaacggcttgcgcacgcgcaacggccgccccgccaaccactcgccctgtcgcattaactccgcggcgggacaggcggcgcttctggcaggagaagcgggcgacgcttcgccttcgccgctggccccccgaggggttcaacagccgcctcagatcgcgtgggccctacacccactactggtcagaggttcgaaggccggccccccgaagggctccacgttcgcctcaggctactcgggctccgcgcccattactgatcagggctcaccggagacaccatgttcggtgcccatcgagggtaacatggcgctctccccccccctccttgcggaaaggcgacgtaggggcggctcggactcgagcaaggccccggaagacggcgaactccgctccgcccgacccagggctcggactcgggctaagccccggaagacggcgaactccgctccgcccgacccagggctcggactcgggctaagccccggaagacggcgaactccgctccgcccgatccagggctcggactcgggctcagccccagaagacgacgaactccgcttcgcccgaccccagggctcggactccgccctggcctctgccgaacaacctccgccttgcccgacccaggggctcgggctcggcctcggccatggaagacagactcgacctcggcttcggaggagcctccacgtcgcccgacctagggcacagggcagccacgtcaacaggaagcgccatcatcaccctaccccgagccgactcgggccgcagagaacaagaccggtgtcccatctggctagctccgccagatag

SEQ ID NO: 30541 - DNA, 1263 bp, Zea mays
  Peptide Sequence Number=SeqID_73916
atgagtcatcttgcacctagggttgatgagcgttcgtttgaggactggtggaggaaggccaacaaaggagtagtctttgatggggatcggccttccattcagtggatgcagcaacattttagcaacgagttctattgttggcttctggcgggcgccagcttggatgtgctaatcacttctgtaatgctttgttctgaatattgggtcatggttactgaggctgttatttttgtccagagggactatgtaaagtggagaggggttctcttccttcgatttctgccatctttagttgatgagtctgagaagattaggcatttggcggactacctcttcgggaacatcttaaaagctaaagcgccacttcttgcatacaatagtttcattgaagctatatatgttctaaacgattgcactggacatggtgtatatagcgactctcagtctcagggaagtttagacagaagacctgccctttttgcaattcgtggcactgatgaaagcacgaggtcaaagagaatgcacatttatgtctctttgctgaaacaaatggcaccagagcatcttttagccacgtcggccaagttatgtgctgagatcttggcagctgtttgcgatggcttgctcagtgttgatgatgctggtggaagggctgtacttcaggatgctctgcagatactggcttgcaaggagatgcgcatccaccccaacatcttatcagagaattccgagatggacgaggaaggcggtgagggcggaggaacagccagcgcgctcctggcggccaaagggagggcggtgacccaggtcgctaagaagaacctgatccagatcgccgtcccgatcttcatcgagctgaagcggctgctggagagcaagaacagcccgctgatcgggtgcctgatggagtgcctgcgcgcgctgctcaaggactacaagaacgagatggaggagatcctggtggcggacaagcagctccagcgtgagctcctctacgacatgcacaagtacgaggcaggcaaggggaagggcaaggctgcggcgcaggccgaggccgaggccggggccggggccggtcttagcggcatcggcaggtccccggctgtcaggtcggtgctgaaggaggtgaaccggaagacgacgccgacgcaaccgctgcactcgatgagtgtgcccaaggtgaagtccattctggggagcgccgggccgggctctggtcgccccgatgtcctccagtcggtcaggcggcttcagccgctttga

SEQ ID NO: 30542 - DNA, 1545 bp, Zea mays
  Peptide Sequence Number=SeqID_73917
atggcaaggggcaaggcaaagggacgactgcttgctgtggatttggtccttgccttgctgccagtgctgttaccatttgaaggggatgcctgtgatatggaggagggctcttgggggctgaagtgtctgcgggtgttggtggagaagtgctcagatagtgtgggaggggttcgagctcgggcattaataaatgcagcccaggcgcttgatattttgtctgagagaggtgtggaggttgaccggttgcaggaggtgatgaggattggggacatgaagcttggggaattgctgagacgacgctgcaccgatgataaggctgctgtgaggaaggctgcgcttgtgctcatcacaaaggcgattggtttgattgggagacccatagatgactctcttctttgtgcaatgggtgctgcatgctctgatccattagtcagcatccgcaaggctgctcttgctgccatctcagaggaagttttccctgaagggacactagatttgctgaaaagcatctgtgatggagaggttgctccatgcataaagaagatatgtgcaagccttggcaagaagaggaagctgaaaccactacttgctagttctctgcagaacatcataacactatctgaatccttgtggttgagacgttgtaagccaatcgaaaattggactgcacctattgggtcctggtggcttctttccgaggtctcatcattcgcgccaaaatcagttaactggaagttcctctcccaccactggaaactccttgacaatgttggcaaagacgaaagaggtaaagcttgttctcaggtggaaccaaactctgcgctctgggcagttaatcgtgtatcactcttgcaaaccatttcaaatgtctccatggagctgccagtggaacctgctgcagaattggcacacagcttgctcacaaggatcgaggattttgatatgaaccttagtgaggttgatgcacatgtaaaatcactgaaaactttgtgtaaaaggaaagcaaaaacagctaaggaaggtgatgcactgatcctgaagtgggcgcagcaacttatccgtagtgcttttgacatccttgaccagtacataaaagaggcatcagaatcagccaggggtcacagtttcattactcctatgactggtaaatgcaagggaatgaaacagacatctgcatcgaagtcaacatcacaagcagttgttgctgtgttcactgttggatcactgatcctagcttgccctattgccaatgtgaaggacatcacccctttgctacacacaatcgtaacttctggaaattctgagccaaggccaaaaaaccttgttggcgggaccatttctttcaaagagttagctccatcattatatatacaatcctgggatacattagcaaaaatatgccttgtagatgaaaaagtggccaaacggtatattccaatttttgttcaggagcttgagaggagtgatatggctacccttcgtaataatatcatgattgcgatggcagacttctatgtccgttatactgcattggttgactggtga

SEQ ID NO: 30543 - DNA, 1461 bp, Zea mays
  Peptide Sequence Number=SeqID_73918
atggagccggatccggtcgccgctagggcatcctcctcgccgccgccttatccagcgtcggccacgtccccgccgtggcaaacgcgagttgagaacgccgaggtgggcagcgaggtggagcaggaggagccaaagaaggaggcaatggcaggagtaggagagactctccgcagcttcatgaaggagtttggggatcaaggagaggactccattatcttgtcaccgtggctgaaggagattagtactcctgaccgccccactgcccttcgtttcctaggggagaagtataataacctcatggagaggtacaagaagcaggtagtcaagtgttccgaggagtgtgaaccaagatataatgccctgaagaagaagtacacagacaagtgtgtagagaggcggcgtctgtacaatgagcttattgagctaagaggtaacattagggtgttctgcagatgcagacctctgagctccaatgaggtcaaccgtgggtgtttatctgttgttgagattgacccatcacacaagactgagctgcagtttgtcctcaatgaaaaagaaaagaagccctttaagttcgatcacgttttggggccagaggatggccaagcttgttcgcttattgtaaaatggcatgaccgtgagcttgtcttgtcgaggctcagaaaggacaatgagaaagcaaaagatgcttttgagaaggcctcaaaaggacaggaaatgatctcctcgtatcctttggagatttctctgcaggagcttgggtgctggaatgaagtatctgatttctatcacagagcttcagaattataccgtgaatgtggaaggccacaacctgcatctgatgctctagcaaagggtgccagtgtattggaggagaaatctccagaagaagctatcaaaatgtatgatgaggcttgttcagtaatagaagaagatgggaaggaacagatggcttttgacttgtaccgtgccgcagcagctttgtatatcaagatggagaacctcacattttcatctatgtgctatctcattcatgatttccttggaactttttttgttcgttcttccttgttcttacatgcgaaatatttagatgctgctgctttgtttttaagactcggtttagctgctgataagtgcaatgccatcaatagccaatgcaaggcctatctgagtgcgatcatcatctatctttacgcacatgattttcagcaagctcaagaatgctacaatgactgctcagaggttcaagccttcctcaatagcgaccagaatcgatgtgcaacgaagctattgtctgcttatgaggaaggtgatgctgaagaaatcaaacacattgctcaatcaagtgccttcaatcaccttgaccatgtggcaaaatctcaggttggagaaaaaatcatggttaaagtagtgttcatttcaatctccatgttgttgcagagcgataggtcaaagtaa

SEQ ID NO: 30544 - DNA, 174 bp, Zea mays
  Peptide Sequence Number=SeqID_73919
atggtccaggtgtacgtattgaagaaggtcacggcatctgcgggaggcaatcagcgaccgaccggagcccgtaccgacgttgacaagcatgtctcagaagaatatctaggttatgcgtgcttggcctgtagcaatcttaggatgggtgaagtcttctcagatgcatatgagtga

SEQ ID NO: 30545 - DNA, 579 bp, Zea mays
  Peptide Sequence Number=SeqID_73920
atgggcgctgctctgaccgcccagatggccactgcgcagcgactcatcctcggccatcctgcggttagagtaggacaaaatactcgtggctttcgagccgagccaactcgttatcttaacgagccagctcgagctcggtcgaggcgagccgagctggctcgatatccacccctacctgcggtcgtccacgagacacctccgccaacacccgaggccgtctatggactcgacgccgaccacatcgtcgctctccacgctcaggccgccgagttgcacaacatctggtcccttgtgtccattgtgttggaatcggcgtcctcccactaccctcgttggtgggggcaggtctttctcacgcttcggcggaatcttgttatttgtagggcgttaagtatgacaaagttggactctgacaaatcatattctgctctcatatatggcacatctgctcttgttgcaatttggatatcatcaattgtggtttctgcacttgattcagtccctttggagaaccgtgatgaacttttcacgagagtcagctccatcaagaagcaaattttggggtctcatgagaactga

SEQ ID NO: 30546 - DNA, 1305 bp, Zea mays
  Peptide Sequence Number=SeqID_73921
atggagaagaacttctatagctcggagaatgcaaagatcctaggttgtgagaaagttccatcaaatgttgactgggagtgcagtttcatgtaccgtcatcagccagaatcaaacatccatgatatcctgagctgcttcgaagaggttatcaaactggctgaacagctcgcagcagccatgagtgaaaaccttgggctggacaagggctacatcgagaaggcgttttctaaaccttccgtaggcgtcaaggtggcaaagtaccccaggtgcagccatccagagcttgtaatgggtctcagggagcacactgacgctggggggatcatacttctatttcaagatgaactgatcccaggtctggagtttctgaaagacggtaggtggatggcagtacctccaacacaaggcaacatgatccttgtaaaccttggagatcagattgaagcgataaccaatggaacctacaggagcatatgccaccgggtccttcccaacaagaacgggagccgcctatccatcgcaacattctataaccctggtgccgatgccataatctgcccagcttcaaagctcacatatcctagccaatattgtttccaagactaccttgatttctattctactaccaagtttaccgataagatgcagggcgtcactgtgcagtccccctccacttcttcgcgcggaagaatccgcccgcggcaccgaccggaagcttcgcggtcgtcttctctcctgttcgaggcgcctgcgtttcggcgattcgcgacgaggcgacggcgattcgggcgcgctagcgtgccggtccccgtcggagctgtggacgacgaagtggaggtggtcagcaaggtgctccgttcaagaccgaagacgaagcgggcgcaaatccggctccgtccagcacagttccgaatggcatcctcgaaagaagacaccatgaagtctttggttaaagtacttgtcgactgtgccgaggatgccacaaaatcccttcgtggattagtagatcatgcattagaccacatgcatgacgaagagatattagctagaaccctctttgccatgaaagaaaaacttgatttgcttcaccaagatgccttagaggcaaaagtccaagcttttcctgaaattgctaagtacgagggggatgacataagtgttgaaccgacatctccttcgacccctccaacagttactgaaccatctgtcgacgaagaggagttctactgcccggatgtgagtgacgagtggtacttcagcgactcagataggtcaactcgtaatagctattggaatatttattag

SEQ ID NO: 30547 - DNA, 486 bp, Zea mays
  Peptide Sequence Number=SeqID_73922
atgcagcatccggcgcaccgattgcgtgacgcgtgggcctgggcctccatgctggcgtgtcgggagtcggagaagcgcgtccacctggcgcggttgcatgccgcctgcatggctgcccgcctctttcgcccgttggtctgggcaaaagctgagccggagctctacctcccgcgcgggttcgcgggtcaccctctcttgcggcgttcgaaggagagggcactcgctggccccgcgggcggcccggacttcgacaacgcggggctggtcgacggcgggcgtcgtcacccccagcgtgtcgagctcgtcggcctggctcccggcggccctttctgccggaaggcggctgccgcgccgtgtgcacggggggaccgcccaaggtgtcgcgcgctgctagggcggcgttcgtgttctggggtggtcctgcctttgcaccgggacgacgccttcacgcggaggccggtgccccactcgtccgggaggatttga

SEQ ID NO: 30548 - DNA, 1602 bp, Zea mays
  Peptide Sequence Number=SeqID_73923
gtacgaacaaccccactcgataggggtgggcctgcggagcaacagaagactgacgagcggctcgccgccgcccgctctgactacgacgacaacgaccgtcgctccggatggccgaactgcagcagcgcaggcctcagggtgggcgctgctgcaatcttgccctcgcccacgctgacgctcgaggggcgaggacaagggccatcagccctccggcagatccccactcaaatcctcccggacgagtggggcaccggcctccgcgtgaaggcgtcgtcccgccgccttccggcagaaagggccgccgggagccaggccgacgagctcgacacgctgggggtgacgacgcccgccgtcgaccagccccgcgttgtcgaagtccgggccgcccgcggggccagcgagtgccctctccttcgaacgccgcaagagagggtgacccgcgaacccgcgcgggaggtagagctccggctcagcctggcacccacccgagcgaggatgatgaacatccttgaagctgagggtgggaccaagatcgcatcccgacttgcttctccccacccaggagctggtggtcaccgtctcggaccaacgggcgaaagaggcgggcagccatgcaggcggcatgcaaccgcgccaggtggacgcgcttctccgactcccgacacgccagcatggaggcccaggcccacgcgtcacgcaatcggtgcgccggatgctgcatgcaagcaactgcaccgccacttgcgccaccaccgcgcctcctcgattgcggaaccaataccgcgactcgaggcgacccagcgcacgacccagcagcgccagcctgacgcggcggtcaatgcggccaaaagtgggccgacagtaatgacggtggcaggcgggcgggagcagcggtcacgtcgtcagccaagcacacgtcccacccgggggcagcaagagaaccccctctcacggcgtgaagacaacgcgcccgtgatccgttcctcgaacggctcgcgcacgcgcaacggccgccccgccaatcgctcgccccgtcgcattaactctgcggcaggacaggcggcgcttctggcggggagcagtgggcgacgcttcgccttcgccgtaataactgcgacaaaaaaggctccgagcctccctactgatcagaggttcgaaggctggccccccgaagggttcgacagccgcctcagatcgcatgggccctacacccactactggtcagaggttcgaaggtcggccccccgaagggttccacggccgcctcaggctactcgggctccgcgcccattactaatcaggggttcgaaggctggcccccgaagggttcacagtcgcctcagacgccgagcgagggatgaccaggggtacgttcgatacataaccaaggctcgggctgcgctcccgagctcaccggagacaccatgttcggcgcccatcgagggtaacatggcgctttccccccctcctccttgcggaaaggcgacgcaggggtcgtcaacataccagcccgagagcttgggccccgaccgtacacccgggctacggccagttcgcatgagggaacaaccagaccagccgaagcattacgcgaggcattaa

SEQ ID NO: 30549 - DNA, 999 bp, Zea mays
  Peptide Sequence Number=SeqID_73924
atgcagtcggcatgcaaccgcgccaagtgggcgcgccccttcgactccaacgcgcccagcatggaggcccaggcccacaagtcatgcaaccggcgccggttgctacgtgtgagcaactgcaccgccactcgcaccactaccgcgcctcctcgactgcggaaccagtaccgcgactcgaggcaaccctgcggaccgggaaagggggataccccgaaaaggatccttctccgtgaaggaaacaggccccgagcctccctactgatcagaggttcaaaggctggcccctcggaggggttcaacggccgcctcagagcacttgggttttgcgcccactactggttagaggttcgatggccggcccctcagaagggttcaacggccgcctcaggccactcgggctccgcgcccactactgatcaggggttcgtaggctggccctcgaaggggttcacagtcgcctcagacacagagcgagggatgaccctggaggacagcgccgcctgcgccgctccgactgctgagccactcgacagagtgaggctgacagcagccaagtccggcctcaagcgtcataggaaactccgcttcgcccgaccccagggctcggactcgggatcagccccggaagacgacgaactctgcttcgcccgaccccagggctcggactcgggctcagccccagaagacgacgaactccgcttcgcccgaccccagggctcggactcgggctcgacctcggaagacgacgaactccgcttcgcccgaccccagggctcggactcgggctcagccccggaagacgacgaactccgctccgcccgaccccagggctcggactcaggctcagccccggaagacgacgaactccgctccgcccgaccccagggctcggactcgggctcgaccccggaagacgacgaactccgcttcgcccgaccccagggcttggactcgggctcagcaccggaagacgacgaactccgcttcgcccgaccctag

SEQ ID NO: 30550 - DNA, 1035 bp, Zea mays
  Peptide Sequence Number=SeqID_73925
atgtcgcttggcaaaagagacatgagtcaggagcgcctgtaccaagatcgcaaggacgtgccgcccatccacttcaccacgccgccgccgccgccatcccaccaccacccccagcagcacggtagacacggtgagcagcagcagcagctggagtgcttctccgatgaggtggacagccgcgggagcgccgagcggaaggagcccgccagtggtggggcaccggtggtgccgggtggcggcgacgacggggcgagcatcgagttgtccaagaagcggaggggccggcccccggggtccaagaacaagccgaagccgcccgtggtggtcacgcgggaggcggagccggccgccgcgatgcgcccccacgtgatcgagatcccctgcggctgcgacgtggccgacgcgctcgctcgcttcgcggcacggcggaacctcgggatctgcgtgctcgcggggacgggcgccgtcgccaacgtgtcgctccgccacccgtcgcccggcgggcccgccgtcatgttccacgggcagtacgaggtcctgtccatctccgccacgttcctgccccccgccatgtccgccgtggcgccgcaggccgccgccgccgccgcgtgcctctccatctcgctggcggggccgcacgggcagatcgtcggcggcgccgtggccggcccgctgtacgccgcgtccaccgtcgtcctcgtcgcggccgccttcactaaccccaccttccaccgcctcccagcggacgacgacgcgtccgtgtccgtgtccgtctccgtctcgctctccgccggcagcggcgatccagcagacgagcaccgaggcggccaccaagaccgcagggagcagccgccgcaagagcatcgtcctctcgccgtacggcgccagcccgcgccgcaccctgcctcggcagcgcagaccgtggagccgtgcggaccaccggatgtgcccatctacgccgcttgccacccgcagccgcatgacgtgatgtggccgccgccacctcgcgcgccgcaaatgccgccgccgtactga

SEQ ID NO: 30551 - DNA, 336 bp, Zea mays
  Peptide Sequence Number=SeqID_73926
atggaacctttgtggggattagggtttcaggtcgagaaaaacagcattgttcgccccgctccggctactgtgccaaccaccagggtaaaaccgagtcacgatctcccacgagttcggcctcgggcgcaacagggagctccacctcaccggacctcaggcctcggcctcagccccggcctcgggaggaggtctccgcctcgcccgaccccaggcctcggcctcagcctcggcctcggcctcagcctcggcctcggcctcaagagaagtctccgcctcgcccgacctcagcctcggaccaactacgctacatgggatgcatcattaccctactcctag

SEQ ID NO: 30552 - DNA, 426 bp, Zea mays
  Peptide Sequence Number=SeqID_73927
atgccgcgcgaattgctgatgccatcgccctccttcccgtctcaccacacctaccttgtcaacgtaagatccttcctgctcgtcttcgccgtgggctactcgctcggcctcctgtcgtcgtccacccggccgtcaccgagaccgtcccagacgcagtggcggagacagagaaatcatgtctccgccactgcagacgacgatcgtacgaccgcgcacctcaccgacaccgcctacgcggcgaggaacgagaacgacgcggctgcgtcaaggtcgacctacccacgtccgcctccgcacgacctgttccagttcaaggaggagtgcggggagccggtgcccgacgacaccgtcgtgcagactctgctcgacaagctcttcggcggcgagagccccctacgcgggcggcgagtcttctgttattcgtga

SEQ ID NO: 30553 - DNA, 207 bp, Zea mays
  Peptide Sequence Number=SeqID_73928
atggacgccaaaaaggcgtcgaggaaagggagaaacagtgagtgggtggcggaaggctgggactacgagatgggccagacgcagatggaggaggcctgccaagtttgggcggatccatgggtgggtgggccaggcgcagatggaggcctgccaagtttggactacgaggcaggcagcctcggcttgagcgagaggcgcttggcttga

SEQ ID NO: 30554 - DNA, 375 bp, Zea mays
  Peptide Sequence Number=SeqID_73929
atggcgccgacacctgggcccgcgcaccagcctttccccgccgcatttggtcacctacagcaccacgacccccttgtccatctctcctataccaaactgagggttgccatagacagaggaaggtcgtcaccgtgttgccaccgacgtgagatcgcagaggaagacacggtgatcgccaccgattcaatcggtgtcgcggcgctaatggagccgtcgttggaaggcatcagtgggtgctctaggagttgccgaggctatcagtgcctagtcatccgcaaaggagaagcagggccccgggaatcgctcgacgaaacagcagcaccgccgcgatgctgctactctctgcaggcaaggatctccacaccaaagatctag

SEQ ID NO: 30555 - DNA, 582 bp, Zea mays
  Peptide Sequence Number=SeqID_73930
atggcttaccggagagctcggtccacgcgcggcggcgggcgaccgaagtccggcgagggcgatctcgggcttccggtgaagttctgccgggtccgaggacttggaaagcttcacaagctaatggcgaagctaaccgaggggttggtgcggcttgggcacgactggagggagttggccacggcggccgaggcttggaaagattggcgggcggtggcgcggcgtgctcggggcaaattccggcgatctctggcttgggcaagacttgtgagcatgcggggagggatggccgaggctcggggctgctttataggcacgacgcggtgcacaggcggccgtggaccagcgagcgagcgcgggcgggcgctggggagcgcggggagttgtagcatcaccaaggtgccagtgtcagaacgcctggtcccgaggtcaagctgcgccaaaaccatgtcaaatgaatttgatttgagttcaaaattttccagagtgtgttcaagggaatttggcacaactttgatatttggacttcctggttttgagtttcgaaaaacagagaacgcaaaggatctttggaaagggttctga

SEQ ID NO: 30556 - DNA, 255 bp, Zea mays
  Peptide Sequence Number=SeqID_73931
atggtccacatcgtcgagcaccaagatttcttgcccgaggacttcatggtggaggaggcggcaacctcttccacaccacgggccaccaacctccctgcgcccggtgcagctgctgatgtgcactctgcacggcagcatacgcccgcacaaacatccaggacgtctagagcagggcctggggcgctctccgcggccagagaactgctgcaccaccctcctaactccacggcctcgccgggggccatgaagcagtag

SEQ ID NO: 30557 - DNA, 255 bp, Zea mays
  Peptide Sequence Number=SeqID_73932
atgaccatcaaaaaggatgaaagcaaaaggcaaatgcattgcaaggacaagcatcgcatttgctacaattgccgtgaaaaaggtcatctattcaaggtttttccaaagggtaaaactcctaagcctaacttgtcaatacattcaaatatgcttaggagacccaaatttgactcttgtgctagaaagccacataggaaaaatgaagcacttgagaatgaacttaaaagattttaccttgctttggaaaggatctaa

SEQ ID NO: 30558 - DNA, 372 bp, Zea mays
  Peptide Sequence Number=SeqID_73933
atggtgaaaaattttggcagcgaaacagtgcaaatagcaatgaatgctgtggtaggaaggcgaagcggtggaactgtttacaccaggcgcgcagtaactcatacccgctgtgcagtggaccgcaaagaccaaacagtaactctacaaagtgggtttggcacgcgctcggaagtcggatcgtttctccgcaacgagctcagggaaggtgttttttggaccttcggcttcccgaagctgaagaggttttttttcacgggccaagctcgttacgaagaacgatctagcaccgcgaaaggggctactgttggggtcgtgcttcggtacgccgaaggtctcacacgaagaagcagcttcggccaaagtcgtttctaa

SEQ ID NO: 30559 - DNA, 375 bp, Zea mays
  Peptide Sequence Number=SeqID_73934
atggccggcttcccgaggacgcgggttacgtgccgcttctttcttgcagttggcgacaagcttttgcgcgacgcgctttcaccaaaagggtttaaagtagtagatctgagaagggcacttctcaaaatccacacaccaaaaatatataaacaaatcttccacggtatggtgagagaacgaagaacacgtataagcacaatgaacaagaacacaagagacacaagatttatcccgaggttcggtcacaccaccaaggtgccctacttcctcgttgaggcgcccacaaagagccaagactctttcaaccctaatcctccctttgccgaccacaaaggtcaagcccacacaataatctttgctcaaacgagcgggtaa

SEQ ID NO: 30560 - DNA, 1185 bp, Zea mays
  Peptide Sequence Number=SeqID_73935
atgggcgcccgctacttcgaacgcctcgagtcggccgggtccgagacgctggacgagctcctccggtcggagtcggcgctggggcggccggtgcacgtggtggtgtacgacgcgttcgcaccctgggcgcagcgcgtggcgcggcggcgcggcgccgcctgcgcggcgttcctcacgcagacgtgcgccgtggacatcgtgtacgcgcacgcgtgggccgggcgggtgccggtgccgcccctgccgctgcgccccgaggaggcgcggggcctggctctggctgggctgtcgacccagctcgaggtggacgacatgccgacgttcttgggcgacaccaggtttccaccgtgcttccgggagctgctgatgaaccagttcctggggctggacaccgccgaccacgtgctcgtcaactcgttctacgacctggagccgcaggaagcggactacctggcgtctacgtggagagccaagatggtggggccgaccgtcccgtcggcgttcctcgacaaccgcctcccggacgacgtgtcctacggcatccacctgcacgccccaatggcggcagaaagcaaggcgtggctggacgcccagcaggcggggtccgtcctgtacgtgtccttcggcagcatggcgtcgctgagcccggagcagatgggcgagatagccgagggcctctacggcagcggcaagcccttcctgtgggtcgtccgggccacggaggccgccaaggtacccaaaggcttcgccgacagggcccaggccaccagggggctcctggtgtcgtggtgcccgcagctggaggtcctggcgcaccccgccgtcggctgcttcttcacgcactgcggctggaactcgacggtggaggcgctcagcgccggcgtgcccatggtggcgatgcccgactggtcggaccagacgaccaacgccaagtacatacaggacgtgtggcgcgtcggcgtgcgggtgcgcccggacggccggggcgtggtgaggagcgaggaggtggagcggtgcgtgcgggacgtcatggagggggagatgggcgaggagtttagggccagggcttcgcactggagcagcaaggccaggaaggccatgggcgagggcggtagctcggacgtcgccatctccaactttctatcctgttttggacactccgctcacgttaccgctgccaactga

SEQ ID NO: 30561 - DNA, 210 bp, Zea mays
  Peptide Sequence Number=SeqID_73936
atgaaggtggtgatgagaatgatggttttggtattgactttggtaatggttgtccgtgttgcaaccactgctcaggagaagatgaagccgtggaggaagatttccaggagttccaagattacgacgagttctaggtgtgggttagcgacaacccccagtcggctgcttgtgaaggccgcgtgtatctacgtttcgtttttcgcactttga

SEQ ID NO: 30562 - DNA, 465 bp, Zea mays
  Peptide Sequence Number=SeqID_73937
atgtgccttgttatcgagcctggagacggggagcggcgcctcgtagacggagtggttgatgcactcgttgaggaggaagcgcgagaggacgcggccgtcggcggtgaggccggcgagcgcgaccccagcgtgctcagtgacgcggaacaccttccgttggtaggagagatcagagctcagcaggtcaacgctagaccaaggccgaggccagcccatgggaagagaccacatggccagatcccggtggaggaggcgacgttggtgggcgcgtcgccaggggccttgacgaaggcactcgactcggccagcgatagtcccgccacgtcgggagaggagggatccgagggggcgattcggcgtacacaggtgagaggaggaagatgcgtgaggcagttattggatggggagggggatggtagagacggcggtggagaagatgaaggcaacgacagcgggtatgtctag

SEQ ID NO: 30563 - DNA, 204 bp, Zea mays
  Peptide Sequence Number=SeqID_73938
atgacgggagaccaagtaagcagcaaggccgaccgagccgagggactcctacgcctccgggatacagatacctcactcatcgccttccgcgaaaagaatgaacaacctccacaccaggaggcctgcgggataacaaactccaggtggctcgccagcgaccactgcaccagcagcgcgacaacgacctccgtctcgggcggctag

SEQ ID NO: 30564 - DNA, 405 bp, Zea mays
  Peptide Sequence Number=SeqID_73939
atgatgaccagccttatggtggggagaagcaagccgggctgcggcctctgccccaccctcagcttcaaggatgttcatcatccgggctggggaggagggcacgccgagttgggtcctgcctccgcatgggccggtggcccgcttcttcctccagcattcgggggagaagggcatccttcagctctgcggaggaggcgtcctccagccatacaggggaaggcgaactgctgctgcctggtcagggtgcagctctccgtcctccatccagacgacggtcgtaccgtgcgcaggtggctgctgtcgccggtgctgaagcggtggccgccgatggtgatgcttcccaccgcagtggtggttgcttccgccgacgagaccgtcagtgccacctgcgctccgggcctctag

SEQ ID NO: 30565 - DNA, 513 bp, Zea mays
  Peptide Sequence Number=SeqID_73940
atgtccggtgcaccagccacgtcaccaaagccgttggaatttgaccgttggagttctgacttctgggcccgtctggatgtccggtgcacaccggacatgtactgttcaatgtccggtgcgccagtatgggcgtgcctgacttctgcgcgcttctggcgcgcattgaatgcacctgcaggtgatcgttggcgcgaagtagccgttgctccggagttgcaccggacagtccggtgtacaccagacagtccggtgaattatagcggagcagccgttctgattttcccgaggctgccaagttccagagccgcgtccctttggcgcaccggacactgtccggtgaattatagcgcgccggctctgaaaattcccgaagctgaggagttcagcgcggagtcccctggtgcaccggacagcgtagtcggtccgaggcccaggttgggcgaggcggagacttctcctgaggccgaggctgggctcgggcaaggttgtgacgccttccgaggccgaggctga

SEQ ID NO: 30566 - DNA, 633 bp, Zea mays
  Peptide Sequence Number=SeqID_73941
atggccatggttgccccgtctcctcctcctccggcgaggagggtggcggggcaaacccgagtgttcctcttctgccacggggggaagtcgtcgtcaagttcgccgctgccgggcgagccgacgaccgttgttgctgtcgcgctgcgaggggaggagtaccatgtcgtagctgccgtcaagggacatgaacttgagacccccgaagcggagcaccgtccccggctgaagaggctgctggaggctacccatctggaactcaacgggaaagcgtttgttaacacgcagcgagcccctacctggcgcgccaactgtcggcgttttggacccgcgaggaccgtcaaccgaccagaggttgagagcaatccgacgtcatgggcgcacgtggggaaccatcattacctgttaccggagttgggcgaggcagagacttctcctgaggccgaggctaggctcgagcaaggttgtgacgcctcccgaggccgaggcctagggtcgggcgaggcggagatcttcttccgaggtcgaggctggggccgaggcctgaggttgggcgaggtggagcttcctgttgcgcccgaggccgaacttgtgggagatcgtgactcagttttatcctggtggttggcacggtag

SEQ ID NO: 30567 - DNA, 600 bp, Zea mays
  Peptide Sequence Number=SeqID_73942
atgtcatcccttaagcatggtccatattccaaaaactcccaaaatactcttgttccatattctgcctataactctcctgttcatactaagtcagacgattcattcgtcactattctcaccaacagtgaacttcactgtgctacaccacatacacccagctaccctctccctctccacacacactcaacaccctcagccaaggcaaacaccccacccactcagttaatccgctctgccggctacacgcatagtgtcgctttgcctccagtccaccctcttgtcactcaatccaaactcgtacgatccaaccccagggttatgaaggctggagagcaccggaaggataaggagggggaatgttttgtccggtttggacatggcggtggcctgactccttccggtataaccgttaaggtctggctgttgaaccgtgagctatggtggacgggaagtacagtagctgtttttggaaatgaaaaccagtgggaaactgctgagatacctggatggtttagtccaggggattttgttataatactgaaaaacttcctgctccttttggagaggatgcgctttgcaaaaaaaaaggagatcgggtaa

SEQ ID NO: 30568 - DNA, 468 bp, Zea mays
  Peptide Sequence Number=SeqID_73943
atgggcaagaacaacaagcgcaagcgtgagccaactcctccatcggaggagtttggtgactcggagtactcagaggaggagttctcctctgagtctgaggggtctccggctcccgtccccctgcgtgagtcgtctgacgactcagacgactcccaggggcttgcggcggaggtctggacgtatatccgggccgtcgagcgctccaagctcgagggctcggatgagtcggagtactcctcggatgaggaggactcggacggcggtggcgaggacgaggacgacggcgacgacggcgacgacgacgacgatggcgacggtgacggtgacggcagcggcagcggcaggggcaacggcggtgacagcaaggacggtgacggcggcggcagcaggggcagcaaccggggcggcagcagtaggggcagcaccaggggcggcggcggcggcagcagcaacagggccagtggctag

SEQ ID NO: 30569 - DNA, 1050 bp, Zea mays
  Peptide Sequence Number=SeqID_73944
atggcaggcgcgcgtgagtcggggcagtggaatgtggtgtgggcgtgccgtgtgcgtgcgggctgccctgacatgaatcgtagtttggagcaatttcgaatatctattttcctgaggaacaagggaaggttgacaagggaattgatcgagaggttcccaggaatttaccattccattcagacttctgacccaataccagagaatagcacagataatacttggaaaaactttaagaattgtttgggtgcattagacggaaccgctatcaagtacttgaagctcacctcactgaaaagctacctgattcaagaatttcggcaactcctcatatcgattccagggttaagatacttcaagacaaagtattctgctttggagcagatgttgaacaagagtgggttcacatgggatccgaccaagaagatgattcagtgcgagaaacaacaatatgagacacattgcaagaataatccagatgcaaaagggttgtatggagtctcctttccttactatgatgaactctcaatggtatattccaaggacatggccataggtgaaggtgcggaagacatgacagatgttgttaaaaacttggaagaagagttagtttgtgtaaatgttaatgatgaagaggttggagaggatatgacatctgtagagacactgaggcgttctgttgactcaacatcatctagctccaagaaacgaaagaaagagtggaaaggaatgaagaccgcatcaagtgacccgcttcttgacgtgttcaatgaagtgagtggtgatctgaaggttgccaccatgtcaattggaaaaatgtcgcaagatatggatcgtcaggcatccaaccaagagaaggcaagggatgaggatccacaacaaaagctaagagagaaggcgatcaatgaggtccgaagacttgaatttactggctcagaagttatcaaagcagctgttgtgttcgtcaggatgccagatcaaatggggatgttgtttgcacttccagaaccactgaggagggaatacattgtcgacatgctacgtggtaactag

SEQ ID NO: 30570 - DNA, 423 bp, Zea mays
  Peptide Sequence Number=SeqID_73945
atggaacaggggcaacgccggcgagctgaagagggcgtgttcccaccggcatatggcgcccagcctgtcatgtacaatactcaacctggagcatcaccgcacggttacatgcatcctgctggtccacagtatgggcaacaaatgacgattggggggcagactcgtccagtttattattatgcgcctatggaagtcgctgcaatccccacaagtgggattttgaccagcaaaaaccgctattacaatggaaaaaactggtcctgttgtgttgctcggattggttggacaaaaaagcgcaccgactttgtgttgctcggattgcctggtcaaaatgctcttcattgtcctgtatcagtgttgctcggaagcaggttcactggaatttcatattatttttgtcagactattgatgttgtaaattga

SEQ ID NO: 30571 - DNA, 558 bp, Zea mays
  Peptide Sequence Number=SeqID_73946
atggaggacgtttacagaaaaggaagaaaagggagggggggacaagaaatagcgtccacagcccacggtcacggtggcaccaacccaccaaggccaagcccgtggcgtggtcactggtcggctaccgctttgcagctggcgcgcggctttcacgagcagctccagcgcaggctcagcccgcccacgcggcgtacccgcggaccggcccgcccgccgaagcccgaacccggcaaggaaaaactaacacctcacgccgtcgcatctcacggcctgtcccgattcattcggatttccttccgccttccgacagcggctgtctcggcgacccaaccccagcctgaccccacctcccgccgccgccgccgccgccgccgccgcgccttcgtcgtcaggagcagggtcccggtggctgcgtctctctcccctgcccccctgctccacactcggttcacgcgtcggctcgctaccgcaggccctcgactcgattcgagacgggcggtgcgtgtatccgcgctcggtcgcctgctcgagatcgtagaccgaggtgcgatggattag

SEQ ID NO: 30572 - DNA, 1232 bp, Zea mays
  Peptide Sequence Number=SeqID_73947
ccgtcgcggacttagtcttcaccaacacgctccaatgtcttccccctatgacacgggggctgggtcccacgcatcatgcaagctggcccaggatagaagaggccaaaccgccgcgcgcggtgcgtgtgactgcccagcggttacaagcgctcctccactttcgcccagaccagcgggtgaaagggcggaccgccatgcaggcggcatgcaaccgcaccaagggtgagcaccctttcgactccgacgcgtccagcatgggggctcaggcccacacgtcatgtaaccggcgcgccggttactacgtgcgagaagctgcaccgccacttgcgccagtaccgcgccttctctactgcggaaccagtgccgcgactcgaggcgatcctacacatggcccaacagtgccaaccgagcacatcgatcacaggtcagtcagccgcgggagaaggcgcggcggtcaatatggccaaaagtgggccgggagtaatggcggcgacaggcgggcggaagtagcggtcgagtcgtctgcaggctcacgtcccctcctgggacagcaagagagccctctcccatggcgtgaagacgacgcgcccgtgttccgttcctcgaacggctcgcacacgcacaacggctgccccgcgaaccacacgtcccatcgcattaactctgcggcagggcaggcggcacctttggcaggcgaagcaggcgacgcttacctccgccataatgaccgcgtcaaaagagggaccgggaaagggtatactccgaaagggatccttctccacgaaggaagcgggccccgagcccccctactgattagaggttcgaaggctggcccctcggaagggtttgacagctgcctcagagcactcgggctccgcgcccaccactggtcagaggttcgaatgctggcccctcggatgggttcgacagccgcctcaggccactcgggctccgcgcccactactgatcaggggttcgtaagctggcccccgaagggttcgacagccgccttagagcacgtagagcgagggatgactctgggtacgtccgatacatggccgaggcttgggctatgctcccgaggtaccctagaacatttccgagaccagcaggagcgattctgtaacggaatcccatcagagggaggcatcgagccctcggaccctatcaaatgggaccgggtccggcaaatcacctgctggtacttttggagcgcgcctctaggccactag

SEQ ID NO: 30573 - DNA, 609 bp, Zea mays
  Peptide Sequence Number=SeqID_73948
atggagtttgttcaccactcctcaagtgtttatcaagaactgaagctaggacagagccaacttcccacccccatatctctcaaacccgaccacatctccccttggaactcacatgaactaggggatagaacaagagcagaaacaaacctccacgtgttcgacgtgcactgcgctagcgagagcacgcccgacgcccgcccccgcgtgccccgcatcgcgccaagccaggccggcgccgttgcccgggcctataaagccaccagaggcttcgaccgtactcccccgcatgccctcgacctcaccggagcactagatcaccagcgttgccccgcgcacggcgtgcccgcggccacccgatcccccgcaaccttcacggtcgccggacttcactcgaccatcggcaagcgtagaccgagcgccacggccggagcactcgccgccgacgagttcacccacctgcgtacgtggaccggccgattccggcccaccaccgccatcgagcggtacctcgctgtgaccgcaagaacctcccggagccaaccccacccttcaccggaccaccctcgccgccggcgactcaaaggaatagtggcgcaggggtataaatga

SEQ ID NO: 30574 - DNA, 318 bp, Zea mays
  Peptide Sequence Number=SeqID_73949
atggccggaatcgcccggtctatgagcgcaggcgggatgttctcgtcggtggcgagtgtatcggccaaaccacggcgatctggttcaatccaagggcacgggttttgggagatagggtttaagagaggtctagggttcttctctcctcttatccaaggtagcgaagtggggtccgaccctccagaaaacgtagctccggaagaagggcaggagcccgacctcttggaaatagagcttttgtgccaagagagtttcgacgaaggcaagtccattctacccttgatgtataaattacctactctttctaccactacttaa

SEQ ID NO: 30575 - DNA, 333 bp, Zea mays
  Peptide Sequence Number=SeqID_73950
atggcacccaagagagctagctcgaaggcagccccatctgttgacgaagcagcgaaggcagcgctgctggctgagaaaaagggcaaggcccttgcagacaccacccaccaaggagcctgcgaagacgacacactcagcaagaggcagcgcaacgaacaacctacacccgaaggtagtctccgcacctgcagctccggagggcaaccgcaacctcccccaggcttcgctccaccggagggagtggacgccactgaggatggcaaagtcatcggcgtttcagcagaggaacaactacagttgtgggccttgcgcatcaagaactgcaacctctag

SEQ ID NO: 30576 - DNA, 381 bp, Zea mays
  Peptide Sequence Number=SeqID_73951
atgggaaaaggaaaaagagaaaaggaaaaagagaagagatttccggttaatcgggccgggggcgattttggctcagccgagcgagggcacgcacatgtccgcgcgggcagccgacccagacgacccatgagcgaggagacggcacgggcgggcacggggacggcactcttaggacgaccgatctacggtgatgtggcgggcttccacggtggcgaggtcgccggcgaggccactgggcgcgataggggaaaaagaatggtgcgctgtgtttgtggtgaagtggtgaagtttgtgaaccacttcaatttgactctaagatactggagagggaaggaagagctcacaggagcgaaggaaggcgatggcaccgagctcgattga

SEQ ID NO: 30577 - DNA, 123 bp, Zea mays
  Peptide Sequence Number=SeqID_73952
atgaagctgtggaaggagacttccaggagttccaagactacgacgagttctaggtgtggaactatatggacgtctcagacgtacgatgtaatcgactattattcccttttaatactattttga

SEQ ID NO: 30578 - DNA, 1208 bp, Zea mays
  Peptide Sequence Number=SeqID_73953
atgaaggacacaagcaagcccacacgggcgtcgcgctcagtcgggaaactcctgtatgtggttcatatgtttctcttcgtctccttgggatttgtcctaggcatggcgtccatatccaagtttccaaacatgatctacacccctttcgttgcatcattgccctttccaacgccgccgccgccgccgcctacgccgtctccgccgcgtccaccgcctctaccagcaacgccattgctgccagcaccacggaacctaggaagaatggggctgatggacttgcttgcaccaagcggcgttatccacaacatgaccgacgaggagctattctggagggcgtctatggcgccgaagggacatcgcacgccttaccaccgtgtgcccaagatcgctttcttgttcctggtgagaggggagctgccactgcggcctctgtgggagaagttcttcgcggggaacgaccaagagctctactccatctacgtgcaccctgatccatcctacaccggctcgccgcccagggactccgtgttctacggccgcatgatcccaagcaaggaaacgaagtgggggcacgtgagcctggtggaggcagagagccggctgctggcgagcgcgctcctggaccacagcaacgagcgcttcgtgctgctgtccgaggcgtgcatccccgtctacaacttctccaccgtctacgccttcctcgccggctccgccaccagcttcgtggacagctacgggaacggcgactgccgcgcgcgctacgacaggttcttcgccgagcgcaccaacatcacgatcgagcactggcgcaagggcgcgcagtggttcgagatggaccgggccctggcgctcgaggtcgtcggcgacgagccctacatccagatgttccgcgacttctgcgtcgggcggtggcgctgcctcaccgacgagcactacctgccgacgctgctcaacctgctggggtgggcgcgcaacgccaaccggagcctcacgtacgcggactggaagcggccgcaggggatgcacccgcacacccacgacggggcggaggtgacggaggagctgctcaacaggatcagggaggacggcggcaaccgctgcttctacaacggcgcccgcgccgggatctgcagcctgtttgcgcgcaagttctcgccggacacgctccagccgctgctgcgcttggctcccaaggtcatgggctttgg

SEQ ID NO: 30579 - DNA, 1836 bp, Zea mays
  Peptide Sequence Number=SeqID_73954
atgacgaactccaagcggctcaccggcaaccgctccagcagcagcgacaacgacctccgtctcgggcggctagacagctgcagcaacagcttcagggcaaacactgcggcggaaaagcccttgcccacgaaggacgagaaccagccattcaagccaaagagacggaggtccggggtgcaggcggcgctggcggtctcgtcggcagagacaacctcatccggctgccaccacctcagcgccgacggccacctgctcaccaacgtcgcaccgacgtacgacgtccgcttcgaaagcgcaccggcaggtcctcgctctcgtccttgccacaagaacgagaacggggccgtcccagaacacgaacgccgccctcgcggcgtacgacgtgttggacgaccccccccaacagccggcggcgcagcgaggattggtagtggggggcgacaccggaagcagcgccagagccgctcgtgccggggagccaagcgcgcggcagctgccaagcaccacaggccacctcctcgcttgcaccccttagcgtcacgggcgaaatcaccactgacatcctccagggttctccccccacgacacgggggctgggacccatacgtcatacaagctgatccgaagcacgaagaaggcgaaccgctgcacgcgaggcatgtaaccgttccgcggttacaagcgctctcccatcctcgtagaaatcggtggtcgaaagggtggaccaccacgcgacaggcatccaactgcaccgcaactgtgcgccccttcggctccatccacatctggtggaccagcgcaaaggaagcaggcctgcatgtcatggaccgggaaaggggacgttgtggaaaggatccttctcagcggaggaagcgggccccgagcccccctactgatcaggggttcgatggctggcccctcggaaaggtttcgatagccgccccagagcactcggacttcaagcccattactgatcaggggttcaaaggctggcccctcggaagggttcgacagccgccccagagcgcccgggctccgtgcccactactgatcaagggcttcattgtgaagcaaccttggccataccgcctcaccaaccgaccacttcgcaggcgcattaaatgcaggggatgcctgacgccgtatcctgacacacgcgcctcagtcggccaggccgaagtgaccgcattcacttcgcccctcttctttgctgtccgatatgacaggaaaacagcgccgctcgctccgctccgactgccgtgtcagccaccccggcaacgactgacaacaagtcacgatcaaccaccgagttcaagcctcgggtgcaacaggaagctccgcctcgcccgacctcacgctccggcctcaggaggaggtctccgcctcgcccgacctcaggctccggcctcgggaggaggtctccgcctcgcccgacccccggtctcgggaggaatcgcgtcctcgcctgaccccggcctcggcctcaagagaagtctccgcctcgaccgaccctgggctcggactgaccgcgctaataggggatgcatcatttccctattcctagtctgctcaggctacaaggaacaagaccggcgtcccatctggcttaccccggcgacgggactcaggcgctcctccagcggccacgccatcacatgtacagcgcccaagctctcccccaacggccacgttggcatggccaccctgagggaggttcgcgcgagggaggcggcggacgagctttgtgtccctctctctcacgcgacgcgcttcgacaattcactcgtcggtccagggaccccccagggtcgaaacgccgacacaaacatcacctaa

SEQ ID NO: 30580 - DNA, 294 bp, Zea mays
  Peptide Sequence Number=SeqID_73955
atggagtacagcccttcgtgccccgcgagcaacttctgccacaacggccgcagcggcaggtcctcttggccctctcgccaggaacaagaaagcaaccttgggcgtcgtggatgcccaccacagcagctcctcgcctgtcatgttgcgcatgacgctgcgcggctccaggaaacgtgccaatcctacttttatggatcagggttttggggccgggtggcagcggcgccggagttggcgacgatggcgcgaccgagggggagtagaaggttgggaacctggagttgtaggttgtag

SEQ ID NO: 30581 - DNA, 297 bp, Zea mays
  Peptide Sequence Number=SeqID_73956
atggcttccccctcgtacaggcttgcggcggcgatcacggccccctcgaccggcgagttcctcgtcgtccggcagccgcgcccgccatccccacccgaggaggaagaggattaccggcgcttcgtcgacagcgatctctacgacctcccgtccgcgcccctcgggccactcgagggggcaccccggtcggaggtggccatcggcggcgcggactctgtcgccagccgcctcgacctctcgcgcctcgacgtgtccgccgcccttgatcagttggtacccgtggctacagttggttag

SEQ ID NO: 30582 - DNA, 189 bp, Zea mays
  Peptide Sequence Number=SeqID_73957
atggggtccaggcacagtgcttgctctatcgaggctgggtgccgagatgatgacgaggaggatggttatgattatgcttatggtaatggtaagtggtattctttccgtttggaaagggtaaagaagaaggagaacggtgtcgaggtggatctccaggagttccaggacgtcgatgagtttgaggattag

SEQ ID NO: 30583 - DNA, 574 bp, Zea mays
  Peptide Sequence Number=SeqID_73958
cctgcccatgcgaggagggtgctagcgaactgggccctcggccatagagcagagaggatgctgaccggagctcgaatggcatctagccagcgcgcgcagggggagatggtgagctgcacaaaaaaaaggggaaactcgatctgggaggatggcggccagatgggactgctcgagggaatccacggcaaggtggggatggccggacttgagaagggcaggaagccatatgggagagggagcgtacgtgcaggaagcgaacaaggagcccaggccatggggcgagctcacctgctcgagctcggacctagagaaatgccctgcgctaggagcctggggagggggatgctgtgcaggttgccggccagaggtaagactgaggagaagttgcacccatggcgccgcttacccagagttggccgagcagaagaggggcggctggccatggagttcctgctaggcaccatggaaaggggagcagaggtgctgcacggcagaaggatgaaggagagcgtggggaggaagaggaggctgttggtggcggctaggggtgggaatgaaaatttcccaaatgcaa

SEQ ID NO: 30584 - DNA, 639 bp, Zea mays
  Peptide Sequence Number=SeqID_73959
atggcgagatttgcacgtttgcgatctctggaagcgtttgaacattggaagaaactcactgccacgtgttcgacgccttctgcccgcgccagagcacgctcgcgcgcgccctcgcatgccccgcgccgcgcccgagcttataaatccctcccaggcttcggctacacccttccgcacaccctccacacctcaccggagttagctcgtcgccgtttgcccgtgcgcagcgagcccgcggccgcccaacccctctgccaccgtagaccggccagcagagccatccccaaccccgtcctgccctcggagaagcttgtgcacacctctgtgaagctccccgagcaaggaatcggagttcccttcaccggagaagccagtccgcgctcgccggagctctcacccccgccggagcacgtggaccggtgtaaactaagtaagatccctgttgttttaataaaacaagtgaaacttagaaaaactctacaaaaatggccccaagactgtaatcttgctgacgaagagtacatcctcgtgccggagcaaggagctgctcaggaggtagccccagatccagcacccgagcctgcaccagaggacctgcctgccactgctttggaaggcaagccccggttttatgcataa

SEQ ID NO: 30585 - DNA, 246 bp, Zea mays
  Peptide Sequence Number=SeqID_73960
atgaaggatgccaagcccatcaagacacccttgggaactaatgggcatctcgacctcgacatgggagacataaacagaaatatcgttgaattacaagtgtaccttcaattggaaggagatgacagtacaagcgtgacacaaaaagtgaatgccaagtcagcgtgtccagtacgggggtactgttcacctatttataggcgcgggacacaacccacacaaaattacattcatgccctttacacttga

SEQ ID NO: 30586 - DNA, 618 bp, Zea mays
  Peptide Sequence Number=SeqID_73961
atgaggtcccccatgtttgacgttggacaacatggtgcagccgctctggactacgtccaagcggcgactgcgccggagcttgccgaatacagcggcgcatgcaaccacgtaggactgcttccagaggtcgaactggcagtcgccaagcttcttcttgtcgttgatgagcgacgccaacacgagcgcctcctgctagtggtgtttgttcaggctaggcgtgtgtcggggaccataattaggggtacccccaagactcctaaatctcagctggtaacccccatcagcacaaagctgcaaaggcctgatggggaagagcggctctggaactcgccagcctcgggaatttgctccgctataattcaccggacatgtccggtgtacaccgaactgtccggtgaaccagcagagcaacggctattcgacgccaacggtcacctactacagcatttaatgcgcgccagaagcgcgcagaagtcaggcacacgcgagacggtgcaccagacaatctacagtacttgtccggtgtacaccggacagccaggcgggcccagaagtcagaagctccaacggtcgaatcccaacggcctggtgacgtggctggcgcaccggacatgtccg

SEQ ID NO: 30587 - DNA, 144 bp, Zea mays
  Peptide Sequence Number=SeqID_73962
atgtcgcacgcgttcgacgactactatatcaaggactgtggcgtcatctcgatgccagaggtgtggcacatgctctccaatgatgagaccatgcaaatcgtggcatatatcgaagtctgcatgatacagatggttgcaatgtag

SEQ ID NO: 30588 - DNA, 303 bp, Zea mays
  Peptide Sequence Number=SeqID_73963
atgagcaagaacacaaaagacacaagatttatcccgaggttcggtcacaccaccaaggtgccctacttcctcgttaaggcgcccacaaagagccgggtctctttcaaccctaatcctccctttgccgaccacaaaggtcaagcccacacaataatctttgctcaaacgagcggctcgaatcaagaagagcaagaaggatttagagatgaagcaccaaaatcgcagctcttcaatctcactcaaagatttctctccaaagatttgaaatgggagaggcaagagattttgagaaaactgaagtga

SEQ ID NO: 30589 - DNA, 285 bp, Zea mays
  Peptide Sequence Number=SeqID_73964
atggggagcctacttgatgtagactcttctttcttctcttctgtcgctttgaatgcgacgggttgcacctcgggtgtggaggtcactacaccaaaatcatacacttcctacgattttttaactgcctacatcttttataacaaactatccatcattagggatgaagttcttgtaatggtggccactatagcttttgggatgggtattgataagcctgatgttagatgtgtaatacactatggatgtccaaagagcctagagtcttactaccaggaaagtgggtga

SEQ ID NO: 30590 - DNA, 447 bp, Zea mays
  Peptide Sequence Number=SeqID_73965
atgggccaaagcgggcacccatccctcggccatgacctcgaccatgaccacgtggcgtgggagatccgggcccaggggagggacgcgaggcaccggcagcagaaagagatgaagatctctggcttcatctttggtgggttgccgaaaatcatgaattttgatcttgtccccagaaatgtcattatcagagaatccaagaataatgggctgatgtttcttggcaagaattaccgagttgtaaaaatccacatgctggagagtccagaaccgattcccatcaatcctggcatcatgaatgcgcaatgcaggattccgaaagcggatgtcctggagaagtgcagaacccccgctggcagtaaaatccgtaattggctcattgccagaatgacgggcctccgcccagtggaggaccaaccctcgaataataggagcgtgggcagaggaaag

SEQ ID NO: 30591 - DNA, 522 bp, Zea mays
  Peptide Sequence Number=SeqID_73966
atggaatgtccgtatgagacggaatgcactgttacgcgtactgaagtctactattcacattggccatgcaatcagttaattagaaaagtaaaacctttacaaatacatagatccttcattagggatgaagttcttgtaatggtggcaactatagcttttgggatgggtattgataagcctgatgttagatgtgtaatacactatggatgtccaaagagcctagagtcttactaccaggaaagtgggaaacctagaggaaagcaatcatggattccttcatggcagcacaaaaatattgcttccttgctacatgtcgtaggaggttcttattgcaatattttggtgaagaatggaacattgactgtggccaagaagattgttgacaacaattatgataaactacaaatgcatgggtgtggtaaagattattcgtcaaactggtggaaagcacttggtggtcttcttatagcacatggtactaatgttgacctctctaaccattctattattcttattatttga

SEQ ID NO: 30592 - DNA, 339 bp, Zea mays
  Peptide Sequence Number=SeqID_73967
atggagctcaccggagcgacggggaagtgcgacggcactagctcgattggctcggggagaagcggaggagatggccggagctggtgtggagagaacggggctcgggcagctccttctataggcgcccagaagagggatggaggggacggtgagcaccgacgagctcgccatgatggcgggaatggagcaaacggcgattgggacggctcgggcaggcgaggggtgaggggatggctcgggtacagtggcggggtaatcaccgaggccggtgcgagccttaatggcgaggcgatggggcgtgaggcgctcggcggcgaacgcaccgatgatcttgaatga

SEQ ID NO: 30593 - DNA, 108 bp, Zea mays
  Peptide Sequence Number=SeqID_73968
atggcgggcggaagagagctcgccggagctaaggaggggcgtctagtcggcgaaggatttgagctagggatcaaggtgaacacgctcggtcttaggctcaagggctga

SEQ ID NO: 30594 - DNA, 384 bp, Zea mays
  Peptide Sequence Number=SeqID_73969
atgtgcttgagtttgcttgttttagtctcaaaggaggttgaaagggaaaaggtggacttggaccatgaaagacttccactgcactccgatgagaggtgtctaacacaagtgcttaaatgtaaaatggtggacaaagtacaaaccaaggataaagccaagtctgctcagtctaggagcaccggactgtccggtggtgcaccggactgtccggtgcgccaggctggctcgagcaaactggccgctctcgggaatttaccggcgacgtacgactataattcaccggactgtccggtgtgcaccggactgtccggtgagccaacgggcggccgggccaacggtcggccgcgcgatctgcgcgggacacgtggccgagccaacggctag

SEQ ID NO: 30595 - DNA, 609 bp, Zea mays
  Peptide Sequence Number=SeqID_73970
atgagactccacggcggggcggtaccgggcaaggacgttggtcaagcggggaggacggggcggtgccgaactcttcctgtgcggcgatgggacggcgatggaggggacggcatttcttggttttgggacttttctgatcctcaggatgatgcaaggctgctacactgtgatatggtgttgctcgacgaagagggaaataacatacatgctacgacatacccacccttcatagagaaattcaggccactcataaaagaaggcagcgtgtacaacatgacatactttcgagttcgagcatcgaacagcttgtacaagccagttctaaatgatatcatgattaccttcacgaattgggcaaagttagagcaggatattgagattcctcctgcatttcctacacttacctactccctcactcacatagagcagatccattcgcgcatcaaccataaagactactatacagatgccattgggatagttacttcagtctcgaatgtttcgccacatcgctccaaaggacaacaagcttccagcttgaagaggaacatttccatatgcagtgcaaggtttggactacatggttgttcttaccttgtgttctgctag

SEQ ID NO: 30596 - DNA, 375 bp, Zea mays
  Peptide Sequence Number=SeqID_73971
atggggatctcctggtatcaaccacgtgtgcatcctcatcacgactcgaccgcagctgggtcgcaagtcttcaaagcatcgcttggcgggaaggtctccggggtgaacagaaatcgctcaccgcggtgtgcatcggtctcacacccgtgccttgttgtggatctgtcgctgcgcgtcgtctctgtaaatctcgacctcaccggcgtgccccagaacacgttaaaagggtggccagccatgtcaaccaccatcgggctctgggcgccgccaccctgggtgctcacgccaccacagttcgtcttggggaagaagaagctcgcgaaccgcatgctcggtgatgaacggctgtggtgggtgatgggctcgtggccatag

SEQ ID NO: 30597 - DNA, 1332 bp, Zea mays
  Peptide Sequence Number=SeqID_73972
atggagtggctggatgagtacgagaagctggtgatccggatgaacacgccgcgggtggtcatcgacaatgccgtctgccccacggccacgctggtgcaggtggacagcgccaggaagcgagggctgctgctggaggcggtgcaggtgctggccgacctggacctgtccatcaacaaggcctacatctcctccgacgggcgctggttcatggacgtcttccacgtgaccgaccgcctgggccgcaagctcaccgacgccagcgtcatcgcctacatccagcagtccctgggcacgtgggtcgagccggcggcggcggcgccccccgaggggctgacggcgctggagctgacggggcccgggcgcgcgggcctgctctccgaggtgttcgccgtgctggccgacatgcagtgcggcgtggcggacgcccgcgcgtgggcgcaccgcggccgcctcgcctgcgtcgcccacctccgcgcggacgaccctgccgacggcgacggcgacggccgtgtatctcgcatcctggcgcgcctgagccacctgcttcgcggcgacggcgtggttgccccgggcgccgtggccgccgtgccggcctccggcgtcgcgcacgccgaccgccgcctgcaccagctcatgtccgccgacctgcaccgcgcggcgccggtccctgtcccggtcccggccctggcgcccgccgtgtccgtgcagagctgggccgagcgcgggtactccgttgtcaccgtgcagtgcggcgaccggcccaagctgctgttcgacgtggcgtgcacgctccacgacatggactacgtcgtgttccacggcaccgtggacaccgcggcggggcgcgcgcgccaggagttctacatccggcgcgccgacggcagccccatccggtccgaggccgagcgcgagatgctcacccaccacctccaggccgccatcgagcggaggtcgctggagggcgtgaggctggagctgtgcgcgccggaccgggcgggcctgctgtcggaggtgacgcggacgttccgcgagaacgggctgctggtggcgcaggcggaggtgtcgacgaagggcgaccaggcgtgcaacgtgttctacgtgacggacgccgccggcaaggcgccggaccggggcgccatcgacgccgtcagggagagggttggcgcggaccgcctcgtggtgagcgaggagccccgcccgccgcagcagcagctgtacccggacgcctccgggccaggcagcggcggcggcggtggcctcgggctggtatacctcggcaacctcgtgaggaggaacctgtacaacctcggcctcatcaagtcgtgctcgtga

SEQ ID NO: 30598 - DNA, 1380 bp, Zea mays
  Peptide Sequence Number=SeqID_73973
atggaggtccaggcccacgcgtcatgcaaccggcgcgccgcatgcttcgtgcatacaactgcaccgccacttgcgccaccaccgcgcctcctcgactgcggaaccaataccggaccgggaaagggggataccccgaaaaggatccttccccgtgaaggaaccaggctccgagcctccctactgatcagaggttcgaaggctggcccctcggaagggttcgacagccgcctcagatcgcgtgggctctacacccactactggtcagaggttcgaaggccggcccctcggaagggttcaacggccgcctcaggctactcgggctccgcgcccactactgatcaggggttcgaaggctggcccccgaagggacatttccgagaccagcgggaacgatcttgtaatggaatcccatcggagggaggcatcgagccctcggaccccgtcgccaggggaccgggtccggcagatcacccgcagaggctcgggggctactctcgcaaacccggctccgaccaaaccgttgacagcgtcaacataccagcccgagaacttgggacccgaccgtacacccgggctacgaccagctcgcatgagggaacgaccagaccagccaaagcattacgcgaggcattaagacctcggaggagtcaaaccactcctccgaggcctcgggggctacacccggcgggtgcgctcgcgcgcacccaccggaacaaaacgcaaccgagaaaggctggtccccttgcaaaaaagtgcgacaaaagcctccaagagagtgctaacactcccttcgaggctcgggggctactgtcggggaccataattaggtgtaccctcaaggctcctaattctcagctgagccgaagtgaccgccgtcactttgccgctccactgaccggcctgacagaaagacagcgccgcctgcgccgctccgactgcgggctcagactcggggctaagtcccggaaagacggtgaactccgctccgcccgacctagggctcggactcgggctaagtcccggaagacggcgaactccgcttcgcccgacccagggctcggactcgggctaagtcccggaagacgacaaactccgcttcgcccgaccctagggctcggactccaccctggcctcagccgacggcctccgcctcgcccgacccaggggctcggactcgacttcggccacggaagacagactcgacctcggcttcggaggagcttccacatcgcccagcctaagggcgcagaccagccacgtcaacaggaggcgccatcatcaccctaccccaagctgacttgggccacggggaacaagaccggcgtcccatctggctcgctccgccagataggcaatgatggcaccccgcttactctgtga

SEQ ID NO: 30599 - DNA, 84 bp, Zea mays
  Peptide Sequence Number=SeqID_73974
atggcgctcaccggcctagcgggagggtcagacttcgacaacgcggggctggtcggtgaggtggaaccggagttccgtttgtaa

SEQ ID NO: 30600 - DNA, 476 bp, Zea mays
  Peptide Sequence Number=SeqID_73975
atgcaggcggcatgcaaccgcaccaagagggcgcaccctttcgacttcgacgcatccagcatggaggcccaggcccacacgtcatgtaaccggcgcgccggttactacgtgcgagaaactgcaccgccacttgcgccaataccgcgcctcctcgactgcggaaccagtgccgtgactcgaggcgaccctgcgcacagcccaacagtgccaaccgagcacatcggtcatggggaccgagaaaggggataccccgaaagggatccttctccgcgaaggaagcgggccccgagccccctactgatcagaggttcgaaggctggcccctcggaagggttcatcagccgcctcagagcactcgggctctgcgcccattactggctggcccccgaagggttcgacagccgcctcagacgcagagcgagggatgaccctgggtacgttcgatacataaccaaggctcgggctacgctcccgag

SEQ ID NO: 30601 - DNA, 639 bp, Zea mays
  Peptide Sequence Number=SeqID_73976
atgtcttcgcactcccttatgcatcgtgtctttccaccttccaagcccccggatgggggatacccgtcgtctttccgcctcgtcgttggaggaacgcaactccgtgggagttggtacctttcagccatcgttcggcttcaaggattttcatcagccagcccggctgtacccctccgtcggcggtcacctgagatagtgaccaccagccccctgggtgggggagaagcaagctggggctgcgatcttggtcccaccctcagcttcaaggatgttcatcatcctcactggggtggaggccgggctgagccggagctctacctcccgcgcgggttcgtgggtcggcctctccttcggcgttcgagggagagggcgctcactggccctgcgggcgggtcggacttcgacaacgcggggctggtcgacggcgggcgtcgtcagcctcagcgcgtcgggctcgtcggcttggctcccggtgccccctcctgccgaaaggcggctgccgcgccgtgtgcacgggaggaccgcccaagatatcgcgcgctgccagggcgacgttcgtgttctggggcggtcctgcctttgcaccggtacggcgcctccgcgcggaggtcggtgccccactcgtccgggaggacctga

SEQ ID NO: 30602 - DNA, 641 bp, Zea mays
  Peptide Sequence Number=SeqID_73977
gccgagcccgagccatggggtcgggcgaggcggaagtcgttcggccgaggccagggcggagtccgagccctggggtcgggcgaggcggaagtcgttcggccgaggccagggcggagtccgagccctggggtcgggcgaggcggagttcgttcggccgaggccagggcggagtggagttcgccgtcttccgggtcttagcccgagtccgagccctggggtcgggcggagcggagttcgccatcttccgggtcttagcccgagtccgagccctggggtcgggcggagcggagttcgccgtcttccgggtcttagcccgagtccgagccctggggtcgggcggagcggagttcgccgtcttccgggtcttagcccgagtccgagccctggggtcgggcggagcggagttcgccgtcttccgggtcttagcccgagtccgagccctggggtcgggcggagcggagttcgccgtggcgcctttggcaaggcctgactgcctgtcagactcactctgtcgagtggcaccgcagtcggagtggcgcaggtggcgctgtccttctgtcagactgctttatgctgatgggggttaccagttgagaattaggcgtcttgagggtacccctaattatggtccccgacagtag

SEQ ID NO: 30603 - DNA, 939 bp, Zea mays
  Peptide Sequence Number=SeqID_73978
atggccaggaggggagcggcggcgaagggaacctggaggccgaggaggaaaccctcgcgcgcgcaagcggatgtcgacggcgacgcggtacaccgcggcgccgaaggcgggcgccctccgccaaagggacacacaactgccaccggcagcggcgggtttttctgctgctacctgctccggtccctctgcccgcgcagcaagggccgcacctacatcggcttcacggtgaacccgcgccgccggatccggcaacacaacggcgagatcgtcagcggcgcgtggcggacccggcgcggccggccctgggagatggtgctctgcatctacggcttcccctccaacgtcgccgccctccagttcgagtgggcgtggcagcacccgacggagtccctcgccgtgcgcaaggccgccgccgagttcaagtcgctcggcggcatcggcaacaaggtcaagcttgcgtacaccatgctcaacctcccctcatgggaaagtctgaacctgacggtgaacttcttctcctcgaagaacaccaagttcaccaccggctgcccgtcgctgccgagccagatgaaggctgtcgtgtgcggtatggaggatctgcagtgccagcccgacggcccgtcatccgaggaggatgacaatgacatccgcgacgagtcccaagataatggggaagaaccgcctgactcgcctatccgagatggattttcatattctgactactgtttccagcaaccgtcctctgatcaagcgcagccgatggacgagcaaaccataagtgcagatgctggtgacggccgccatatcctcaacggaaaccacgtggtggacttggttaccccgactccactaggccggctccggagaagagactgtatttccagcatctgtccaaagatcattgatctgacgtcctcgcctattgtcattcagttgtag

SEQ ID NO: 30604 - DNA, 285 bp, Zea mays
  Peptide Sequence Number=SeqID_73979
atggccaccaccgcgacggaggaggcgcatagcgaggtacaatccaaggtgggggaggtccacaccctccggttcttggacgtgcgacatttgacattgatccattaccatcaaccttctttggatccagcgaaggaatctattcctcattcgacctgggcgcaaacgaacaacccgagagtcgtcgacattggcgacgaccatgaggtccccatgtttgacgatggacagcgcggtgcagtcgctctggaccacgtccaagcggcggctgcgccggagcttgcc

SEQ ID NO: 30605 - DNA, 288 bp, Zea mays
  Peptide Sequence Number=SeqID_73980
atgaagactggggagaagcaaaagaaaacaccaacaagtaaaatctctaacacctacatcaacaaggtggacaaaaaggccgctacactatatttaatcaagaagaaaaagaatggaaaggtgatagcaatcaaggccaacaagcaaaccaacaaaggaaaggggaccaaacgcatctgggtgccaaaggagattatctcaaccatgaaaagtgccaaaggttcagcacaaaccaataaaaagattaaagctagggttcaaaagaaaggagcaaaaaacccgaagtga

SEQ ID NO: 30606 - DNA, 486 bp, Zea mays
  Peptide Sequence Number=SeqID_73981
atggaaatagccaaacatggcctacatagaacaaatccacaaactatttatggagtacccctaaattctactcttaggaaaattcattgtttgtgcttcaggtaccatcttcaaacttgggctaacctatgtttggtgattgtagcaagctatttttgcagaatgcgcaaaggtgcagcctttatcgcccttctcccttcaccttattgctcgacctgccatcctatcgctttgcaaattcttgagcgacccatcgttgtaatccaaatgtcaccacgttccttccaggataacatgacgtgctccacctcgcagacggacctgtgccactactcatcgtcagcacgccacaacagccgcagcaacaaggtcacctcctctcggaacggtggccggttcctcgcctcccgccataggaaaatatcactctcatatttcttcatctctgggtcggcgcaatccgagagtgacacacaccaacaatga

SEQ ID NO: 30607 - DNA, 240 bp, Zea mays
  Peptide Sequence Number=SeqID_73982
atggaggaactcgatgaaaatcctttcctaaatgcatgtaggagaaaatatgagaacaacgaataccatgttaaggctctgatactcccatatgtgtgttatctctccatcaagaagggtgcaatacctttatgggagatcatcctatgcgtaatcatcataatgattggcgtcgtatgcgcatacatctggtcatacacctcaaacagtcggatgtttttcacatatagtgcacgctag

SEQ ID NO: 30608 - DNA, 1221 bp, Zea mays
  Peptide Sequence Number=SeqID_73983
atggccgccgccgccgccgtcttctttccctccaccccgaatcctcggcaccgcctcgccgccgccgcccgccgccctccacccagcttcaccggcgccaccgacgccgtgccgctaccggaggacgaggactccagcgacgacgatgccgacgacgacggcgcgccacgcaggagcgggcgcagggaccggcgccgcgcggtgcgcgtcgcgtgggagaagctagtccggtggtcccgctcctggcgccgccgcaaccgcagcgacgtcctcgagaccacgcgcaaggtggtggttctcgggggcgggtcgttcgggacggccatggccgctcacgtggcggccaagaaggccgatctcgaggtggccatgctgctcagggacgaccacatctgccgcaagtacttatcagaacacagattgccagaaaatatcgtcgcaacaactagtgctgctgatgctttagcaggagctgatttctgcttccatgctgttccggttcagttcagttcatcctttcttgaaagtatttcaacacatgttgatccaaagttgccattcatatcacttagcaaagggctggaactcaatacccttcggacaatgtctacaatcatcccacgagcattgggaaatcgccgccaaccgtttgttgttctgtcaggaccatcatttgctgtagagttaatgaacaaattgcctacaggagtagaaatcgcaggtgccctgaagaacgttcttgcaatagctgcaggtatagtggaaggcatgagtctcgggaacaactgtatggctgcccttgttgcccaaggctgttcagagatacggtggttggcgacgaagatgggagcaaagccaaccactctttctggcttgtctgggtccggtgacatcatgctcacatgcttcgtcaacctttcgcggaatagaacagtgggactacgcctcggttctggtgaaaagcttgacagaatcatgggttctatgaatcaggttgctgaaggcgtatcaactgctggggctgtcattgcgttggcgcagaagtacaaggtcaaaatgccggtattgacagcggtggcacggataattgataatgagttaactccaactaaggcggttttggagttaatgaatcttccccagtgtcttttactgttgtgttccagcgacaataatattttgatcatgcgaaaaggcgtccttgtttgcctggaagactga

SEQ ID NO: 30609 - DNA, 891 bp, Zea mays
  Peptide Sequence Number=SeqID_73984
atgccaccccttgttcaaagacacaaggacggcagggatgtactgctgcgcccgcgcctgcctcaactggaggatgcagccaccgacccgcaccgccatgcgaactcttctttcccccgtcgtcgaggcaaaaagctccgcaaagaagagatgggtccacagatcccagtggggggcaatccccaaaaacccttcgcaaaccgccgcgaagatggctgcttgcgcgatggagttggggctaagattgtgcagctccaccccgtagaagtgcagaatcgcccgcatgaaatgacttgccggcactccgaacccccgctcgtgaaaagagacgaagctcagcacataccctggcggcggggacggggcggctccactcggagggaccatccactccgactgcgggccactggagagaggacgaagcaaaccatcggcaacaagagcctccagatcgtccgccgtgacggtggagaaaggtcacgggtcgcgcggcgaaacaacggttacccggtcggccatcaccaagcagaagaggtggcggcggggtggacaagggaccgggaaaggggatactctgaaagggatccttctccgcgaaggaagcggtcccgagcccccctactgatcagaggttcgaaggctggcccctcggaagggttcaacagccgcctcagagcactcgggctccacgccactactggtcagaggctggcccccgaagggttcgacagccgcctcagagcacacagagcgagggatgacccttggtacgttcgatacataaccaaggctcaggctacgctcccgaggctcgggggctgctctcgcaaacccgactccggccaaaccgttgacagcgtcaacataccagcccgagaacttgggacctga

SEQ ID NO: 30610 - DNA, 105 bp, Zea mays
  Peptide Sequence Number=SeqID_73985
atggcgcttatgcaaagggatgtagctcttgtaagtggttggaaggttgaaaacttggatgacttgaatgaggggtggttgggggtgaccgttggcgcaaagtag

SEQ ID NO: 30611 - DNA, 579 bp, Zea mays
  Peptide Sequence Number=SeqID_73986
atgactctgagggaggccacgtgctcccaggccgacgaagcttctcctcgagccgactccgcctctgtccacgctgacaccgctgcctccggctccggctcatcgcagagcagccgaagatgttcaggcctcgacagccacaatgaacaaacaccggcactcaaggtgccattacaaacggaactccggttccactcccgcgggtatgaacaacctccacatcagagggcctgcgggatgacaaactccagttggctcgccgccgaccactgcagcagcagcaacagcgacctccactccgggcggctaaacagcagcagtgatgacctcagggcagacgctgctgcgacaaggccctcgcccacgtcctcgctcgaggggcgaggacaagctatcaaagccaaagagccggaggaagaggtggcccaccggcccatacgggaggtagagctccggctcagctcgccccctgccacaacaaggatgatgaagatccttgaagctgagggcggggcagaggccgcagcccggcttgcttcttcccaccatcgaactggtggtcaccatcctggtgactaa

SEQ ID NO: 30612 - DNA, 468 bp, Zea mays
  Peptide Sequence Number=SeqID_73987
atggttaggatatgcctttatgaaagcgctcaccgaagcgggatcgcttggtggatcgaagctgaatctaaaaggcgcagggtggaaaacggacggcgcgaggtcaacgccaaacatgtcccccgctggggtgccggcgtcgtcgactcgctcgacagccgacaaggtgccgcctcctgcctagccacggttgccccgcctcctcctcctgcagcgaggaaggcgacgggacaaacccggatgttgctcttccgccacggggggaagacgtcgccgagtccgctgccgccgggcgggctgacgaccgtcgttgtcgctgccgcattgcggaggaaggagtactatgtcgtagctaccatcgagggacatgaacttgagactcccgaaacggagcagcgtcccgggctgaagaggttgctggagactacccatctggaactcaacgggaagttgttcgtcaacacgtag

SEQ ID NO: 30613 - DNA, 1422 bp, Zea mays
  Peptide Sequence Number=SeqID_73988
atggccagattcacgctgttctgctccggcatgtcagcatgtgacgaggacgccaccatcctctgcacctcaaaagtgagagcgagagcccccccctcaacatcactgacaccaccaaagcacgggaaagcagaggaagcggagcagagctttgtgggagcgtcaatggcaggaacttgggtgaagttttgcaagccatctttgatattaggttcaaaagtgagttgggatcagttggcgatagtaacccacccactcggatggtcggggaactggactctggagccctatgtgatctacaaagggggattgattgcgggattggtgggtggcgttgacgaggaagtttccattccgtcttcaatggatcttcgtcttcctagtgtcaaaggcatgctgacagggaagtcggtgatgcccaagttctgctcgagtcaacgagcttcttttgcagctatggagcagaagggcgccggtccgggagcacggagctcccacgccatcacgctgctcgggggcacggcctactcgttcggcggcgagctcaccccgcgcgtcccggttgacagcaccatgtacgccttcgacctcaacacccagacgtggtcggcgctggacgcgacgggcgacgtgccgccgccgcgcgtgggcgtgaccatggcggccgcgggcggcacggtgttcacgttcggcgggcgcgacctggagcacaaggagctgaacgagctctacgccttcgacgcggcgacgcgggcgtggacgctgctgtcgtccggcgccgacggcccgccgcaccgcagctaccactccatggcggcggacgcgggcgcggggcgggtgtacgtgttcggcgggtgcggcgacgccggccgcctcaacgacctgtgtgtgtacgacgtggcggcgggggcaatgggagcagctgccgccgccgggggaggcgtgccagccgcgcggcgggcccgggctggtcgtcgccggcgggaaaggtgtgggtggtgtacgggttctcgggcgaggagctggaagacgtgcactgctacgacccggcccacccgggagtgggccgcggtccagaccacgggcgacaggcccagcccccggagcgtgttctgcgccgccgggttcgggaggcacgtggtgctgttcggcggcgaggtggaccccagtgacctcggccacctcggcgccggcaagttctcggccgaggcgttcgcgctggacacggagaccggcgcgtggacgcggctggacgacagggcggaggccgagcaccacccggggcctcgcgggtggtgtgcgttcacggcgggggagaaggacggccagcgagggctgctggtgtatggcggcaactcgccgacgaacgaccggctcggcgacatctacttcttcacgcccgttcttgaggccgcaagctag

SEQ ID NO: 30614 - DNA, 663 bp, Zea mays
  Peptide Sequence Number=SeqID_73989
atggggaggggtaaatgggtggctaggggtagacgggcacgtctaggggtagacgagcacgtcgcccgcgatagggcgctacgcgtcgcaccgaaggcacggcgagtcgcgccaaagcactgcgcacaccacgcgagcacgcacgcgcgcaaggccacactaacgcgccgtggacgagccgcgcacacgctggggccgagtcgcgcacacgccacgcagcggggcagtgccggggggtcgcgcgccataggcacgctgggccgagctcaaggccgcgccggggcggacatgccgcggccgcgccgggcaggggcagggcaagccgaggcgcgtgcgcgcacgccgagcgccgcgagcaggggcaagcgtgccacgccacgccaccgcgggctgagcagggaggggaccgggaccgcgcgcgccggggcgggtcgccggggtgggcgagcgcgtcgcgccgaggggtgccgagggagagggagccgcaccgggccagggggccgagccgcgtgccatggctgggcgaggcgggtgcgccgcgccggggccgccgaggccgggccacgccatggccgcgccgggctgaacggcgccgcgtcgaggaagggaagaaagcgggggagcgaggagaagaggagggggtcttaccgcgaccaagggtag

SEQ ID NO: 30615 - DNA, 1023 bp, Zea mays
  Peptide Sequence Number=SeqID_73990
atggagagtgatgatctctgggcagaaagggaatcacgacttgtgggtaaagtggcagtgagaatgatggttttggcattgagtatggtaatggttgtctacattgcaaccactgctcaggagaagatgaagccgtggaaggagacttccaggagttccaagattatgacgagttctaggcatggtttacttgctggtcatattagttctgttctcacccttatgcttatgatgtcttttgtagatggctcgtcttaccacatggaacaggagatagagtctgtgaggagctgctcccctgtgctcccgctagaggcgccccctgcaccaccaccgagcgccccagccactggagtagctgctggaggagaccaagacgacgtaggcggtgacgacagctcgagccacaacaccgacctttccaccgaccaggagttggaaggatgggttgctcgacccatcactcgcgatgctgctcgctggtgtcacttccacgatgcgctcgacaccctgctacgccaggcactcgaccggcgtacttggtccatcgagtatcgctgtgtagtcttccagcacagtcgtggggtttacctggaccgctgggaggtgacctgtttggtgcgccgtccggagaacagtctccggggtgcggaggtctactcagagcactattccatctctgagcgggactcagttgaggcggccatgcaagatgccacacggtgtgcgctttcgcactactgctcattgcttggtggggtagccgatggtcttaacctgaagtattacccccgccgtctatgtggcagcacaggaggcatggttgtctcacctgtgggtgaggacaatcctaggttgagcagcacagtcaacctagccgttgtgctaaacatggagcttgaccatgcattagatgagctgagtagggcccatgctgagatcgcccagctgcgggctgagcgtaccgctcacctcggcgtggacactaggcttatggcaaccccgactgcaggaccaggataa

SEQ ID NO: 30616 - DNA, 297 bp, Zea mays
  Peptide Sequence Number=SeqID_73991
atgggcgcggtcgtcggtggacggcgaggtacaaactccggcgaggctccatggactccggtgacgaactccggcgagcaagagagtaagagacgcgtgagagagagagggagttcggggaggaagagaggaagggagttcggccatatttatagagagaggagagggtctgccagcgtcatcatggcttcaaggctgccattgatggcgttcatcaatggagagagttcacaggatgctaaagttacttggaccaaggcattgaggaaagcatcacctaaaaagaagacattatga

SEQ ID NO: 30617 - DNA, 357 bp, Zea mays
  Peptide Sequence Number=SeqID_73992
atggggaaaatctatgcgaagctcttcttctctttcccatgttgcttcatcttcgccatggtgactccattgcactttgcacatctttatcaccttatttcttgtaactcgagtcaaggtatcaagaatcttgacgggatactccgttccgacacggccactgacaggatcaagtaccacaacctcactcgaagcggaataaaactaatggtaattaaacagagagatggggaagcctgtcccatcactcctcatgctcctcctcagccgaggcagggtcccactcaacagtccaacccggtggtaaggtggacggccaagtcactccagcaaccatgtcctccagagaacctgtaa

SEQ ID NO: 30618 - DNA, 555 bp, Zea mays
  Peptide Sequence Number=SeqID_73993
atgaactcgatgaggaaggtcggtcgagcagggaacgacgaggtttggacgaggttcgggcacgtctccggcgagcaggggaacgggcgcggtcgtcggtggacggcgagagagaggagagggtctgccggcgtcatcatggcttcaaggctgccattgatggcattcatcaatggggagaggggcgtcacgcctgggctggtcgtcgggtcctggcgcggcgtgtcgggcaggtgctcggcatcgcgcgcgcaggaggagggcgcggctgtcgaggctgctcgaggccgcaaaggcttggtcgggtgcggtcgtgggtctgggtggctgcgcgcgcaggggcgcgcgtcgggctccggcttggagcggtcggcggctcgaccgcagcctaggcgcgggctggctcggacgcaggcgaccgagggcgtcggggtctcctggcttcctggcggcgcgctgctaggagagaaaaggggaagggaggagagagaaggggaggggattaaggtggcggctaggggagaggcagacaaggggcggcggctgcctgattag

SEQ ID NO: 30619 - DNA, 408 bp, Zea mays
  Peptide Sequence Number=SeqID_73994
atggagaaccacccgaaaaaacagtgctaccacaagggtggaatgagacacccttggccaactgagttgctagcgcaacagtacccgcggtcgactttcttcctcggtgttctagggatgctaggcaaacgcggcgaccgcaaggggttttcctatgcaaccgcggcgggcgagggggtaatgtgggttggcttctcgcagcacccagcggcgagtctgtgggattcggcagcggttggagcggccggtgagcatgtagcggcggaagaggcggactcggctcaacaaaccgaggggacgaccggcctgacccgtggggcccaggcggcaatgatagtgcgcgcggcacgtgaatcaggagaagatggacccgacacagcggtcccactcgatagcgaacacggcaaa

SEQ ID NO: 30620 - DNA, 186 bp, Zea mays
  Peptide Sequence Number=SeqID_73995
atggatgtgtatgggtatacggacatgggaatactgagaagtgtaatgtacttgcaacgacgcacctacgctcaggtaacctatttaggtgtaatatatgtgtttgctctggtgcttgatgtactgatagaaggtggtcattgtgacaaagctataaagctatgtgaggagtgtgactttgattaa

SEQ ID NO: 30621 - DNA, 282 bp, Zea mays
  Peptide Sequence Number=SeqID_73996
atggatgttggggaatggatgttgggctaccacaccccgggggaaatccgggaggggagccccaagcgagtttcaggcgtgctttctgaccccgggacgttacggcaggcggattcagggctgagggggacgcccaacgggctagggcgccagtggcgcgctttcgtgcgccctcccgtgcaccaacggttcctcccgggccccccccggaatggtcccggtgtgccgcagaggagcagcagcttttttccaacgggctacaaattgtgttgggggctataa

SEQ ID NO: 30622 - DNA, 294 bp, Zea mays
  Peptide Sequence Number=SeqID_73997
atggatcccgcgcccgatcagctctctatctccgcctctgccccgttccccaccatcccggctgcctcaagccccaggccccgcgccgcgaggacgcggcgccatgccgcgcccttccggtcggaccaccccaccgccgggagctggcgctccgggatcgatctcccgcgccgtccttcggcctccgccttttcccagcaggagcgttatccttccgtggcctcctggagcgcctctcgcgacgccaactttgtgttcgggagcggcgtggccgctaaatacttcagtttctaa

SEQ ID NO: 30623 - DNA, 426 bp, Zea mays
  Peptide Sequence Number=SeqID_73998
atggagatgaaactcaatagaaaaccgttggggcgtaaccctcttagcgacgtgccatatcgaaacccgggtaagctaagagggttagttgatgcaaccagcaggaggcgtgttaatatcctatgtgttcaggagacaaaatggaaggggcaaagagtgaaggaggtggagaacactagtttgctttggtactcaggaacagtggtagacaaaaatggactaggtatcctgattgataagagcctcaaggataaagtggtggatgtcaaaaggcagggagatatgattatcctagtcaaactagtttggggatgtagtcttgaacattataagtgcatatgcccccaggttggtctccgtgagagcgagaagagtaagttctgggaagacttagatggcttggttagagcagtaccccaccaatga

SEQ ID NO: 30624 - DNA, 225 bp, Zea mays
  Peptide Sequence Number=SeqID_73999
atggttttttttaaccacggcctgaaattcgctcccaccgttaagctgctggcaagacacattggtaaaccaatggaagagattgctcgggacatcaggcgtcctaaatactttagccccagtgaagctgtggattatggcatcatcgacaaggtgatatacaacgagaaaatccaggaagatggcggtgttgtgtcagaactcaaaagatcaaatttgatatag

SEQ ID NO: 30625 - DNA, 675 bp, Zea mays
  Peptide Sequence Number=SeqID_74000
atgcccgtactcaaccatcagatcgccttcccacactccccatccccgatcccgtcgttcactgatcccatacctgtgccgtcacaacaacactgtgatggtgttttctacggggacatggatgtcatccatgcatcgacggcgcagctacaggcggcggcacgctgcctcctagcgcaccggcaaggacagcaccccatcttcaagcgtcgacacccagtcgtcctagcaaccttgcagcagctcgtggagaggaaggcgattgcgcggcaactgcaagctgcagtgcgtggcctcctagtgcaccggcggctgcaggaggtgcgccagcatatgctcgaggcagctttggtggcggtcgacctcgacgcatgggggcatgacctcgtcctatcggacgaccatcagcaaccgcgtcggcccgctgtctccaaacacaagcacagtgcctgtcccgcgggcgacaaactccaactctacggcagcggcagtagggaaggtgctctcctccttgtcatcgacgagggcgcactgcctagcgccaccacattccgctaccggctgccacgagggcgcctccgatggttattgttgcgacccttccaggtggccatccatgtgctccactttcgtccagatggcgtccatgggatacaggtggctgcacacgtgtag

SEQ ID NO: 30626 - DNA, 393 bp, Zea mays
  Peptide Sequence Number=SeqID_74001
atgggcaagagtaagaaaggtagcggttcttcgcctcgctctggtgacaagcgcaaacgtgagccgactcctccctcggaggacttcggcaactcggagtacttggaggaggagttctcctccgagtccgagggatctccggctcctacgactccccaggggattgccgcggaggtctggacctacatccgggccgtcgagcgctccgggctcgagggctcggatgagtcggagtactcctcggaggaggagggcagcggcggcgatggtggtgatgatgacgacgatagaggcgacggtgatggcggcggcgacagcggcaggggtggtgacggcggcagcaagggcggtaatggcggcggcagcaagggcagcaacaaggctagtggctag

SEQ ID NO: 30627 - DNA, 846 bp, Zea mays
  Peptide Sequence Number=SeqID_74002
atggaggcagctgccgccgccttcttgtcccctccccgcgtcgccctcgacgtccgcacactcttctccccgccccgttgcctccccgtctcgccctcatcccagctccgcctcgctgcccgcccccgcgcgctcgccggcgccaagccgcggttcctgagcccccatcgagaacccgccgtcgacggcggtcgcggcgccagggatgtcgtcgcgatggtggtgccgttcctgaggggggccgcgtgggagcagccaccgccggacttggcctcgttcctgtacaagaaccggatcgtgtacttggggatgtgcctcgttccgtcggtcacggagctcatgctcgccgagtttctctacctccagtatgacgacgccgagaagccaatctacatgtacatcaattccactggcaccaccaagaatggcgagaagttaggctatgagacagaagctcttgcagtatatgatgctatgaggtatgttaaagttcctattttcactctgtgtgtcggtaatgcatggggagaagctgctttactcttagctgctggcgctaaaggtaaccgtgccgcacttccatcatcgacaataatgataaaacagccaattggtcgctttcaaggtcaggcaacagacgttgacattgcaagaaaagagattcgaaatgtcaagatagaaatggatctagaagacgaagggttccggagacctgctctcctgatcgcagatgcacctctgcggtcgggacgaagggaactaaaaggcggctcagctatgaagagaggcgaaagcgaactgggatctgggatgatttggaggctggctgccgggctccttttatag

SEQ ID NO: 30628 - DNA, 366 bp, Zea mays
  Peptide Sequence Number=SeqID_74003
atgaccccgacacttgtgatcgagaaaattgtggcatttgagatgtcacagaagatgggtcaagaagagaagccaacctcttcaaagccatatgctttttcatgtgatgaatacaaaaatatgaaaggcaagaagatggctccaagctcaagctcctcaagtaaagaagaggaagacgtcagcggcagcggcgacatcgacggggacaacttttgtaccagcagctacggcgttggcgtcctgctcaacttccacatgccgcagccactcacccgtagcttcaccgcgccgcgccgcgccgcgccccacccggacgccgtcgtccccctccggctgttggagccccaacgtcgcatccggctatag

SEQ ID NO: 30629 - DNA, 444 bp, Zea mays
  Peptide Sequence Number=SeqID_74004
atgaaccaccggcggcggggtgcgccaccgcggtggccgccattgccatatgcggcccgtcggagcccccagcgacccatccctcgattcaacagaaccacccgctatgacgaatgcaacggagatagggaaagctccattacctcaattaacgcggtgtcacccactgtccaccaagagcgacggagatcgaaatccgacgtcaaattccgggcacaaccgcggtcatcccctacccggacggccacacgatcctcacagacaacccgcgaagtccctggactcagctcgggtgcccggccgataggcgaagtcgacagcggcgctggcggacaacttctgctcccgcctcactctctctctgtacccgcgcaatgtttggctggagatacgatgacttggaaaggggaaacgcttggggaggtcaatagatatgctcggtag

SEQ ID NO: 30630 - DNA, 498 bp, Zea mays
  Peptide Sequence Number=SeqID_74005
atgttgcactctaagcctcgatttggatccaccctctcgcagcaccgaacagcggaccccccgccaatctttcgcctatggcgagcggtggcgccgaggcgcccacctgctccaaggagcaatacccggcagctatcccccccagatcgagccacactagttgctcctgagcatgagaacagagcgagcaagagatgggatcccataccggcttcaacacagtcgcagcttgcccacggcgaggcgcgctccccgcgtccagacccttcaccccgtggccgctccagaccacagctcggccgagcacgggtgaccacgcaaagatcccaggtgggcaatggcaactctcgtgctagaacactcagctcccgatttgcgctcgacggatgcgagacccggcggcggacgcgcgaatgggcactgcaagtcagccgggacgatgaaacctggggctgggcgctttgtagggcgagtgagagcggggatcgcggcaagtag

SEQ ID NO: 30631 - DNA, 423 bp, Zea mays
  Peptide Sequence Number=SeqID_74006
atggcgagcggtggcgccgaggcgcccacctgctccaaggagcaatacccggcagctatcccccccccagatcgagccacactagttgctcctgagcatgagaacagagcgagcaagagatgggatcccataccggcttcaacacagtcgcagcttgcccacggcgaggcgcgctccccgcgtccagacccttcaccccgtggccgctccagaccacagctcggccgagcacgggtgaccacgcaaagatcccaggtgggcaatggcaactctcgtgctagaacactcagctcccgatttgcgctcgacggatgcgagacccggcggcggacgcgcgaatgggcactgcaagtcagccgggacgatgaaacctggggctgggcgctttgtagggcgagtgagagcggggatcgcggcaagtag

SEQ ID NO: 30632 - DNA, 1191 bp, Zea mays
  Peptide Sequence Number=SeqID_74007
atggagacccgtgcactcttgttttgcttaggaatcagggagaagaccgaaagggaaaaggatttgaacatgctggattcggactgcagaagaacaccaacttgtgacggtcaccacgatctggacgagtgccctagtggccagggtgtcacgctccacaagatcgtgacagccataggaggtggtgtatcggttgctaaggcgcagcgtctttggaaggctattgctcgtcttaggcacactgcacgaaagtccgtcatccccttcttaccctcccgccttgctgagcgtctacttcgtcgtcccgtggccggtcagtctagtcacttggagaggctgcaccaccgcctgcatgaggagcaggaacgtcgacgacaggagcagcagggctcttctttctcgctccagcaggagatagagtccgtgaggagctgctcccctgtgctccctctggaggcgccccctgcaccaccactgggcgccccagcctctggagtagctgctggaggagacccagacgacggaggtggcgacgacagctcgagccacgacaccgacttctctgctgaccaggagccggaaggatgggttgctcgacccatcactcgcgacgctgctcgcgggtgtcacttccacgatgcactcgacaccctgctacgtcgagcacttaaccgacatacttggtctatcgagtatcgttgtgtggtctatcagcatagtcgcggggtctacccggaccgctcggaggcaacctgcttggtgcgccgtccggagaacagtctccagggtgcggaggcctgctcagagcactattctatctctgagcgggactcagctgaggcggccatgcaagatgctgcacggcgtgcgctttcacactactgttcagtgctcggtggggtagctgacggaggcgtgattgtctcacctgttggtgaggacaatcctaggttgaacagcacagtcaacctagccgccgtgctaaacacggagctagaccatgcgctagacgagctgagtagggctcgtgctgagatcgccctgctgtgggctgagcgcgcggagcgtcgtcacctggatgatggttcccccgctcccgtcgggactcagcacccgtaccgctcacctcggcgtggacaccagtcttatggcaaccccgactgcaagaccaagataaatctagaaccatag

SEQ ID NO: 30633 - DNA, 474 bp, Zea mays
  Peptide Sequence Number=SeqID_74008
atggcacccaagaaagctagctcgaaggctgatgaggctgcgaaggcagcactgctggccgcaaaaaagggcaaggccctcgccctcacccactccacccaccaagaggctactgaagacgacattctccgcacctgcgaagacgacgctctcctcacctgcggccctgaagaccagccgcaacctcccccaggcttcgctccaccagagggcacggacttcaccgaggacggcgaaatcatcgtcactgacgtgcgggcctgggtcctcgatgtctcacgccgcgcgtacacccttgaccgcgggcgctgccgtgtgggacccttgtgtcggatgtatcttctccgcatcgtgcggccagaaaaaggaatcgcgcgcaaacaactcgcctcgaccacctccgcacccaccagccgtgtttaccgggtccgcgtggcgcgccgctcggggatcctggtgatgtgggtggggtag

SEQ ID NO: 30634 - DNA, 156 bp, Zea mays
  Peptide Sequence Number=SeqID_74009
atgtcgggagatcatgccaagagggagatcgtgaccggcgacaagcccacaagctcggggagaaccctctcaagggagtccggcgacaagcataaggaggaatcctcttcctccaacaagacgcatcagaagggtgacaagcactacaggaaactg

SEQ ID NO: 30635 - DNA, 699 bp, Zea mays
  Peptide Sequence Number=SeqID_74010
atgacctcactccttcctgagccggagatcaccggagttcgccacagagagcaagcaccactgcccgccaccaccgccagagcatggccaccgtggccagaccattcccatccacctccacttgatccagcacctcggctagcttccccagagcctgatagagctcctcgaagcaagagaccgaacgctacctcaccgaagacgccgatccaccctcgccggagttgctttccccgcaggcgcgcgtggccaaggctaaccgtcaggaagccatcgccttccttcggcgtacccagcagcgacgagggccacccccgcggaggtgacatcgccggccagagcctgcccggctattccgagcaccactcttcgatccctctagtgcaaaatgaagggggaatctgcgtgaatacagaggacaggtactcactgacgatcagggcccagagatcccatgcgacggcacgctacggcaccgcggtggagatcgaactctggcgacaaattgtcatggatgcggggtcgcacagcttgtcccgaaggcacagacggatcacccggacgctggcgcacccacacgactacgtgccggggacagaacaccggcgcagaggagattcaccggcggcgaacttccgcgaacctttctctggtggcggcggagagaaaagggggcaacgagtggagtctaagggatag

SEQ ID NO: 30636 - DNA, 231 bp, Zea mays
  Peptide Sequence Number=SeqID_74011
atggagagtcatgatctccgggcagaaagggaatcacggcttgtgggtggcaatgagactgatggttttggttgtgactatggtgttggtaagtggtattctttccgtttggaaagggacgagtgccctagtggccagggtgtcacgctccacaagatcgtgacagccataggaggtggtgtatcggttgctaaggcgcagcgtctttggaaggctgtagtcgggccgtga

SEQ ID NO: 30637 - DNA, 354 bp, Zea mays
  Peptide Sequence Number=SeqID_74012
atggaggaagggaacgcgctcaggagttttatggcccgtggtgggtggttcaacgggagcgtggtcggtatgcgcgagcggctccgaggccttcggtgcgcccccgccttgcgcgacgctccgttgcccgggataagcatgaccacgtgggcccatcggacacagattgcaaccgacggcgagtacggcgaaggcctcgagcgaagggtggcgtcttcgccttcgccccaacttttgccctccgagggaccagttcaactaagtcatctggtgacgaagacgtcgctagatggcagagatgctgccctcgctcaaagtggttccacgggggtttttgacatgaccgttgattga

SEQ ID NO: 30638 - DNA, 108 bp, Zea mays
  Peptide Sequence Number=SeqID_74013
atggcggtgtttatgttagatcgggtggtccacattgcttcggtcagcattaaatctggtccattcatctttgatcaggcgggtgacgttaggtactggttcaggtga

SEQ ID NO: 30639 - DNA, 483 bp, Zea mays
  Peptide Sequence Number=SeqID_74014
atggagggtgccgccgccacctcacctcagctcgacgccccttcttttcctcgtctccctccatcggttctgagctcggtgcccctgctccctgctcctgtccctcccatggacgccgccccctccctcagctcactccctctagctgccatggagctcgcccctgcccaagtccggttgcctctgtttccccctatctctgttgacggctggcgtcccatctcccgaaatgcattgcaagagcaggcgagcaacgccaagtgcagagaggaagatgccaactgtgacaacacacagacagttgagcaacagcagccatctgacgacagacagacaattgagcatgctcctcttcaggaaactgatccaggcaaagagacacatgtttcagaggattcaatgctcacaacagatgctgatggaaatttgagctcaagccagcaaactggggagtacaatgaattgctgagacaatactattaa

SEQ ID NO: 30640 - DNA, 168 bp, Zea mays
  Peptide Sequence Number=SeqID_74015
atggtccgcgacctgggcgcaggagcggtgtcttccctgcttcacaccggactgtccgcagctctgggccggacgatctcgtcccctgggaggaaagatcttaaggtgctccgggtcgacaggtcacccggggcgtctccagacgacgtggagtcgcctaggaattaa

SEQ ID NO: 30641 - DNA, 405 bp, Zea mays
  Peptide Sequence Number=SeqID_74016
atggcgtatgtccggcgcctcggacagcatcacgtcgtcaagagccaactgaagtgcatatcgctcttctacagcttgaggggtcaggcgtggcacaaggtgtgctgcaaggccagtttccaggacttcacgcacgctgaacagagatgggaacttggtagacaggtcatcttccccaagccaggcatcaaactagaacgctgtcgaccggccatcattgatcaagcacgtggtaatggatctgtagagagggagcagggcgcgcagggtcgtccagtggtcaccagacaggtccccgaattcaggaaggctgattccaattcacaattctatgcaccaatatctacatccaaacgggatataagcataaagtcagaatctttaattttgaatagtgttggatga

SEQ ID NO: 30642 - DNA, 465 bp, Zea mays
  Peptide Sequence Number=SeqID_74017
gtttccagacaatggtttgactgctgtcttcatcgatgttttcttattgctcttaattatattgcggttccatttttgttactcaacgagctatacaatacattccaggtgatcagtgaagaattcccagaattccgtaaccttttgaccttgttattggaaaaatgtgatcttagtgataacttccagatgttggcaaactttcttcagcattcacctgatttggagaagctcactttgggccgttgcaagttctcaaaagatcccaagaaaaagaaaggaaaagccagattgagcaaggggtgtctgaaccagtttaacgtccggtgcaagaacctcaagcttactgaaattatctatgaagacgacgatgcgaaaaaggtggtggaacttttgtggagcatgtcaggggacctgcccaagaattacataaaactcaccaaggttgacccggatcatccttag

SEQ ID NO: 30643 - DNA, 567 bp, Zea mays
  Peptide Sequence Number=SeqID_74018
atgaagatcacaagtgatgatcaaagaatatcaagcgaagtccaagaaacaaagaaaagtgttgctacaggcggactgtctggtcgagggcaccggactgtccggtgcaccaagggaacagtagcccaacggctagttcctggtggcaccgtggaggaggcgtggactgtccggtgtgacaccggactgtccgatgcaaaggtagacagcgccaacggtcgattgacagatccaacggctagtggcgcactggacagggcaccggactatccggtgctcatcaccggactgtccaccgttgtaattgtactgagtgggcgagagtcttgcgagaccatgacaaccgagtttgtatcatggctgccactgtgtaccggagggaacgaggcccgcggcgtttcggccgaaagcttgttagtggagacggcggggagcgtccgagaggagccggaagaggagcaccacttgagcgtggagaaggcctacaactctctacggagttactcgaccgaggtgcttggccctcgcatgggcttccctttgcgtaggggcaccaacaaggattag

SEQ ID NO: 30644 - DNA, 255 bp, Zea mays
  Peptide Sequence Number=SeqID_74019
atgggggaaacattcaagggcgagataggactccgactgcgagaacgagactgtaggcgagagaatgacgaagggaggtgctctgggcgggtcgggtactccgatgaggaatcccgaccgcagggagggggaatcgggtgcgctaaggcctggactagttccggcgagaaagaagaagcacagaggcacatagaaaccactggggtcttcaaggaagatttcaccgtaggcatgtccgaagtgtgcacaacctaa

SEQ ID NO: 30645 - DNA, 150 bp, Zea mays
  Peptide Sequence Number=SeqID_74020
atgtgcctagcaaccttacctgaaatatgggcaagagggggagcggtaggtgttggcaacccacgtgaacatggggacgtattcttatctaagcctcaccttgttaaacctgcattagtttttcccccacttgctgagccccgaccataa

SEQ ID NO: 30646 - DNA, 228 bp, Zea mays
  Peptide Sequence Number=SeqID_74021
atggcacgtcaaacaggcttttgccccacctataggcttgtaacctcccctgaggcgggcccaagggtcactgccgacccccgtgagaaagtgctggaccccagcatacatgacctggaccttcgaatacgacccgggaccttgcgcgttcccctgaatgggacctggatccctctaaggccatgcgacgaccagaccaccctactggcggcgtgcctgtccaattag

SEQ ID NO: 30647 - DNA, 825 bp, Zea mays
  Peptide Sequence Number=SeqID_74022
atgttcggcgccctccaagggcaacatggcgctttcccccctcctccttgcggaaaggcgacgcaggggcgtatagtgaggctgacagcagccaagcctggcctcaggcgccataggaaactccgcttcgcccgaccccagggctcggactcgggctcagccccggaagacgacgaactccgctccgcccgaccccagggctcggactcgggctcagtcccagaagacgacgaactccgctccgcccgaccccagggctcggactcgggctcagccccggaagacgacgaactccgcttcgcccgaccccagggctcggacttgggctcagccccggaagacaacgaactccgcttcgcccgacccccgggctcggactcgggctcagccccggaagacgacgaactccgctccgcccgaccccagggctcggactcgggctcagccccgaaagacgacgaactccgctccgcccgaccccagggctcggactcgggctcagccccggaagacgacgaactccgctccgcccgaccccagggcccggactcgggctcagccccggaagacgacgaactccgcttcgcccgaccccagggcccggactcgggctcagccccggaaagacgacgaactccgcttcgcccgacccagggctcggactcgggctcagccccaaaacatgacgaactccgcttcgcccgaccacagggctcggactcgggctcagccccggaagacgacgaactccgcttcgcccgaccccagggctcggactcgggctcagccccggaagacgacgaactccgcttcgcccgaccctag

SEQ ID NO: 30648 - DNA, 354 bp, Zea mays
  Peptide Sequence Number=SeqID_74023
atggggcgggggctcaccctggcggcggcggccaccctccgcggcgccttctccgcttacctcggggtctctggcggcccaccgtcatcctcggcgtcgagtaggccgagcacgccgtactcgcggagccagcggtcgcggaaggccggggaggcggacaccaggcgccaccactcgggggagaagtcatccacctcctactccggcgtcgcctccacggtccgcaggccgcggtaccgcgccccggaaggcacgaagggctctgcccaggggttcagcctcccgccgctgccgctcacaaccgccatcggcttcttcttgtcctccctcctgcttcgcacgctctcacgctga

SEQ ID NO: 30649 - DNA, 690 bp, Zea mays
  Peptide Sequence Number=SeqID_74024
atgcctggattcacgccctgctcgcccagattcgaccgtgactttgatttcccaaccgacgcaggagcagtgggtctaaccgaccgcgacccgtcttctcatgggcgcttgctgggctcgcacaaccgcaacgagttcgtcatgatccgccatgacggcgatgcgccggccccgtcgcttctgcgtgtctctgctcgtagattttgcctgtccatttcagcgatgcttccgttgcgccgtgctaagcccacaaagagtgcgaatgggcaggtctgccagatttgtggtgactctataggtgtttcagccactaacgatgtctttgttgcctacaatgagtgtgccttccctgtctgccgcccatgctatgagtatgagcgcgaggggaaccaatgctgcccccagtgcaagactagatacaagagacaaaaatgttggtttcctggcaacttctttgagtgggactacaaggacaaggatggtgtcaagggccttgcagataatataacacaagcgctcatgtcctctcgcacttcatcagagacatacactagccacttcactccgataaaggagggaacaccgtcgacttccactgatatgcgtctgagaacatcattgcatcgatgccactgggcatacaagggtgttgaggaagactcaaccctagaagatccctatttcttataa

SEQ ID NO: 30650 - DNA, 585 bp, Zea mays
  Peptide Sequence Number=SeqID_74025
atggcgaggagatctggggaggagcgggtgggatcaaggcggtggcgctcgtgcccctccggtctcgctttgggctggttcgggggcggctgcagggttccatgggtcgcgctaggtgggcgtgcgacatgcgtcgggcgggcgggattgcggcgtgcggacggtagggtaggcgggagggtggttcgccatggtcgtggcgggatttgcgggcttgcggtgtgcgggcgggaggacggttcgccttggtcgcggcggggtttgcaggtttgcggcgtgcgggtgggcgggcgtagggaggcgggggcaatctacaacttcgatatatgtcacgatttgcatggtctcattattggagagcacgtttcacacataccagaagaaattccctcgtacatcgttagtcatcgaacacgtaccaccatacgcttttgcttaaacaaaaaggctgatgagtacgctgacacagatctcatctttgccgcccaccctatcataaaagagaacgtaacagaaaatagagatggacagagaccaatccaaaggctgcaaagagctgttgctactgataaatcacgagcatga

SEQ ID NO: 30651 - DNA, 288 bp, Zea mays
  Peptide Sequence Number=SeqID_74026
atggggtcgggcgaggcggagcttcctatgtcgcccgaggctggacttagccgctgtcgacctcactttggcgagtggcacggcagtcggagccgggcaggcgacgctgtattcctgccaggggaccgtcctttctcggtcgcgtttcgttccggtgggtgcgcgcgagcgcacccgccgggtgtagcccccgaggcctcggaggagtggtttgactccttcgaggtattagcgcgtttcgtgatgcttcggccggtctggttgttccctcatgcgaactggccgtag

SEQ ID NO: 30652 - DNA, 1239 bp, Zea mays
  Peptide Sequence Number=SeqID_74027
atggggagcgctcgcgttgctttcgtcttgctgtcgttggaggaacgcaacttcgcgggagttggtacctttcagccatcgctcggcttcaaggattttcatcaggcagcccgactcttcaaggatcttcatcatcctggctggggcggaggctggactgagccggagctctacctcccgcgcgggtttgtgggtcaccatctccctcagcattcaggggagagggcgctcaccggcctagcgggagggtcggacttcgacaacgaggggctagtcggcggcgagcgtcgtcagcttcagcgcgttgggctcgctggctcagctagctctagcttggctcccggtgccccctcccgccgcgagagcggttgtcgcgccgcgcgcatcggaggaccgcccaagacgtcgcacgctgctagggcggcgttcgtgttcttgggctgtcctgcctttgctccagtatggcgcctctgcgtggagatggcttccgttgtcggcgctgaggtggtggcggctgaagaagtcctcgtcgccgacgggatcactgccaccatccgcgctccgggcctccggctctttggctttgatagcttgtccttgcccctcgagtggggacgtgggcgaggggctcgttgcagcagcatccgccctgaggccatcgctgctgctgtttggccacctagagcggaggtcgttgtcgctgctgccagagcgggcggcggtgagccacctggggtttcgtcgccccgcaggccctccaatgtggggggttgttcgtatctgcgggggcagaaccggagttccgtttgtaacgacaccttgagtgccggtgtctgttcattgtggctgtcggggcctgaacatgagtccctcagcttggtcagccttgccgcccgaggcttctcttgcttagttaaaggacccctcggccgctcttcgatgagccggagccggaggcagcggtgtcagtgtggaccaaggcagagttggctcgaaacgaggcttcgtcggccagagcctggccgggccgtccactggcgggaccaataccggagtcgggttaccgaggccatgagccgggctgatgtcctcgggggacagctggctgaggcttcggggcggccggctgagccgtctgctcgggccgggttcctggaggagaccctggcggcgatggcccaggcgtgcaggatcgctcatccgaacgcgagttacttctcgcagaaggcgatgagtgag

SEQ ID NO: 30653 - DNA, 1674 bp, Zea mays
  Peptide Sequence Number=SeqID_74028
atgacggcagccgcgaaggacgcggtcgcgccgaccgtgcggcctggctgccagcgggacgaggccacggccgggtgctccaccaggagccaccgcgaccggctcagcagcgacgcggccgccatcgatcacgcctcgtcgtccgagagaaggaaagagggggaaaaggaccaggccaaattcatcggtggcggtgtccgaacccacctcatgccgtccctcgcaagtaacgagccttctctactgcggctacacgtcccccgcctagatcgagcggccagccggcgagaaaatggtggcgtcgagtggtggcgcgtgaggggtgctaccacttccggatctgaatctcgccatcaagtccgctttcttgcctccaggtctgggcgccgtcaggaggagagaatggcctccaggacgtcgccgctggtgttcaagagggtggccgggatccgaaccatcgctgagtccggccgcttcaaggcaagctccttccacttcccaataatcaagctattacctgctttaatcacaatcgctctgcccctcctggtgctttgctggccttcgcgggtcactgtccacagtagtagctgcaaatgcttgggattcgccttgcgactagccgcggaatgcacgattctgatcactagaacgcaaattccgatcaccagaggctactccgttcggagcaagattctactcttaggaaaattcattgtctatgcttcagactataccactcctgctgattctgtcgccacctcggagcaaacaggtggtgaagctgaggccaccttagaaacaggtggtgaagctgcagccaccttggagcaaacaggtggcgaaaccgaagagccgaccattgtagcacctgctaatgaatatacagagcaggaggctgctcctcagcagaagtgtgcaaagatacacgacttttgcctagggataccttttggtggacttttactctccatgggccttattggatttctcttctggaggagccctgcgagtcttacctttggcgttgcacctggccttgccatattggccctggctgtacttagcctcaaggtctggaggagcgggaagtccagcttactgttcatactggcgcaagcaggcattgccgctgcggtagcatggaagcacggccaggcgtacaccactacgaggaagctgcttccgtggggcttctacgtcgcgctgagtctactttgccactcagagagtcaaatgaaggctgcaccatgcaggcttagaaggcagaaatcagagatccttcgtgcccactgtttacgtgtatctgttcgatctatggcttctcggcgctctcccaggattgaaaagaagattgcaacgcttgaaggcaagatagagaagatggagatgaataagaagataaaagaggatctgaaggcagttgcacttggaacgtcaaaggtcaactaccttgattctagaataacagtggcatggtgcaaacgccatgaagtccctattgagaaggtcttcttccatgggcggatcattgtcgactggtggtgtcaggtcttcttccatgggcggtgccgtggagcacctgattgtctcacgtatttgaccagcaacaagggacgaagattgtcgactagtggtctcacgtcgatagatcataactcaagttttttgtag

SEQ ID NO: 30654 - DNA, 1078 bp, Zea mays
  Peptide Sequence Number=SeqID_74029
atgagcctcgcgaagaggtcggccgtgcaccactgtagaagccctcgcggtcggactgccgctcccgcgcatgccgcggaggttggccacgaggcggagcgcggtgtccgggtcggccgcccaggagcgactccacggatgttgtccacgaggctgggtcactgcactggtgtcggagatccgtgggcggtgatttggggtgaggagagagaggagattaggggcggctgggactgcggccgcgcggtttgcgggagagaggagagccgggcggtttgcgggagagaggagagccgggcggcggagattgcggcagcgagcgttgatggcggtcaattcgaggcagaacccgtaccttccatcggtggcctgctcaagacgcccacctcgcagtccgagaccgtcctggaggcctacccccgcgacctcgccgagttcggcaccggcctgcgccacgagatcgagggcaagaaggcccttaccccctctgcctccgggacccacgtccggtacagctgcttcgaggcgcagctgcacgcgctccaggcggatccggccacgttcacgcccgatcccgaggacgccgaggacttcgcgcgtggagcaaggaggcgctctcccagtccaccgccgccaccggtgacggcccccaggcctctgacggcggcgactccgaccccagctccgcctccgggacccacgtccgaggacgccgaggactacgccgtgtggagcaaggggtttatcctggacgagagggaggaggagatcgaggccctatgctacgacagcgatgtgctggaagccatggcggacaggctcgtcccagacgccatgccccgcaaggaagctcggcctccggaactcgccagcctcgggttcgcgcgacagctgctccgctataattcaccggactgtccgcgcgcgcagacgtcagggctgcccataccggtgcaccggacatcaaacagtgcatgtccggtgtgcaccggacacccaggcgggcccacaagtcagaagctccaacggctagaatccaacggcaacgatgacgtggcagggggcaccggactgtccg

SEQ ID NO: 30655 - DNA, 816 bp, Zea mays
  Peptide Sequence Number=SeqID_74030
atgggctacagcctacagaggtcccatgggccatggtccatcactcacagcgttcttcagatggaggtcgcctctgtgtgcaggaaagaaagcgacgtcctctgcagatacagttcgatcctttcctatccacgccggacgccgccccacaccatccccctggatcagtggatcatatggtccaggcatccaggctcagcgtctagggaccagccccagccctggcggccggcgtggcggcacacagtgcccggcgcctccgtccacttcccggcccggcgcgacgttggccccggcgcctcgctcatccgctttcgtcttccggtgcagcacaggcgagtagcgcttgcgacgacccggcccgtcggtctccgctcccttccatcaaggcaagcagtcaggaagacatctgaccgggtcagacgatacagcccatatacgtacgtcgagtcctcaaagttcgattctacgaccatcgcacccatcttggcccaaagtacttccgcgccgcgctacgaacgaggccatccgccgccacacgccgtaggccatgccgctgaggcggaggcgggggtgctggagcgcctggtgtacaagcaccggaaccagcaccgtggcgccgcctatttccaatacctcctcaaggtgaggagggacctcaagcttctgctcggcgccggcctcgcggaggtcctcaacgccgtgttcccagttctcgcatgccgcaagccggccaacacgatcctcgtccccaacaagcagactagagaaacctggtgcaaaccacagccatcaccagaggcttttggggtgtag

SEQ ID NO: 30656 - DNA, 399 bp, Zea mays
  Peptide Sequence Number=SeqID_74031
atgggtgtgggcaagggacggcttgcttccaccatgggcaagaacaacaagcgcaaacgcgagccaactcctccatcggaggattttggtgactcggagtactcagaggaggagttctcctctgagtctgaggggtctccggctcccatccccccgcgtgagtcgtctgacgactcagacgactcccaggggctcgcggcggagggctcggatgagtcggagtactcctcgcatgaagaggaatcggacggtggcagcgaggacgaggacgacgacgacgacgatgacgaaggcggtggcggcggtgacggtgacggcagcggcaggggcggcagcagcggcagcaaggacggtgacggtggcggcagcggcggtggcggcaacagggatagtggctag

SEQ ID NO: 30657 - DNA, 429 bp, Zea mays
  Peptide Sequence Number=SeqID_74032
atggcggcggagactaaaccggctgcggccagcggggttgccggcgagatggaggtggaggcgtaccgccgccttttcccggtggccttccttgagcgccacctcggcgagtccatccgcatcgattcccgccgcctcagagaggcccgccccaccaccgtcgccctcggcgccgtctcctctgcgcatggttccgctctcgcccgccttggcgacaccgccatgctcgcgtcggtcaagctcgaggtgatgtcgcccccggcggagcacccagacgaaggatccgtcgctattgagttccacatgccgcctatctgctccccgctagttaggccaggccgacaagctgacgttgcacccgtcatctccaaggcccttgaagacgttttgacgaggttttttgtttctccgttaacttcagctctttaa

SEQ ID NO: 30658 - DNA, 504 bp, Zea mays
  Peptide Sequence Number=SeqID_74033
atggcgcaccggacagtccagtgcgccaccggacactgtccgaatgctactatttgtacaaatagaagatataatgcggactacactacctgggcttattacatcgcctttgctataactcaggggcacattatggaaggtgatcctgaacttattgatgattctgagttttatcaacttctcaaggagttccttgagtcatgtgatagaggggcatcagattgttacttgatcttcttcagtgagcttccatttcccaactatttgttaaacccaaagacaaaaaaacaatctcctgctaagtcaaagcaaaatttacttgttaaatctttggagactattgttgaggttgaggagaaaactgagctggaagaggaggcagatgttctatctgagatagaggaggaaaaacttgaatctgaattagacgtagaagaagagagttctgaggttgcaaagcttcgccatggtgtggagcggtacgcatatgaggattcccaataa

SEQ ID NO: 30659 - DNA, 276 bp, Zea mays
  Peptide Sequence Number=SeqID_74034
atgacgagtggtcagaagtacagagattgcagacaaggtacgcagtctgatctgcagatttttgtggagatgtataggttttggttactggttttcatctccaaggctggtggccttgaaagagagaaggattaccgttacactgggagtgatggtaaatgcaagtttgacaagtctaagattattgcttcaattcagaacttcagtattgtgtctgtagatgagggtcaaaatgttgctagcctcatcaaacatgggccactagcaagtaagtaa

SEQ ID NO: 30660 - DNA, 645 bp, Zea mays
  Peptide Sequence Number=SeqID_74035
atgagcgagaacaagtcaccagcaaaggaaatgttctgcagcgagattaagtctccagcaaagcaagtgtttggggatcagaacaaatcgtcatcaaaccaaatttttggagatgaaaacaaggagccgtcggcatggggtgctatagagacccccatgtgtgatgttagagtgactgacagcccagtgtcttctcagctttctccaatcgtatgccaagtggtgggtgcaccattatcagaggaactgaatacatgcagtgcaatggaaggaagtgatccgagcaaggagaagaacagtcttgctggacagaaggatggcggcggcctcttggaagtttacataaaatgggagtctggcaacctgatcaaagggctgaagctactgcgcaactcgtgcctttcagatctgaggaagcttatagaggctcatttcgaagaagtgggaagcaaacagcagcagcagcagcagttcatcttccttctccttgggcatgtgcccacggttcaattcacagagctctacagtgacagatggacagctcaaaggataagaatgacggacctgaacacacttgaagtagctcaccgtgacgccgctagagttggtcagtatgtcggggaggatgaggacacctttctttga

SEQ ID NO: 30661 - DNA, 795 bp, Zea mays
  Peptide Sequence Number=SeqID_74036
atggctgccccgcgaaccactcgtcccgtcgcattaactctgcggcaggacaggtggcacctttggcaggagaagcaggcgacgcttcgcttccgccataatgaccgcgtcaaaaaagggaccgggaaaggggataccccgaaagggatccttctccgcgaaggaaacgggccccgagcccccctactgatcagaggttcgaaggctggcccctccgaagggttcaacagccgcctcagagcactcgggctccgcgcccactactggctggcccccgaagggttcgacagccgcctcagacgcagagcgagggatgaccctgggtacgttcgatacataaccaaggctcgggctacgctcccgagtcacttcgccgctccactgaccagcctgacaagaagacagcgccgcccgcgtcgctccgactgctgtgccactcgacagaactcgggctcggccccggaagacgacgaacaccgcctcgcccgaccccagggctcggactcgggctcggccccggaagacgacgaactccgcctcgcccgaccccagggctcggactcaggctcggccccggaagacgatgaactccgcctcgcccgaccccagggctcggactcgggctcggccccggaagacgacgaactccgcctcgcccgacccggggctcggagtcgacctcgaccatggaagacagactcgaccttgacctcggaggagcctccgcctcgcccgacccaggactcggaccgaccacgtcacagggggagccatcattaccctaccccaagctag

SEQ ID NO: 30662 - DNA, 270 bp, Zea mays
  Peptide Sequence Number=SeqID_74037
atggccggttcggccgcccgccccaccccgccggctcggccgctcggccgccccgcgccctgccccgcgcccctgcgcgccctgcggctcggccgccccgccccctgctcggctggctcggccgccccctgcgccgcccgccctccccagcccgatccccccccgcgcgcccgcctggccgccggttcaaccggccggctcagcggctcagccgcccggccagccccgcccgcgcccgcgccccgcctagggccggttcaaccgccctag

SEQ ID NO: 30663 - DNA, 420 bp, Zea mays
  Peptide Sequence Number=SeqID_74038
atgcctcgcccgagggtctcctcaggcagcgggtgcacccttggctcgcccgaggcccagctcgggcaggcttcgacaagaagcaaccttggccaaattgcctcaccaaccgaccgtatcgcaggaaaacagcgccactcaccccgctccgactactgtgccagccacccgggcaaggctgacaacagcaagttcagcctcgggcgcgacaggaagctccgcctcgcccgaccttgggcctcggcctcgggaggaggtctccgcctcgctcgaccccaagactcggcctcagcctcggcctcgggaggaatcacgtcctcgcccgatcccggcctcggcctcaggagaagtctccgcctcgcccgaccttgggcttggaccgaccgcgccacaggggatacatcattaccctacccctag

SEQ ID NO: 30664 - DNA, 1995 bp, Zea mays
  Peptide Sequence Number=SeqID_74039
atggagcgggagcgggagagtgacaggtgcctggacccgcagctgtggcacgcctgcgccggcgggatggtccagatgccggcggtgcactccaaggtgtactacttcccgcagggccacgcggagcacgcgcagggccccgtggacctccccgccggccgggtccccgcgctcgtcctctgccgcgtcgccgccgtccgcttcatggccgatccggacaccgacgaggtcttcgccaagatccgcctggccccgaccgtgctcgccaaggacgtgcacggcgtggtctggaagttccgccacatctaccgcggcacgccccggcgccacctgctcaccaccggctggagcaccttcgtgaaccagaagaagctcgtcgcgggggactccatcgtgttcatgcggacggagaacggggacctctgcgtcggcatccggcgcgccaagaagggcggcatcggagggccggagttcatgcaccaccaccaccagcagccgcccccgccgcagggcggcgggtacgccgggttctccatgttcctgcgaggggaagaggacggcggcaagatgatggccgcggccgccacgagggggaaggccgccagggtgcgggtgcggccagaggaggtcgtcgaggccgctaacctggccgtgagcgggcagccgttcgaggtggtgtactacccgagggcgagcacgccagagttctgcgtcaaggcgggggcggtgcgcgccgccatgcgcacccagtggtgccccgggatgaggttcaagatggccttcgagacggaggactcgtcccggatcagctggttcatgggcactgtctccgccgtgcacgtcgctgaccccatccgatggcccaattcaccctggaggcttctccaggtcgcctgggatgagccggacctgttacagaacgtgaagagggtgagcccatggctggttgagctggtgtcgaacatgccggtcatccatcacctcacagccacgcccttctcgccgcccaggaagaagctgtgcgtcccactgtacccggagcttccgctggagggccagttcccggcgccgatgttccacggaagccccctcctcggccgtggcggcgccggtggcccgatgtgctacttcccggacggcactcctgcaggcatacagggagccaggcatgctcaattcggcatatccttatcagatctccacctgaacaagctgcagccgggcctgtcaccgcacgggctccaccgccagctcgaccacggcgtgcaggtgcaggtgcagcagccgaggatcgccgccgggctcatcgtcggcggccacccggcggcccgagacgacgtctcgtgtctgctcaccatcggcaccccaaagagcaagaagccaccgtcagacgtcaagaaggcgtccacggcggcggcaccgcagctgatgctcttcgggaaagcgatcctcaccgagcagcagatatcgctaggcggcggcaatgtcgtgccggcgctggcgaagaagagcccctccgacgacgacgacgacgtggccgagaggacggtgagcaactcggacgtgtcgagccctgggaggagcaaccaggacggcacgtccagtggcggaggcccggcggcgcgggcgtgctggcaggaggaggagtgcaacaacagggcggcaggttctgaggacgacctcctcgggcactgcaaggtgttcatgcagtcggaggacgtcgggcgcacgctggacctctccgccgtcgcgtcgtacgaggagctctaccagaggctcgccgacatgttcggcgtcgacaaggccgagctgaccagccacgtgttctaccgcgacgacgcttccggagcgctcaagcaccctggcgacgagcctttcagtgagttcaccaagaccgcccggaggctgaccatactgacggacgagagcagcgacagcttagcgagttcaagtggccataaccataatgcagctgcctttggtcacagtgactga

SEQ ID NO: 30665 - DNA, 498 bp, Zea mays
  Peptide Sequence Number=SeqID_74040
atggcgcttgaactcggggaaatcgttgtcacctctagatccggcggcggcctcagatctgagaattcgaaaggggaagtcccacctgaggaggccaatggtggcgcatggcacggcgagggctgcgcgtggtcccgaatgggcggtgctggcgccagcagaggggtgcctaatccacgcacgggattgccttccatggagactgcggacgccacaacgcggacacggacgctgatgccgggcggaggcgacgatctggggcagaggggtacccaatccacacgcgagatcgggctgtcgcggacgcggatcgagggccggcgcggtgatccggggcagaggacccacgttccatggatagcggagagccggggcggggagagagaatggggcgaggagggcctggcgggggcattggctgtgagcacgacgcgattgcgcgagggagaggatggcagaatacggtgcaatgtgaacgcctacaataaagccttatag

SEQ ID NO: 30666 - DNA, 165 bp, Zea mays
  Peptide Sequence Number=SeqID_74041
atggagctcgtggcatcaagtggtgtcgcgctcaggctcgcgctcatctgcaacaagacactatttcccggcaggtataacgggagccctgggcttcgaatattaaaggaagcccaggtcggctccgaggtctggtccgctgagacaggcgcgcctgtgtttaac

SEQ ID NO: 30667 - DNA, 288 bp, Zea mays
  Peptide Sequence Number=SeqID_74042
atggggggctcggagcccggttccttcgcggagaaggatccctttcggggtatccccctttcccggtccctgttgcaagagatagagaaagaggaaaacggaaaaggatctgaaatcggacgacgtggccaactggcgcgccggttgctcgacgcgtgggcctgggttcccaagctggcgtgtcagaagtcggagaagcgcgtccatctggcgcggttgcatgccgcctgcatggctgcccgccccttctgcccgttggtctgggcgaaaatggggggtcgcctgtaa

SEQ ID NO: 30668 - DNA, 708 bp, Zea mays
  Peptide Sequence Number=SeqID_74043
atggcgctccatgttgatgtggcgggcccgcgtccgaggccgggcgacgtgggcgttcctccaaagctggggtcgaatctgtcttccgttgccgaggccgagcccgagcccctgggtcgggcgaggcggaagtcgttcggcagaggccagggcggagtccgagccctggggtcgggcgaagcggagttcgtcgtgttccgggtcttagcccgagtccgagccctggggtcgggcggagcggagttcgccgtcttccgggtcttagcccgagtccgagccctggggtcgggcggagcggagttcgccgtcttccgggtcttagcccgagtccgagccctggggtcgggcggagcggagttcgccatcttccgggtcttagcccgagtccgagccctggggtcgggcggagcggagtttcctatggcgcctctggcgagtcggagcggcgcaggcggcgctgtcctcccgtcagaccggtcagtggagcggctgagtgacggcggtcacttcggctctgccgggggcgcgcgtcaggataaagggttgcttcttagcgaagccaaggcctcgggcgagccggagatgtgtccgccgttaaaaggggggcctcgggcgggacggaagtccctcgagctttatgctgatgggggttaccagctgagaattaggcgtcttgagggtacccctaattatggtccccgacagtag

SEQ ID NO: 30669 - DNA, 663 bp, Zea mays
  Peptide Sequence Number=SeqID_74044
atgggcgggggcctcctggcagcggcatccaccctgaggtcagcgttgccgctgttcggccccccggagcagaagtcgtcgtcgtcgccgctgctggagcaggtgacggcgcgccgttcgtcggccttccgttgctccgcaggccttcccccttggagtggggttgttcgtacctgcggagggggaaccggagttccgtttgtaatggcacttcgaatgccaccggttgaccgaggccccaggggtaaccggttgagccgcctgctcgggccggattcccggaggagtccctggaccgcggcgccgcccgaggctgggtcgggctttgctgaagacgttgtcgatgccgagggtgctacggctcccttcagcgtgaagacccgagcctgcaggatcagatcatcttgtagcgtgtgctttctgcggccgccgaggccagaagaacacaccctcgccgcgcttgcgaagctgcgtcttttttcctcttgttttgagcatcaggactctgtcggtaacagggatgtttgtgtgagcgagagctgcttttcgcggaagggacgagtgaggtatccgtatcccggaggcgtgggaatccctcggctcggtcggccttgcggcttacgcgtactttcactcgtccatgaggccctgtccccgacttag

SEQ ID NO: 30670 - DNA, 411 bp, Zea mays
  Peptide Sequence Number=SeqID_74045
atgacgacggcggcccccggctctcttacggaagcaggacaacgtcagcagggactcgaccgctacaacagctgtccctccatcaggctccgccgcacctccgacagccacgacatcacgccagcaggatgcccagatctctccggctgccacattggcattcgtaacaatgaagtaaggggatgtgaaagcgcttcctcggctaagtgtgctcgaaatagaagtaagggcgtgtacaacctagagcctctcgcggctaaaaactttatcatacaatgggatgtctttaaaatctgttacatcattaatgcagtgagaaacagaaataacatcgaattacaaatgtaccttcagcttgacggagatgaaagtacaagcgtgacgcaaaagcgaatgtcaaaatcagcgtga

SEQ ID NO: 30671 - DNA, 96 bp, Zea mays
  Peptide Sequence Number=SeqID_74046
atgggcgtgcctgccatctgcgcacgcagagcccgcattaaatgcgcggcagagagccgttggtgcttgttgctcatcaaggggagtgggaagtag

SEQ ID NO: 30672 - DNA, 837 bp, Zea mays
  Peptide Sequence Number=SeqID_74047
atgacttctcacggatcctcggatgaagggaatgcacagtcccacactgatggacttgcacgagagggtttcccccgtatcttgtgggaggtacttcagggcgctggttacatgacacctccccagtacgcggtgcagcagttcgagaagcaccgagtgccccgctgtaggccaggctggcgttcgctggactctaaatcttttgggtaccgggctgaggatactatcgaggcgatcgctcttcacagactgaccactttctgcagattccaccccttggagctgtccactcacaccattggcttgttgcccgtggagaaggaggacgacccaatgtggaaggaccgagtggagcatgccaaggacatttgggctatctacctaggtcagactgctcacttgacagtgcggtgcatgaatgccctgtatcgtctgcaagtgatgcgtgttgaggcaatgtcccatctgatggcattgttggaggcgaccaagatcaccttggataacagagaggaacttgtggttgacttgtccaccgagatggtggaaaaggacttacaggtggagcaattgtcaaatgagatccaagagcttgaagaactagtgggaacaagggagaacaccatcaaggttctcgaggatcagttgatcaacacccagcagcagcttgcagaggctaaccagcacctggatatgcatcaccaggagatccaggacatggaggccaatgaggatgtcgacatcaagggaggagaggagcctgcctccagcttggacactgctggctcagggagaccaccttcccccgagtcgagtgttgcctcgtttgctcactag

SEQ ID NO: 30673 - DNA, 141 bp, Zea mays
  Peptide Sequence Number=SeqID_74048
atggccctgctctccacagtggaaacatgctctattttcaacctgagctggtgctgcctgactgttctgctggtgctggaatgtcgggaaggtgatggtgtcggggttggcatgggtggcaagataagactcccaccatga

SEQ ID NO: 30674 - DNA, 918 bp, Zea mays
  Peptide Sequence Number=SeqID_74049
atggcttgtcttaggcacactacacgaaagtctgtcatccccttcttaccctcccgccttgctgagcgtccgcctcgccgtcctgtgaccggacagtccagccacttggagaggctgcaccaccgcctgcatgaggagcaggaacgtcgacgacaggagcagcagggctcttctttctcgctccagcaggagatagagtctgtgaggagctgctcccccgtgcttcctctagaggcgccccatgcaccaccactgggcgacccagcctctggagtagctgctggaggagacccagacgacggaggtggcgacgatagctcaagccacgacactgacttttctactgaccaggagccggatggatgggttgctcggcccatcactcgcgacgctgctcgcgggtgtcactttccacgatgcgctcgacaccctgctacgtcgggcactttgaccgacaacagtctccagggtgctgaggtctgcttaaagcactattccatctctgagcgggactcagctgaggcggccatgcaagatgccgcacggcgagcgctttcgcactactgctcagtgctcggcggggtagccgatggtctcaacctgaagtattacccccgccgtccatctggcagcacaggaggcgtgattgtctcacctgttggtgaggacaatcctaggttgagcagcacagtcaacccagccgccgtgctaaacccggagctggaccatgcactagacgagctgagtagggctcatgctgagatcgcccagctgcgggctgagcgcgtggagcgtcgtcatctggacggtggttcccccgctcccgtcgggactcagcacccgtaccgctcacctcggcgtgtacaccagccttatggcaatcccgactgcaagaccaagatagatttggaaccatag

SEQ ID NO: 30675 - DNA, 287 bp, Zea mays
  Peptide Sequence Number=SeqID_74050
atggtggcgcagggacgagatggggcgacggtggcgaagctctggctgcacaggaagaactctgatgagcgcggaccagagggattaggggcgaaccgaggggtgttccaggtggcgggtgatagggtggagcttaccggagcaaatgacgtggcaaggagttccacgatgaccatagaacgggcggtggacgtcgggcgcggggctcaaaaggggcgcgggcacggggacgtggcggagaacgcacggacgtgggcgcgtccacgacaggggatcgtgggcgagag

SEQ ID NO: 30676 - DNA, 549 bp, Zea mays
  Peptide Sequence Number=SeqID_74051
atgtgtcgcaaccgatcgatcgaggaggttgtgcataggtgccagactgaggcgctacatgatgacttccgaggcttcacaacctccatgggtcatcccttgccacagcgccctcctctgcctctgaccccttcctatcccacgaaccttaatgaatggcaccaacaggagtatgttgtgccatttgttactcctgaggatgaagccgaggagtttgacgactccttctttgcttctgctcctcctcctccctacccgggtcttggacccattcctggtgaccctaggcctttcggctctggtcaccctcctcctccttacaagggtcctggacctattcctgttgaccccagaccttccggctcaggtcaccatcaccctcctcctccataccagggtccttcatcttcatcagattttccttctgctgatgagccccctcgggaatcgtcaattaaagaagatatgatgtgtgtcttcttttcggagtacccttcctatcctcctccttcgggtcattatggtggtgatgaccctagggacaattga

SEQ ID NO: 30677 - DNA, 441 bp, Zea mays
  Peptide Sequence Number=SeqID_74052
atgggcaagagcaagaaaggcggaagctcctcgcaccattccgacgacaagcggaagagcgagccgactcctccttcggaggacttcggcgattccgagtactcggaggaggagttctcctccgagtctgagggatcgccggtccatgcctctcccccggcatcgtctgacgactcagacgattcccaggggattgctgcagaagtgtggacatacatccgggtcgtcgagagcgctgggctcaagggctcggatgagtcgaaggtctcctcggacgaggggaactcctctgactcgtccgaggaggggagcgacggtgacgacgacggcgagggcgacgacgacggcggtgatggcgatggcagcaagggcgacggcaagggcggtagcggcatcgacagcggcaagggcgacagtggaaatggcaaggccagtggctag

SEQ ID NO: 30678 - DNA, 315 bp, Zea mays
  Peptide Sequence Number=SeqID_74053
atggaagtgtggtcggaacttggatggccaaatcgccgcgcggagatgatccgccagtgtggcgcagcccacgctggccaatgggacacccgcttggatctgggcaccagttggggtctgcgatgcaaccgcagtgaagtcgtagtcgaggttgcgaccctcgatgttttgtcggtgctctcgcgccctctccagagagatgcaggcatcctcacccgcatgcctgcggttgagctctgcccgcaggtcattagacctctccagagagactggagcatcctatcccacacgccggcggttgagctccgcctgtag

SEQ ID NO: 30679 - DNA, 480 bp, Zea mays
  Peptide Sequence Number=SeqID_74054
atggagctcggtcctcatggctggtgtgcgaggctggccagacatcatctccactgcacgataattcactttgagagggctgagaggatcaacgactccctcaccacgctcgagaaggagaaggatcggctgtcgacggcgctgcgtggtgctgagcttgattatgattcagtggattcagagttgcaagaggtgcttgagtctcgcattgctgcagaggaggaagatgctgccctcatggagcaatttgcgagggggagcattaggggggacattgctgcagaggcaaaagctcttaacttcgaaaaggacgagctgcatggtaatttggagaaagccgttgctgatctagagaaaatagaaaaggatattgtagcaaccacgaacaagatacaggaacgcgtcttcatcctctttccccaaggctacaactacagcgcttctcctcgaccatcattcttcattgtaacccgatggtga

SEQ ID NO: 30680 - DNA, 978 bp, Zea mays
  Peptide Sequence Number=SeqID_74055
atggatgacttcgaggagttccagatggctcgtatcaggtgcactgcacgtcagtccagtcacctgcagagactgcatcgtcgcctgcacgaggagcaggagcgccgacgccaagagcaggagcagcaggactcttccgccttgcctcagcgggaggtggagtctgagaggccgccttcccctgcacctcagccagagatgcctcctgcaccacctcatggcatcccggctgctggaggagaccctgacggagacagagacggcgacgacgccggtggcagttcgagccacggcacggagctttcggaggagccgaagccggagggatggatcgctagacccatcactcgtgacgccgctcatgggtgtcacttccacgaagctctcgataccctgttgcatcgggccttcgaccgacacacttggtccatcgagtaccgttgtgtagtctaccagcatcatcgcaagttatacccataccagtgggaggctacttgcttggtgcgccgtccggacaatgatctctggggtgcagaagccttctcagagcactattctattactaagagggatactgcagaggcagccatgcaagatgcaacacgacgggcactttctcagtattgctctttgttcagcggggtagctgatggcctcgacctgaagtactaccctcgtcgttcgaccggcagtgctggaggtgtgattgccttgctagttggtgagggtaatcccaggctgaacaacgtggtcaacttggctgtcgtgctcaacacagagttggaccacgcccttgatgagttgggcaaggttcgggcggaggttgcggaattgcgtgctgagtgcacagcacgccactatttggatggtggttctcccgcccctgtcgggattcagcacccttaccattcaccgccccgtggtcgcttcgactatggtaccccagactgcaggacccagatagatttggatccctag

SEQ ID NO: 30681 - DNA, 1107 bp, Zea mays
  Peptide Sequence Number=SeqID_74056
atggccggcgggtttattggcggaggcggggcggccgccgggagggccgagttgtacgagggcaagatcaccggctacttcatcctcgcctgcatcgtcggctccttcggcggctccctcttcggctatgacctcggagtctccagcggcgtgacttccatggacgacttcctcagaaagttcttcccggacgtgtaccggcggaagcaggcgcacccacacgagacggactactgcaggtacgacagccagctactgacgctcttcacctcctctctctacttcgcgggcctggtctctacgttcggcgcgtcctacgtgacgaagcgccgcggccggcgcgccagcatcatggtgggcgccaccagcttcttcctgggcggcgccatcaacgcggccgccgtgaacatcgccatgctcatcgtcggccgcgtgctcctgggcgtcggcatcggcttcggcaaccaggccgtgccgctctacctgtcggagatcgcgccgtaccgcatccggggcgccgtgaaccagctcttccagctcaccacctgcctcggcatcctcgtcgccgacatcatcaactacttcacggaccggctgcacccgtgggggtggcgcctctcgctggggctcgccatgggccccgccaccgccatcttcgtcggcgcgctgttcctgcccgagacccccaacagcctcgtggagcgcggccacctggaggaggcccgccgcgtgctggagaaggtgcgcggcacgcgcaaggtggacgccgagttcgaggacctcaaggaggccagcgaggccgcgcgcgccgtcccgggcacgttcaggaacctgctcgccctgcgcaaccgcccgcagctcgtcatcggcgcgctcggcatcccggcgttccagcagctgtcggggatgaactccatcctcttctactcgcccgtcatcttccggagccttgggttcggctcctccgccgcgctttactcctccatcatcaccgggctccatgctcgtggttggcgcgctcctctccatggtcgccgtggaccgtctcggccgccgcttcctcttcatcgaggctggcatccagatgatctcatccatggtttgtaa

SEQ ID NO: 30682 - DNA, 372 bp, Zea mays
  Peptide Sequence Number=SeqID_74057
atggagctggagctagaccagttcatggctgtgtaccatgggatgctggtggagttcacgcgaaagatggagccacagctcagctcgctttccacctccggaaggtcgctgcacgacaccctttcgcccgggcgctggcagaagaagcaccatccccatgaacatctcccagagcaggaagaaaggcgggatcggcagcgccgacccacaggagaggttggagatgaagagcacgaactccccggcggcgagaccgccgagaggagaagcgtcggcgcggatccttccggcaaacgccggcgcgccccatctgagcaggttgcgcaccaggttgagtgccacctcggactagaagcgctcaggatggactag

SEQ ID NO: 30683 - DNA, 171 bp, Zea mays
  Peptide Sequence Number=SeqID_74058
atggctcggttggccggtctacggtggtgggtgctcgggcagccgctggcacaccgcgcgggcgcgggcagtggcacgggcttggcttggcgcggcatggggcgcatggggtcaggcgccgggcgtgctctggcgaggtcagggcacgttgaacacgtggagatacattag

SEQ ID NO: 30684 - DNA, 312 bp, Zea mays
  Peptide Sequence Number=SeqID_74059
atgtctcaactaatgggcttgttggaggctaccaagatcacactggataatagggaggaacttgtggtagacctatccactgaaatggtggaaaaggacctccagtatgcagggtatcatgccgacactgatgagaagaagagggacaggttcaggaggggcctcagtactaagctccacgaccgtctcaacatagtcagggccaacaattacaatgagttagtcaacctagcaatttctcaggaagactgcatcacagcccgccaggcagaaaagaagaggaagacccctgtggcaggaccatcagcctag

SEQ ID NO: 30685 - DNA, 687 bp, Zea mays
  Peptide Sequence Number=SeqID_74060
atgtccggtgcaccaggggactccaacttcgaactgctcggcttcgggattttccagagaccactccgctataattcaccggactgtccggtgtgcaccggacatgtccggtgctccaaggaagggcggcctcaggaactcgccagcctcgggttttcacttcagccgctccgctataattcaccggactgtccggtgtacaccggactgtccggtgcatctgcagagcaacggctacttcaggcgccaacggctacctgcagcgcatttattgcgcaccagcgcacgcagaggtcagacacgcccatgctggcgcaccggacaccctacagtgcatgtccggtgcgccaccggacatcaaggcgggcccagaagtcagaagcttcaacgtcggaatccaacggaactggtgacgtggctggggcaccggactgtccggtgtgcaccggactgtccggtgtgcaccggactgtccggtgcgccatcaaacagacggcctccaccaacggtcaagttggtggttggggctataaataccccaaccaccccaccattcattgcatccaagttttccagtttccaaccactatacaagagctagcaatcattgcaaagcacaccaacaagagatcaaatcctctcccaatcccattcaaagccctagtgactagagagagtgatttgtag

SEQ ID NO: 30686 - DNA, 174 bp, Zea mays
  Peptide Sequence Number=SeqID_74061
atggtgggacaagtgcggtcactgcacggcggcagccggggtcagtggagcattgtatgccaaggcggtaccattcaggaaatggttgatggtgtgacttggcctaccaccctgccaccgggttggacggtcgagtgggatgttgctccggcaggagaggagcacgaggagtag

SEQ ID NO: 30687 - DNA, 243 bp, Zea mays
  Peptide Sequence Number=SeqID_74062
atggatcgttcggggaggagtgcgcacacggtgcaggcctcaccaccactgaattgctcgcaggagagattgcttcaccaccgggccgcaccttctcgtggtcagacttcttcgtcgcttgaccgccgtttgttacttattgtccatgataagatcattatgttaattagaacatggagcgaccacccgagaaaacagtgctaccacaagggtggtatgggaatcccttggctgactaactag

SEQ ID NO: 30688 - DNA, 132 bp, Zea mays
  Peptide Sequence Number=SeqID_74063
atgacgaccgacaggccgcttgagctactccacatggatctattcggcccgattgcttacataagcatcggcgggagaaaaatctcatacccaagagatcttaaatggatgcttgagacgggctcaaaatga

SEQ ID NO: 30689 - DNA, 2754 bp, Zea mays
  Peptide Sequence Number=SeqID_74064
atggtggctctggcgaagtacgtctgggcaacgacttcgtacgacgaggccgaagtcgaagaccacccagggctccccgcggccattatgtgttctcatcattatgtggcgtacccgccatttgaagtagtggaggatgatgagaatgaaggggcccttcggatcgctgcccgtacgagtagtgggcgcgatctagttgaggaattcatcgggtatggggtgtggcccttggcgcatggatgggcgttgggcgaagtatgccctcgcgagatgccctccctgggtaggcggaaagtgcgaagtccactttttgctttagatgtgcgaggtcgggatcctgccgcggtcgtgcgcgaagcggaggatggggcggtgcgaattgtggggcgttacgtgccgaagacagagggtctgcagagctgggatatccatgggtccaatgacaagttgaatcgagtcttcgaattgaaccggttgccgtatggtggttatcccggggaagacgccgtcgacctccgcgggaagaaaccgatgggtgggatcgaggaagggccttcgcaggatgctgccccggccgctaagaagaggaaattaggtactacggtggggggaatgggggtgtctgataattttgctgtggagttgatggggacatgcgcggcccccgggggaaggatatcttcgcccgagctccgggagtcttcgacgcgaatgctggaggttaccgggggtcgatggccaaagaatcttccgatcccctgggcggagggcaaagacatgtctacgtctcgtatagctcgtggcttgaggattttcccttacggactgaatattgttgttgttgtgtcggtagtgatgaacaaggaccatcaggacgctgcacagaagcgccggacggtcatcaggatcgcagatcctaggcgtgaggcgaagaaggcgtgggggagcgtgaaggctacggcccccagcagcagccagccgatgccggctgcgaaaccggccgcgcccgaatccggcaagtcgtcggcgagcgcgaaggcatccggtgccggcgggaccaagcctcccccggtcgaggctgtgaaagtgcgggagctgccctcgccgggaaaacatgttgccgacttcggcacgaatatcagcctagaggactattttgttggtagggccgaggagggacaaatggttgttgtcccgcctttggtggcaaccacttcgccatcggcggtggtaagggcgaagggaactgcacaggacccgtgggctgccttctgcgcaagtggcgagattctgacagccgctgccgctaaggacgtggcgggcaccatgtcccagcggctgagggatgcatcgcagcggctgtcgcagcagctgagtcaagcggccgacttcgccgaccgtgttgtgtctggcatcctcactgcggacgtggctgccgaagtcgagagacttcgggcgcagcacgcggacgccgtccgggagaagtcggctgcggagagcaaaaaccgcaggctggcggagaaagtggccgccttagaggccgagaagatggaccttcggcgccagctggtggaggaaaggaaggaggcgaaccaggccatcgctgaggcgcaggctgcgcaagcggaggccaaagtggcgcgggcggagggaagtctcgccagccagcgtgccgaggagtgggagtcgaggttcaacgccctgcgcgaccgtgtggacaaggccgagacctctacacgctcggaggttgagcggacgctcgcccagttcgtgaactcgtaccgcgagctgggtgcgcatactgcggactttgaggtgcccgaccgggaagcgggccttcgcttcctcaagtggttacaagaggagttgctggtactcctgaccatcgtcgagggtttcatgtccttttcctccctcgtcacctgcgagggggccatgaatgcgttgtctcgcgagggctgcagacactatgaggtcttcgaccaatcagacgagagctttgagtgcgagatcttcaaggccggagaccctgctgtgaagcagttagcgggggcactttttgacaggatgtgggggcgcatgatggagcgtgccgaggacgtcgaggaccttggaggtctggtcggcgtgccgcctgaggctgcggagggtaatccggtgctgcccttggatgccggtgaaggcccctcggccgtacccatgcctgctatgaccggcgaagaccctgcgtcggcccctgagccgacggtcgaaggtgcccctgaggtggtggcggagccaacagtcgaagaccccacggccgcagccgtgccttcgcagtctgatgattctgggatttcggttgtgtggacggaagagttttcggaggaggacttggattattttgcagccttggatgtggctgcgacggaggcttctccgcatgtaatggatgctgaagttcttcctggtccgagtgctgggcgtaggcggcgaagggcggtggcgaagcggagagtgagtgaggtggagggtggtcctcttcgtgtggacggggctagcaagcgggaattgttgtcctcgccggttggggcgagtataggtgagggggagttgcgaaatctttttgagggtgagaagttgaggataatgctgttcaactacagggagatgggtatcatcccgaaggttgagccaatcctggctgcacctgtaggcgacttttgcacggggtcttttggagaagacttcgactttgggcacttattgcgctag

SEQ ID NO: 30690 - DNA, 2283 bp, Zea mays
  Peptide Sequence Number=SeqID_74065
atgccgacctcctcttcttccgctgccgctacgccgccggccgattcctcgccgccggccgccgcctcgtctgaggagacgctgagtagtttgatggcggaggagttgcgcgccggcgattctgttgattttggcgtgtcgcggatgtcgtcggtccgcgtgcaagatatgcagcggttgggttacttcggcggcggagttgctcgtgccccagggacagaggaagtccccgagccggagggcgagttggttgttttcgaggcattcttcgccgccggtctccgcttgcctgcgcaccgatttgttggcgaagtcctgcgcagggtttttgaattgaatcaattgccgtatgacggctatcctggtcaagacgacgtggaccgccgtgggaagaagccggtggtggagactggagacgaccctgcgccggcggccgccccatcctctaaaaagagaaaattaggtactgctatgggaggacttgaggtttctgatagttttgctagagagttgatgaggacgtgcacggccccggggggaaggatgtcttcgcccgagctccgggagtcttcggctcggatgctgagggttaccgggggttgctggcctaggaacgttcctatcccccgcgcggctggcgaggacttttttacatctcgcatggttcgtgaatggagagtttttccttacgggcggaatattgctgctgttgtgtcggcagtgatggacaaggaccgccagggagcagcacaaaagcggcaggcggttgtcaggctcgttgaagctaggccgaagaggcaacgagggtctgcgaaggctgtggcccccggcggaggcaagccaccgctggcggcgaagtcgggcgcccctacgtctagcaaagcgccggaggcgacggcaggcgccgggggctcaaaatcgacgaaggcagtgccgccgtccagcagagtgccggaggtcgcgaaggcggcccgagcgttgccgtcggcgggcaaacgtgtcgccgacttcgccaccaatattagtgtggaggactatcttggtgggtcggacgaaggccagcttgctatagttgtgcctgctgcggcgacaacgacggctgccgtagcaccgaaggcgaagggcggggctcttagcgccggaggtgaggtggcggccctcgcggctgtcagggatgagacgggcgctgcgtcccgccggctgaaggaggtggtggagtcgctaagtcaggtggctgacttcgccaaccgcacggcgtcgggggccttcacggcagttgtgtctgccgaagtcgagagacttcggacacaacatgctgacgccgtccgagagaaatcggccgccgacagcaagtgccgcaagctggcggacaaggtggtcgcgctggagggagagaaggctgacctccggcgccaactggcgggggagaggagggagaccaacgaggccctcgtcaaggcgcaggctgcgcaggcagaggccagtctggcacgggcggagggcaatcttgccagggagcacgccgagcagctgcaggagcggctcatcgccctggagagccgcgtggagcgggccgaggccgcgacgcgcgcggaggccgaacggacgcgcacacagcttatggatacatatcgtgagctgggtgcgcggaccgaagttccggaccgagagcctggacttcgttgtctggaatgggtgcaggaggagctgcaggcactccccactgtcgtggaggggtttatgtcgtacgcctccctggtcacctgcgagggggcgatgaacgcgctctcccgcgaagggtgtcggcacttcgaggtcttcgaccaggccgatgaagattttgagcgagatatctataaggttgaagaccccgtagtgaaggaatccgtcggggccatctacgaccggatgtggggtccgcacggtcgcgaggtggtcagggagcgggccgagacggcgagggctcaggcggcgcgtggcgagcgggtggacgacttcggggcgttgaacagcgcgctgtctgacctggagccgaccctggcggaggccgtgtctggggtcgctctggagccaaccccggagacggcggaagacgcaccggatgcccccgcatccgctgtggccggcgaggacctgctcccaaaggtggccgaaggcgcgcctgatgcccccgcagctgctgcgccgagtgctgaagatcccgcggcggtggcggcggaaacaacagcggaagcgacggcggagccaacggcggaggctcccgcgacgtcagggccttcgtag

SEQ ID NO: 30691 - DNA, 321 bp, Zea mays
  Peptide Sequence Number=SeqID_74066
atgaagatgacggtggcgctggctcaatcgagctcggggaagggggaagaggtggccgaggccgggctgaggagttggggagcttggggtggtccttttataggcggccaggggaggggggaggaaggggggggtggcgagcacccagcgacgcttaccgcggcggcgatgatggcgcacagtggtggcgacgggatagctcgggcatatggggtgacgggatggctcgggcaggtgcagggagacagggacgcaaggcgccaaaccttgctggcgagcgcgttaatggcccttttgttttgggcgggtggtgcccgttag

SEQ ID NO: 30692 - DNA, 171 bp, Zea mays
  Peptide Sequence Number=SeqID_74067
atgctggtagactacacaacggtactcgatggaccaagtgtgtcgactgaaggctcgacgcaacaaggtgtcgagagcgtcgtggaagtgacacccgcgagcagcgtcgcatggggtggccttgttcctctcgttatagcttccaagagaaggagatcgttgatcgggtaa

SEQ ID NO: 30693 - DNA, 312 bp, Zea mays
  Peptide Sequence Number=SeqID_74068
atggagaatggaaccgacctaaaggcatttgagaacaagtccttaacacttatcttgctaagtgcttcacccagtggttttgttctccacaatagaagcatgtgcggcctcctacttgcgctggagctgcttggttgttctggttggttgctagggcaagaagacgagctgcttggttgttctgacgctgatagtgacttcctccctgctggttgttctgatggtaccgctgatgctgctgctactgcggaaactgcctctggtactgttgctggtgctgacgttgatgctggtgttggtgaccttgcttga

SEQ ID NO: 30694 - DNA, 542 bp, Zea mays
  Peptide Sequence Number=SeqID_74069
atgcggacgtcgaggaggcccgccagggaggccgacgacagtgcacgcgtcggcgccggtcatggtgtccgcacccgtggtagaatagaaggggtaacgacggatccagccgcgaaggccacggcagcgacagatccagccgggaagacgcgatccagtcaaagggacgacggaacgagccgcgaagatcgcagcaacggtgaatccggccggaaaggccgcgacagcgacggatccaacgagggcgatgaaggggtgggcggcggggcgggtccagccgggcagccggtgttgagcggcggcggatcggggcggccggtagcacggggaggcgacgcgtctgcggccaagagaccactaggggcggcgccagcgcagcatggaggggggcgccaagggcggtgcatatcgtggccgccggctgcagggggaggcgacgcggccaaggggtggggcgaccacgtggagggagtgcgcaaatccgacgtgtctgaggcggcggcggcgcgctgggctctggcgtcggctcggcctggagagag

SEQ ID NO: 30695 - DNA, 753 bp, Zea mays
  Peptide Sequence Number=SeqID_74070
atgccatatacgtaccgtgaattggcccatagggtggatgaggctcttgggttcatgactgcagcagggcttacagtcgaccacccgataatgacgactactgacttctggacctcgcatgagtgccttctcttaccctacgagcaggctcttacccgtgaggattccaccagtggccttttctatgattgttcgacccacatgttgtgggttggtgagcgacaaaatgaacctcaatacatcatggtgatcaaggtctccgatcccactggtgaggcttgggtgtccgtgttcaacgagcatgcagagaagatcattggatgtagcgccgacgagcttgatcggatcaggaaagaggttcacgatgtttcccatcctctgctcaaaagtcttggcgtgaagaatctcccaactgtaattggccgaaccgtgaatggtgaggagctccttctgaaggatggcatttcggtgaaagatctcagatctggtgtcaaggaattgaagacactgctagatagttttgagaagaagaataagaagttattatcgaatctagctaataagaaaccttccggtcaatgggaagaaatcaagaagattcctctgctcacagcttccaactttgaggaaatctgtggagagaagactccagtatacatcattggtgttttcgggtcaaacaaagccaaggggcagcttgaagcagtcctgtctgagatatctaagaagactctgataagggggcagaactaa

SEQ ID NO: 30696 - DNA, 450 bp, Zea mays
  Peptide Sequence Number=SeqID_74071
atgcggaaggacaaaggcgcggcccatggcggcctcggccattcgctcctcgaggtggcgcgcctctccggcgagcaccaccggcgggaacgtctcgatggtcttcagcaccgcgtccagctcctccgcgttcgggtactcgggagctgcaacgccttcttcgacctccagctgtcaaccacccacttcccgggcgccgccggcttcttctccggtgtggccaccgccgaggaggacgacttggcgcctgcggccgcggggaccacgggcccgttgttcttggacgggtcagctacgtggatggtggagatggtacgcctcttcagcgggaggaacgcggccgcgcggcgcggctacgatgccgcgccaccggacacggccgtggtggctgcggcggagttggtggccagcgccattgcgatttgcgagcgaggggtgctagatgggtag

SEQ ID NO: 30697 - DNA, 234 bp, Zea mays
  Peptide Sequence Number=SeqID_74072
atgtggacccgggggatcagccttccgtgcatcgcgcagctcactgcctgggcgcgcctggtgacttacgtgtggggccaccgtgtcctttattacatattgcgcactgtggattgggatctagggcgtgtatgtgtagtttcaccgtgctccggcgagctctgcggtgggggaagcagggcgccgccgggtgccgtgaccggagaagggggggcaggccgttcggccgtctga

SEQ ID NO: 30698 - DNA, 501 bp, Zea mays
  Peptide Sequence Number=SeqID_74073
atgcagggactgaggacgagctggagatctgcgctctatgcccgggagccgcgcagggagccagggacccggaccggtagggggcagcggctgcgggagtctgggagaggtgagatggagtgggcgacggcggtaggagtgggcggcggcggtaggagtggccgagtgggagaggacagaggaggagagaatgagaccggagaatggactggcggagcgagggcttcgctggattgctggaagcctggagattggagaacgcttgtggccttgtgggctgtggtgatgtggcccatgggcctgcgggacgggtgtaattttaacggatattcggatttcactgctggggctcttccttgggtaccacctttgaacagaaacaagaaaactctgctatttcctcacctacaacaacatgggtttgaaaaccctgagtatagagtgtactttcgcaagtcttatccaacaaaagaaaagactctcaaggatatgctggcttga

SEQ ID NO: 30699 - DNA, 270 bp, Zea mays
  Peptide Sequence Number=SeqID_74074
atgggcgtcgtgggagcttggcaaggagaagaagaaaagctgggtgcgttgcgcgtggctggaggagaaacggctggggaagataaggacgtgaacggcttcaggaaatatcctgttgagctttctccccgtccagaggcatatgatcctaaagtcgattcatctctgaagggggcgctcgacataattagaattgctaatgaggctgttgacgaagctatcaacagactattgaacgaagctgccgataaagtcttaaaagaagactaa

SEQ ID NO: 30700 - DNA, 609 bp, Zea mays
  Peptide Sequence Number=SeqID_74075
atgggggctcgagcagccgctcaggctggcggcggcgctcaaccgagcgctccgacttccgtgccaaggcttgcatcgtggcttgcgccctcctctgctcaacctcctagaggtcggccccttaagatgggcgagttctcccctggttggacgcactctggctctctcgacagaaaacagaagttccctgttactcttcctcctctcggttccagtcacggttggatcgattccttcgattcttggtattctggtgttcatcttactgattggaagaaggtggaggctggtgctgtggacgtctcccacggcctcagcagcggctctagtatctccgtcaacctctcgccgtgcaggtccggacccgccattctctggtccgtgtgcctggtcgcctcacctctagtctccttcctcaagcgccgctccctgcttcctggtggctgtgagctcgcccctaccctcctgctcgatcttgacatcgacccctcccacatctcccccacattgtcgtcttcccctagtggcgagctcgcccaggcgtccgtcgcgtcctgctccttcaattcgtacaacactgctctggtggtcgtccaccccagcgcctag

SEQ ID NO: 30701 - DNA, 780 bp, Zea mays
  Peptide Sequence Number=SeqID_74076
atgggttcgaaaaccctaagtacgaagtgtactttcacaagtattacccgtctaaggaaaaagactctcaaggatatgctggcttttgggaatcaaggccaatctgtcggcgctgttcttctcgcacgcgcacccgctctttctctctgcctcgcggaccccacctgtcagtccatccccaacctctcgcccacatccctcaccgcggacgcgcgcacgaccacgcgttcttcggccacgttctcgagcccgcgcccctttagaagccgcacgctgctcgcccacttcccctcgctcacttgcgccctcagccgaactctgtcgccttctctctcgccctacgcacacgaccagacaagctctgccgccgctcatcggagaccgtcgtccattctgcgctcgtcgtcgagcccgctccctgtccgttgcctcggtgagtttcgcctcgccgtcagctacttgggacacccctcggtttgccctttccctctctgtcttgcatggtccacgctcactggagcacttcttgcgcagccgaagcctgccaccgtcgagacttccctgcctccttgtcgtcctctaggcgctcctgatttcgcgcttgtgagtagacctaatcttagcccttcgatcaagatctggccgttctcctctctctccctcatccgcgcccctaccgctgggtccggtctgtcagccctgccctgggacgctgacaccccgagcccacctgtcagcgctcgccatgcacccgcgcccgcgctcggcctcgagatctaa

SEQ ID NO: 30702 - DNA, 1182 bp, Zea mays
  Peptide Sequence Number=SeqID_74077
atggaatctatctataattgtcagctgcaaatgacagttctcatgcaggaggctcactgctgtagccaatggggtcatgattttcgtcctgactacaagaatcttggcattttgaaaattcaatttcccagtgttccaatgatagctttaactgcaactgcaacaagtaaggtccaaatggatttaatggagatgctccacatcccgagatgcatcaagtttgtcagcacagttaacaggcccaaccttttttataaggtgtctgagaaatcgccagttggaaaggttgtcattgatgagatcacaaagtttataagtgaatcatacccaaataatgagtctggaattatatactgcttttcaaggaaggaatgtgaacaggttgcaaaagaactgcgcgaaaggggtatttcagcagattattatcatgcagacatggatatcgttaatcgtgagaaaattcatatgcggaatgcaaccggcgtatccactgttcatccgctgctcccgctagggattttgactgcattaagaggtcacggtttactatttcatttgactgaagattcaccagttttagcagccgatagaagcaatgctgctgcaatcaagacttggcagatcaatgatggtaagctgtgccttgcccagctcacaagttcatcgagaagttttttacctacagatttgttatgggagttcaatctgaatttgattctcttcgtgcaagactgcttcacagttctgatactcaccatggctcaggcgttgtctgaattacttgctgaagagactcgtcttaagtctatgtcttctattactggtgtgagttctgacagtgtgttggccgctgctcagaagtcaagaaacacctgtttccagccttgtgaacattgcaaaatggccactcatcggtctgagaactgctttgctaagtttccagagaagttggctgatttccgtgtccgtcgtgctactcgtggtcgtggtacaggaccatctcctagaggctcagttgcagttgctgctacttcatctgctggtgctttgtcatcatcttgggttcttgattatggagcttcttttgtgacatctgatcaatcacggttggcgtctactacacctgtcaccgagggtacttctgttcagactgctgatggatcgaacacacaagggatgtga

SEQ ID NO: 30703 - DNA, 567 bp, Zea mays
  Peptide Sequence Number=SeqID_74078
atgccgccgcgcaccaggaaaacggcgcgcaagtcaactggaccaatcggtgtgccccggcatcaactggcccctcgacatgaggacaatagcagcgggagtaatgatccaaaaggagatcttgaagcacgagtaagtcaacttcaagcggagttgcaacacaggaccaacgcttgggttgcggacggagatagaataaatgaattaagaagggacatccgccacctgcgggatcagcttgttgatcgggacttggcgctcgactgggcaattcagtcccgtttgctggcttgtgctaaggaagcaagggctcaagcccgaatcaaggaacttagctcagctgtcgacgacctgcaggtctattgcaatacgttacatgaggaagtccatgtactgtattcgcaattacaccctagtgcacctgcgcaccctgttgaggcggaagccggaccctcccatgttgcgggacacgcgcttggtggggtgaacactgatctgaaaaagaaaaattgctttatgagaggattaaatgatcgattgcagagaaaaaaatggccacctgcatag

SEQ ID NO: 30704 - DNA, 465 bp, Zea mays
  Peptide Sequence Number=SeqID_74079
atggatttatgcagatcattcgatacctccctcatgagtgggtacatagaagtgatcatgtggacaactcatagggggcgtgtgatttcagattgtcctgttcacagagcggagtttgaatataggtacaaagatgattgctttattatgaaccaggtggctgactcacttgaaaagggaacagaacacgaggatgaatacatgatcagtgaaaaggagcttcttgttaaccgtttcatttctgtgccaaaagacatgggagcattcaactgtggagcttttgttgcgggcattgtaaagggtgtattagataatgccggctttcctgccgtagttactgcacattttgtgccaattgaaggccagcaaaggccaagaacgacaatcctgataaagtttgctgaagaggaggatgcagacctgcagttctgtgcgcagtggaagtttggtggtcttgtgttctaa

SEQ ID NO: 30705 - DNA, 81 bp, Zea mays
  Peptide Sequence Number=SeqID_74080
atgatcggcgtagggaaggcgaagcagtacgccaacgtccttgacaagcccctcagccgtggcaggcaggagctagggtaa

SEQ ID NO: 30706 - DNA, 132 bp, Zea mays
  Peptide Sequence Number=SeqID_74081
atggcgcgtgccgaggacgtcgaggaccttggaggtctggccggcgcgccgcccgaggctgcggaggtcaatctggtgccgcccgtggatgccggttcaggggtttgggcctgcgcacgcaaccgctactga

SEQ ID NO: 30707 - DNA, 282 bp, Zea mays
  Peptide Sequence Number=SeqID_74082
atgtcccagcggctgagggaggcatcgcagcagctgtcgcagcagctgaagcaagcggccgacttcgctgaccgcgtggcgtcgggtgttctgactgcggacgtggctgccaaagtcaagggtcttcgggcgcagcatgcggatgctgtccgggagaagtcggctgcggaaagcaaaaaaccgcaggctcgcggagaaagtggctgccatggaggccgagaagacggacctccggcgccagctggcggaggagaggagggaggcgaatcaggccatcgctaa

SEQ ID NO: 30708 - DNA, 540 bp, Zea mays
  Peptide Sequence Number=SeqID_74083
atggatagggagaacaagagccaagagcttgcccatgttgagtttcgggaagccatggagagggccaatgttgagaagattactgatgaaatgttgatcagattgttagatgattctgaagatagcgaggactttgattttgaagaggatgctgacgaccgaagagcgagcttggaagccaagcccggtggggaggctattgttccacttcctaaggaagacgaagtagtaattaaggagacgtcgtttgaacagcgcaagtacattattcgccatgcctctgggggaaaactaattgtgaaacagattgttgaagttcaaaattatgttgaaggtctaaaatacccctcaggcttccttgattatggcagaaatgatgaagatgctgctctttctccgctgcctgagccatacatccctgaaaatgatcccgagcttaaggatgtcctagttgaacttgaagtggtgcacaagataatagatgaagttgttgatgaagaactaaataaaattgttgagagagttctgaaagggaactga

SEQ ID NO: 30709 - DNA, 291 bp, Zea mays
  Peptide Sequence Number=SeqID_74084
atggcgatcgacgacatcgacgtgtcggcacaacgatttccattcgacaaagatggagcagccactcctggtggaggtccaatgtccggtgcgatgaggaggaccagcagaatcaagtgcacagtccggcgcggcgtcgacaaggcgagctgtcagaggtcgtgcgcagccggtgactggaacgtcgatggtcgacgtggctgggaggccgagcacagagacaacacgcgggttgaggaagttcgtcggcttggcgtgctcagacttcaagcacaacaacactgcagatga

SEQ ID NO: 30710 - DNA, 228 bp, Zea mays
  Peptide Sequence Number=SeqID_74085
atgcctgagattgacttgccgaagcaacagaagctgcagggtggttacccacatactctgagatataaggcgagtggtacgaagcacctctggcacctctgccccttggagctggaggccgaggataactctgctgctgccccgaagcctaggaagcctgagaggaatattgcggcctctgctgctggcttcccctgtcatcagtctgagtggaatgaatcgatctaa

SEQ ID NO: 30711 - DNA, 441 bp, Zea mays
  Peptide Sequence Number=SeqID_74086
atggatctcgcccagcgccctcctctgccatggctgcacaccagcctctctccctggttccctccctacttctgctctctccatgccgacgccatcccctgccctctcatggccgctgaccccatggcgagctcgcccaagctccacctcccagcgctctccctccccatcgctgtcggtcgagtctccctggtggctgacctcgcccccgcgttccccctctacccaggtcgagctcgtcgcgccccctgtactggggtttgccggtcgccccgtctccagctcggtctgcactcgtcgtcactgcccctctctgtttttgtgccagccgagttcgcccagcccctcgcctctccacctcatcagcgccctcagccatggatgcagaaccccctctcttcaatgcctttctttgcagcccctgtgtcgctgtgcgtgtaa

SEQ ID NO: 30712 - DNA, 342 bp, Zea mays
  Peptide Sequence Number=SeqID_74087
atggacgaagctaaaaatgaagtaaacaagtttggccacacttgggccaatctgggtctcaccggacagtcgcacaagacaccctcgggcgagtcggaaatggcgctactcgtccggggttggcctcgggcgagctgtgactgcatctcccgcttggagttgcctcaggcgagtcatgacttaggcccctcgtgctttggtaaggttaagaacatgtttgcttatgaccccttcttactcaaacattgttggaacttgctctctgctgcaagaaggccaacaagggtgaacggtggtgacaacagggttacgtgcacgggggcaatagctctgttgatctag

SEQ ID NO: 30713 - DNA, 420 bp, Zea mays
  Peptide Sequence Number=SeqID_74088
atgggcaagagcaagaaaggtggcagctcttcacatcactcgggtgacaagcgcaagcgcgagccgactcctccctcggaggacttcggcgactcaaaatactcagaggaggagttctcctccgagtccgagggctctccggctcctgcctctcccccagcgtcgtctgatgattcagacaactcccaggcgatcgccgcggaggtatggacctacatccgggccatcgagcgtgccgggctcgagggctcggatgagtcggagtactcctcggacgaggaggattcctccgactcgtccgaggagggcagcggcggcgacgacgatggaggcgatggtgacggtggcaacgacagcggtaagggcggtgacggcagcggcaagggcggcggcggcggcagcaacaaggccagtggctag

SEQ ID NO: 30714 - DNA, 874 bp, Zea mays
  Peptide Sequence Number=SeqID_74089
atggccgccagggcatggcctaggctccacgtcgccagtctgctggtggtgaggcatcaacggctgaccgatgcccaactcccttctggttttggcttcccacagtcccacggcctaggggctaccagtaccaggtctgatgcggtgatgcctcatacatcaatgctaggagactggtctaggccttcgctccaggccttcgctgcagccgctggtccgacggaggcaaagcgggcagggacacccttcgcaggactcgacactttgacgaagacctgcggcgacgtcctcacacggcgcggcctcattcagccccaaggcccaccagagagcaagttccaacatttggcgcccaccgttcgtgttacgacaaaaccacccgcgatggcacccaagagagctaaccccaaggctgacgaggctgcgaaggcagcactgctggccgcaagaaagggcaaggccctcgccctcacccaatccacccaccaagagcccattgaggacaatgttccccacaccggcaaaaacgacaccttccgcacctgcggaaccgaaggacagtcacagccgccccccggcttcgcccccctggaaggggccaacctcccccaggatggggaggcccttggcgtctcaacagaaaaaaagctgcaactgtgggccctggggctcatgggaccccaaattcccaagggaaaaaaaaatctggggggcaacgcccaactgtttccccttattcaaatggggggaattttaaccgccaagagaaaaaaacccaaaacccatgggaaaatccgttatgtagcgcgaagggccctccggtttgggaaaaacacccccttcaaaaaacgctctctgagagattttgcgaaag

SEQ ID NO: 30715 - DNA, 183 bp, Zea mays
  Peptide Sequence Number=SeqID_74090
atggcgtccgcgccttggggaagaagggctctgcgcttgggagcttccactgctagcgcccacggaagcgaggctgagcagagagatggcgtgggggagaaagggagagggactggtgctgccatttatagagccaaactctggacatggcaggctgcaccagcaggtgacagaaaaacttaa

SEQ ID NO: 30716 - DNA, 1209 bp, Zea mays
  Peptide Sequence Number=SeqID_74091
atggcgcccacgccttggggaagaagggctctgcgcttgggagcttccactgctagcgcccacggaagcgaggctgagcagagagatggcgtgggggagaaagggagaggggctggtgctgccatttatagagccaagctctggacatggcaggctgcaccagcaggtagcagtggtccaacctctggcatgggggccaggcccacatgtcatgcacctggagcgccggtttctgtgtgcggagaaggcgaaccgacgcgtgaagagcgtgcctccgcctacggtagtgcatctcttcgcgtccgccaaaaccaacagcccagtccctggcacaagggcctcggcccacgagtcaaaaaccttgggcgccggttactgggtgcagagaagtcccaccgccgctcgcgccagtaccgcgcctcctcggggccgccgcagaagactgagaaggtgaattttcaaaaccaatgcagcggtatcgaggcaccccgcgcatggcccagcgaaaccatcaagtacggaagtcacaggctcgtaccctcccctaaggtgggcccgggggccactgtcggtaccctgaatcaggggggcgccgcgtggccagaaaagataatatatcccatgatgcaatcagttggaccggacctccacgaggaagcaccggacccctgtacgcacagctcggacccccgaatacggttcgggactcccaagctttatcctatgcgcttgcgctccccgctcagcggagacccgatgctgccacgtgggcttgttgcccgtgacgtgatgtgccacctcagcatttattgtgacatgtccactcagctggcaggcggcgtacaggccatcctacaggcggcgtgcctgtccagtccattgccaaacagtacgcccgtgctgcaaggtgcactgtgtccatcatcacttatgcgttgccaggtgtgcaccggactgtctggtgagccaacagcgccacgccaacggtcgacatcgcgatcaacgggtgacacgtggccagagccaacggtcactaggctgcaccggactgtccggtgggccaaggggaccgagggctcaacggtcggcttcgccaaagaaggaaagaaatcgtgcattgttcatgtccggtggtacaccgtattgtccggtgcgccaaccgatagaaggcaagaattgtctaccaaatcgagatccaacggctcctag

SEQ ID NO: 30717 - DNA, 717 bp, Zea mays
  Peptide Sequence Number=SeqID_74092
atgggtggcccggaccttactcggagggatccggcccccatccaagggacccggcacgcttacttgggagtcctggaccgtattcgggggttcgagctgtgcgtacaggggtccagtgcttcctcgtggaggtctggtccaattgattgcatcctgggatatattatcttttctggccacgcggcgcccttggagccgtccacgtggtggggtcaggtgctgttcaccgtgcggctagagattgccgcacgggcaccgtgccttcatactgtatctcaaggtggaagaaggaagctgagcaagctgtggagcaatttggacttgggtacctctacagattcatgggaagatatgtgcattaaagattacctcgacctaagagaaaagcttaacttaagggtgaaggtgttttgtgtgctaaagggctcaaagctcaaccttgtgatgaggatgagctcaccttggttaagtttggagacaattggtcgaaccaaggatggaggcaagaagaactttgaggtactgagtgcatgggagaaggttaagcagaccgaggcacctaaagccagggtgaagaaaaaggcttgcaaagtcaagggtgttggaagcttggagctcatagatatctataatggtcatgtcgtggagacttggagttttggggtccaacccagacctcaaacaggtcaaaaagggcaaaacgatgaagaaagttaa

SEQ ID NO: 30718 - DNA, 408 bp, Zea mays
  Peptide Sequence Number=SeqID_74093
atgtggcggtcctggacctactcttgcgcgggtacggatctgacgtcattagtcccgttaaaggagtccggacttgtgggcgcatctcctgagcgtatccccctctgggacatgtggcggccccggaactgtcgctacgcgggtctaggcggcgtcaaggtcatccagcaggcggcgtgcctgctgggtctgctggcaaacagtgcgcccgtgtcaagcagcgcactgtgttatcccttctacaagaagcttcccctgcacgccgaaagatacacagatctcggacgacaggacacaagaggattgccctggcagcaaatatttatagtcccaagtgttatattctctatgtccctaggcccacgtgtcgggctcagtacctttgtgcatgccccccttcaattataa

SEQ ID NO: 30719 - DNA, 378 bp, Zea mays
  Peptide Sequence Number=SeqID_74094
atgtaccactcatgcattctaatctccggagtcgacaacttagaaagttgcaccgttgttaagaacggcctcccattcacaaatttaggaggaacatcctccttcttgtataccgagatattggttttaagactctaccacctctcgttatttgtgggcttcaccgagggcgggaaacatttggtgacatccaacgaccttcgggctggggacgtctgcgagcttgttaaggggccagacgatgccgacataagagaagagaagcgcacagatgaagccggggcggctttaaattttgtgaccacacatccggacagagtacaccggctcaccatcgtctggccccttaacaagctcgcagacgtccccagcccgaag

SEQ ID NO: 30720 - DNA, 574 bp, Zea mays
  Peptide Sequence Number=SeqID_74095
atggtgacctccagttcgatggcgggggaaagcaaaccgggccacggcctctgcccctccctcagcctcaaggattttcatcaccaaggctggggaggggactgccgcgtgcctggctctcggacccgagtggcttcggagccgctctcggcgccgacttccgccacgacagctggaagaggttcttccgccgacgagatagccggggccgcctacggaccgacctccgactctacgaccttctgcccgtccttgcctcacgtgtttgggcatgggcgggggcctcctggcagcagcatccgccctgaggtcatcgctgccgctgtttggccccctggagcagaagtagtcgtcgtcgccgctgctggagcaggtgacggcacgccgttcgtcggtcttctgttgctccgcaggccccccctcgagtggggttactcgcctgttggttgtctgaaccgcttcaccaagcgtgagtcgccccgtgtaaaggtgacgagtgagagtggagacccttggaccgtgtcgccgtccgaggctaggtcggacctcgtcgaaggtgttgttgacgccgagg

SEQ ID NO: 30721 - DNA, 996 bp, Zea mays
  Peptide Sequence Number=SeqID_74096
atggctgaaaggtaccaactcccacggagttgcgttcctccaacggcaaggcggaaagactgcgggtatcccccatccgggggcttggaaggtggaaaggcacgatgcataagggagcgcgagacatggtcgcctttcaagggggtcaccctccttttaaaggcgactctccctacttgcgtccccagccgtcgggggctgagtcttctccaacacgctccaaggtcctccccctacagcgcgggggactgggtcccacacgtcatgcaagccggcccagagcagaagaagccaaaccgccgcgcgcggtgcatgcaaccgcccagcggttacaagcggctctccacttctgcccagaccagcgggcgaaagggcgggcagccatgcaggcggaatgcaaccgcgccaggtgggcgcacttctccgacttccaacatgcccagcatggaggcccaggcccacgcgtcatgcaaccggtgcgccggatgcttcgtgcaagcaactgcaccgccactcgcgccactaccgcgcctcctcgactgcggaaccaataccgcgactcgaggcgacccagcgcacgacctagcagcgccagcctggcgcgacggtcaatgcggccaaaaacgggccggcagtaatggcggtggcaggcgggcaggagcagcggtcacgtcgtcatccaagcttacgtcccatccgggggcaggaccgggaaagggggataccccaaaaaggatccttccccgtgaaggaaccaggctccgagcctctctactgatcagaggttcgaaggctggcccctcggaagggttcaacagccacctcagagcgcgtgggctccacacccactactggtcagaggttcgaaggccggcccctcggaagggttcaacggtcgcctcaggctactcgggctctgcgcccactactgatcaggggttcgaaggctggcccccgaagggttcacagccgcctcagacacagagcgagggatga

SEQ ID NO: 30722 - DNA, 162 bp, Zea mays
  Peptide Sequence Number=SeqID_74097
atggatgtcgatgatatttgtggcattgacaacaatgtgtcccatgaagatgaaatacatgataccggggaggatgttaatgctaacaacagtgaacacatggtggaggaggaccatgttcctgcacctattggtagtaagttgcacaagatggaagtgtga

SEQ ID NO: 30723 - DNA, 696 bp, Zea mays
  Peptide Sequence Number=SeqID_74098
atggtgattggagaagaggcacggtctggagtcgagatgcagagggaggcgtggcgtagggccatggaggcgcagagacgtccatggatgggagcggctggtggagtatctgagcgcatgggcgagctcgccaacaccacggacacggcgaagatgcagggatcatacatattgaatcgaacggtacctgactattttgcaaaaaaacacctcctgcactccacgatctttgtttctttaccttgtcttccaatagagaacaaggcttccaagccacgagctgttcgtattctcccgatggtggatgctcctgcgatgcatctcgacgaccagctgtcggcgccgccgtggctcaacgccaagactccagctccgcactccgacacctcgactacagctccacgtcccgacaccttgtctacaggtctgcgtctcgacgcctcaaccacaatggaccatagctcgccaccgtgccccaatgtacagacacggtcgtgccttgatgccgggagtattataacgcgcctcgacaatcacttgctcgtgcggcaatgggacacgcaccccacgctgatgtctcccaacatacgagctcgacaaccctctgtactcacgttgggcagcagctgggtacaggagcacgtaaatgccttctcctgtgagtccaagtgggtgtggggggtttctgtaaattag

SEQ ID NO: 30724 - DNA, 1401 bp, Zea mays
  Peptide Sequence Number=SeqID_74099
atgggccggcagaaatggcagtggcaggcgggcggaagcagcggtcaagtcgtcagccaagctcacgtcccctcctgggacagcgagagaaccctctcctacggcgtgaagacgacgcgcccgacaggcggcacctttggcaggcgaagcaggcgacgcttcacctccgccataatggccgcgtcaaaaaaggccccgagccccctactgatcagaggttcaaaggctggcccctcggaagggttcaacagccgccttagagcactcgggctctgcacccactactggtcagaggttcaaaggccggcccctcgaaagggttcgacggccgcctcaggccactcgggctccgcgcccactactgatcaggggttcgtaggctggcccccgaagggttcgacagccgcctcagacgcaaaacgagggatgaccctaggctcgggggctgctctcgcaaactcggctccagccaaaccgttgacagcgtcaacataccagcccgagaacttgggactcgactgtgcacccgggcaacggccaggcttagactcggcctcggctccggaaaacgacgaacttcgcctcgcccgaccccagggctcggactcggcctcggccccggaagactacgaactccacctcgcccgaccccagggctcggactcagccctggcctcagccgacggtctccgcctcgcccgacccgaggctcagactcgacctcgaccacggaagacagactcaacctcgacctcggaggagcctccgcctcgcccgacccagggctcggaccgaccacgtcacaggggggccatcattaccctacccctagctagctcaggctacggggaacaagaccggtgtcccatctggctcgccccgcggcacaaacttcatctcttcccatccatccgttcacccgatcgcccgccgcagtggtgcgacgcccgcaaggcgacgatgctctgcacccctgcccacggcatcaggcggatccacggcgacgattcatcctcggcaagaaattctggtcacgccgcacagccacggtaccagaggagggaccaactctccctcgatgcacggctcaatgacggcgcaaaacaccgtgacgcgaggcaaggcagactcctttcccccaagcacacggcgtccgtggtccaatctctcaacctctctatctctctcatggatgatggcatgcccaatgatcgcgggagtggaggaaccagctggcgggatggcgtcgcgcctgtggtgaatttgttacggctcgcgcgtgcaatctgggcgacggggaagacggttccgaacacttgggcccacctgacggtcatggcgcggctgcgaggaatgcgggttaagctgggccggggggaggtttcggcccaggaagtgcag

SEQ ID NO: 30725 - DNA, 312 bp, Zea mays
  Peptide Sequence Number=SeqID_74100
atgaggggtacgatgcggcttcatatccttagaggtatgaaggcagaagtcatccttgcatttgcagacatttgcactcatgagtttgatattattttacttgctgagatatgtcatctcactcttgcattactcaatgcagtgctagaatcaggagaaacaattttggagaagttggctgtgtacagccaaaaggctgctcggtctgggtgcaccggactgtccggtggtgcaccggacagtgtccggtgcgcccaggctggcgtctgtcaactggctactctcgggacttcgtcggcggcgtacaactaa

SEQ ID NO: 30726 - DNA, 159 bp, Zea mays
  Peptide Sequence Number=SeqID_74101
atgggagaccacgtctcaggtcgcgtgaggggtaaagtccactgccaggttcaatcaggatttaataacattatgctaaacaagaaaactgagttaaggagtaacttagggttccttggccatgcggggcttttagtgggttatgcttatcacttttag

SEQ ID NO: 30727 - DNA, 357 bp, Zea mays
  Peptide Sequence Number=SeqID_74102
atggagcagggaagagaccgtacacagtggttttgccaagatacgcacgctaaggtgctcaaatcccccgttgaaccatggcagaagcgagctcccacgtgttcgacgcgggctgacactcgggggctgaacctccgcgcgcccgcggccacccgtgaccacgcccgcgccacggctataaaacccttcccagtgctcgactgccttccccgttgcctcctccgtaccacgcctaactcccccgagctcgcccttagctccggcgacctccccgcgacccgccagagccgcccgagggcaaccaccatggccagcccctttcccgccctcctccgctcgatccaagccctcggatag

SEQ ID NO: 30728 - DNA, 312 bp, Zea mays
  Peptide Sequence Number=SeqID_74103
atggagttgacgtcatgggggaacgcttatatagtaaatgaggtgcttgatgtaattagtcaaaggccagaaatcaccaaaatttctttccttgcacattccgttggaggattagcagcaagatatgcaattgcaagactttatagacatccagacaacgcgtctaatggaaatactaaaggaaccatctgtggcatggttccactcctgtttggatctgttgcaatggaaaaggttgcttgccacatcgttcattggatatttaggagaaccgatagacatctctttctaactgacgatgatgaaggatag

SEQ ID NO: 30729 - DNA, 267 bp, Zea mays
  Peptide Sequence Number=SeqID_74104
atggagcaatcaggacttgggtacctccacaactcgagtaattggtatctaaagttatatccatttggttctggtgctttaaattggtatattaatgagacaaccgatcaagccaaggatggaggcaagaagagcttcgaggtaccgagtgcacgggagaaggtcaaggagaccaggaacccaaagccaggggtgaagaagaagacttgcaaagtcaaggttgatcgagttaagaagagttatggtgcatcaaggatcactacataa

SEQ ID NO: 30730 - DNA, 780 bp, Zea mays
  Peptide Sequence Number=SeqID_74105
atggctcgtcttagacacactgcacgtaagtcggtgattcctttcctgccgtctcgacttgcggagcgtcctctgcaccgcaccgtgtccggacagtcgagtcacctggagaggctgcaccaccgcctgcgtgaggagcaggaacgccggcgccagcacggagagcagcagggctcttcctcctcaccccagcaggaggtggagaccgctttcgaccggcacacctggtcgatcgagtatcgttgtgtggtctaccagcacagtcgcgggaggtacccggaccgctgggaggctacctgcctagttcgccgtccggaggatgacctccggggtgcggaggccgtttcggagcactattccatctccgagagggacactgcagaggcagctatgcaggatgcagcacgacgtgcactctctcagtactgttctttgttcggtggcgtggccgacggtcttaaccttcggtactacccccgccgccctactggcagcacggagagtgtggttgtctcacctgttggtgaggctaaccctaggttgagcagcacagtcaacctagtcgcagtgcttaacacgaagctggatcactctctggacgagctaagcagggctcgaacggagattgcggagttgcgtgctgagttggcagagcgccatcaccaggagggtggttctcccgctcctgttgggactcagcacccataccgctcaccgccacgtggtcaccacacttatggttcccctgtctgtaagaccaggatagatttggatccttag

SEQ ID NO: 30731 - DNA, 411 bp, Zea mays
  Peptide Sequence Number=SeqID_74106
atggagaaccacccagggaaacaaagctaccacaagggtgcctatggcgccgaggtaacacagctcggcgccataggctatggcgccgagagggatgaagaaatcagtcacaaaagtatttttctgcagataaagagggatgaatcctgctgcacagtccgggtgttgcaagccgccgtcggtgtgcgggttcagctacgtgagcccgacggtgtggaccaaaatacaaaaaattgggttgatattgctgcgatggcggtcaggcgagggatccctgcactggagcttcctagaaactgtagcgggttttctgaagctagtggaactttgttaaggcctcgtagtggtaccctgcctcgcttccttggtagaggtgtatggggtccgatcaaccccgtggcaaatgggtaa

SEQ ID NO: 30732 - DNA, 243 bp, Zea mays
  Peptide Sequence Number=SeqID_74107
atggcgttgggcatcttagcatgtaccaccataaggtttctaactcagatggtcaatactaggaagggtggtggaattgatctacctcccaatcaatacagccggaggatatttagacaaccacaacaacaacctgagatggatcctccacaacctctaccagccggagctgatcccgcagttactgtcgagatgcggataatgcaacagatggcagataccatggtggacatgcacgcttag

SEQ ID NO: 30733 - DNA, 153 bp, Zea mays
  Peptide Sequence Number=SeqID_74108
atgggggctccagcgcgggaaagtcggatctctgttgcgatcactcgctcgacgttgtgggccatccaggtgtggcacgtgctctctaataatgagaccatgcaaatcatgacatatatcgaagtctgcatgatactgatggttgcaatgtag

SEQ ID NO: 30734 - DNA, 1086 bp, Zea mays
  Peptide Sequence Number=SeqID_74109
atgagtaaagatgtcttcttcaagctatgcacaaagtttcgttctatggatgcactccgtgatacttggcactactcaatggaacaagttgtcatgcttcttcaaacagttggccacaaggaaaagaatggggacattattttttatgctctactaaaactgttagtagatgttttagtgaagtttagtgacacagatatggttgggaacagtgtgatgtggcaacacctggaagtggaggatctccttctctaccacaaggagaaaatccttctttactacaaggagaaaatccatgagtcggggagggcctttgttctaagggaggtccatcacgaagagtgtgctcggaggcttaatgagaagtatggtgctaacttcacgtggaaacaaacctacaacaagtaccacaagctgaaaggagaatggaaggtgatcatggaggcgaagtctgctaggggtgctggttttgatgatgttcagaagaagataacctacgacgagatcgaggttgtcaagatgaaagctaaaggcgacaagaaggctaagtactacaatgttccgatccccttgtatgatgagatggagtttgtcttcacggggaaacacgctactggagagttcagtgttattgaagcaccgtttgatcgctcaggaaggcaagaggatgatgccgttgggaatgtcaacctagatcaagagccagcagatctgaatggtgactcttctcaacacgatttcgacaccctcgcagagtctgatagtccgaacccagtaggctcgaagcgcaggcacgaggagaaggagaaggagaaggagaaggaatggaaatgggctaggcaaggcgtccccatcttcatgcaggccctgtcggaagctgtgagctttacccacggtggcacggacccatacgagggtatttacaaagccattgaagacatggatgagtatcctttgccggcacgccttgatctgctgacctatcttgctcagaatcgtcacattgccagcatgttgaagggacggcaggaggaaactttcaagcaatgggtggcacgatgggttgctggtcactaccctttgtga

SEQ ID NO: 30735 - DNA, 276 bp, Zea mays
  Peptide Sequence Number=SeqID_74110
cccagccaagagtcattgggactctccatatcgcgcgtgttcgatgactactataacaaagactatggcgtcatctcggtgccggaggtgacgcaaaggaggactgacatcaatgaccagttcgtcatcctcgccaccttcggagtaccttttgtgccgcccagatgggtcgagcgcgtgggcgagcgcgaaggggggagaggcgaggtggccggagccgagcgtgagagaggtggaagtcccgcggccttcgtgttcgtcccacgctcaggtcag

SEQ ID NO: 30736 - DNA, 267 bp, Zea mays
  Peptide Sequence Number=SeqID_74111
atggcgaaccaaccaccagcagggcagcgattgatcggggaggttgcacatgcgagggaggagggaggctgcaggggcatggatatgtacggacgccggacgcgcccattatataatctgaggggtaaacaaacaggccctaaggtctacttcaacaatgttgctcctatgacaaaccacgatagaaggagagaagcgatttcccacgtcacaagaggagtcaccgagtcagcctccatcaagcagatcacatatataaccgtgtga

SEQ ID NO: 30737 - DNA, 435 bp, Zea mays
  Peptide Sequence Number=SeqID_74112
atgacgccgccgccgcacttctggcaccagttcaccgtgcaggagcgcgagaccgccacgagcctgctcatgctccgcggcgaccgccccgcgggtgctgctggcagcaggggcaggaagagtaccctcggcgccgccggcacgtcggcttcttcgtcgctgccaaggtgcgaatgcgatgaccacaagtgtagcgtctgcgttcgaggcgggttcgccaccgggcgggctctcggcggccacaagcgctgccactgggagaagacggagggggcgccgccggcggttgctacgtgtagtggagacggattcagcgcatcgtcgtcgcaagcagcgccggccaccacgctggacctcaacctgccgctattgccacggaagagcgatcaagacggcagtttggacgcgacgttggatctgaagcttgggttctaa

SEQ ID NO: 30738 - DNA, 1065 bp, Zea mays
  Peptide Sequence Number=SeqID_74113
atgaatggcggcaaccacccccgcggcggtgagccctttttctcgcagctcctccagggccttcaaaaggggctggaggttcttctgtctatcgcgcggggccccgtagcgccagttctcgctagcggcggtcaccactcgttgagaaaacgacgggagcctcccgtcgtcatttcggagatagaaccaccggcgctgccatcctttgttcgaagacgcgaggatggcagggatgtactacggcgcccgcgcctgcctcaactggaggatgcagccaccagcccgcaccgccatacgaacccttctttcccccgtcagcgaggcaaaaagctccgtggagaagagatgggtccacaggtcccagtggggggcaatccccaaatatccttcacaaactgccgcgaagatggctgcttgcgagatggagttggggctgagattgtgcagctccaccccgtagacgtgcagtatcgcccgcataaaacggcttgccggcactccgaacccccgctcgtgaaaggagacgaagctcaccacataccccggcggcggggacggggcggctccgctcggagggggcatccactccggctgcgagtcaccggagagagagggcgaagcaagccatcagcaacaagggcctccaggtcgtccgccgtgacggtggagaaaggccacgggtcacgcggcaaaataacggtcacccggtcggccatcaccaagcagaagaggtggcggcggagaggacgagggaccaggaaagggaatattccgaaagggatccttctccgtgaaggaagcgggccccgagcccccctactgatcagaggttcgaaggctagcccctcggaagggttcaacagccgcctcagagcgctcgggctccgcgcccactactggtcagaggttcgaaggccggcccctcggaagggttcaacggccgcctcaggccactcaggctccgcgcccactactgatcaggggttcgtaggctggcctccgaagggttcgacagccgcctcagacgcagagcgagggatgacccagggtacgttcgatacataa

SEQ ID NO: 30739 - DNA, 231 bp, Zea mays
  Peptide Sequence Number=SeqID_74114
atggcccgcgcccgcatccgcaccggcacggtggagtcggcgtcgagccgcagactgaagctctctgcgcaggttgttccaccgaagctagcaacagtcgacagtccatcattgatgatcatccttcacagggacaaaggtcttgaagtaaagcatcctcaaaggagaatgaagttccattttcagacatttgtttcattcagtgatgcccacagagtataccacgattag

SEQ ID NO: 30740 - DNA, 204 bp, Zea mays
  Peptide Sequence Number=SeqID_74115
atggcgggcaaggaactcgtccggggtgcgcgcaattttgtcgccggcgcaaggattggccgtggtgccgcaccatcacgcgggcggagccgtcgccgcatcataccgagaatcccatgggtttctgttaaaatagtggccgcagtccaagtaactcagaaaactattagatttaattcagaaattctttttaatgcaaaataa

SEQ ID NO: 30741 - DNA, 426 bp, Zea mays
  Peptide Sequence Number=SeqID_74116
atgggcaagagtaacaaacgcaagcgcgagccgactcctccgtcggaggacttcgacgactcggaatactcggaggaggagttctcctccgagtccgaggggtctccggctcccgtctctcccccggcgtcgtctgatgattcagacgactcccaggggattgccgcggaagtctggacgtacatccgggccgtcgagcgctccgggctcgagggctcggatgagtcggagtactcctcggatgaggaggactcggacggcggcgaggacgaggacgacgacgacgacgacggcgacgacgacggtagcggcagcggcaggggcagcggcgacgacgacgagagcaagggcagcaccagaggcggcagcagcaagggcagcaccagggtcggcggcggtggcagcagcagcaaggccagtggctaa

SEQ ID NO: 30742 - DNA, 1566 bp, Zea mays
  Peptide Sequence Number=SeqID_74117
atggggggctcggagcccggttccttcgcggagaaggatccctttcgggcaactggcgcgccggttgctcgtcgcgtgggcctgggttccaagctggtgtgtcagaagtcggagaagcgcgtccatctggcgcggttgcatgccgcctgcatggctgcccgccccttctgcccgttggtctgggcgaaaatggggagtcgcctgaacgcaactccatgggagttggtacctctcggccatcgttcggcttcaaggattttcatcacgcagcccggtcgcaccccttcaccagcggtcacccgagatggcgacctccagcttgatggtgggggaaagcgagccgggctgcggcctctgccccttcctcagcctcaaggattttcatcaccaaggctggggaggggagagtgccgagttggggtcggcccctgcgtgggcggtggcccgctccttcactcagtgatggggggagaagcgggcattgcccgtggcgtccggcagctgcagcgtgcctggtcttcagccgcgagtggcttcggggccacttgcggcgtcggcgtctgccacggcagccggaagaggttcttccgccggcgcggcggccgggaccggccacgggctgacctccaacttctacggccttctgcccgtccttgcctcacgagttttggcatgggcgggggcctcctggcagcggcatccaccctgaggtcagcgttgccgctgttcggccccccggagcagaagtcgccgtcgtcgccactgctggagcagccgacgccaaagtcggtcagtcgaggcctcggatcgggctggcgcccttggaagccggttgaccgaggccccaggggtaaccggttgagccgcctgctcgggccggattcccggaggagcccctggaccgcggcggcgcccgaggctgggtcgggctttgctgaagacgtcgtcgatgccgagggtgctacggctcccttcggcgtgaagacccgagcctgcaggatcagatcatcttgtagcgtgtgctttctgcggccgccgaggccagaagaacacgccctcgccgcgctcgcgaagctgcgtcttttttcctcctgttccgagcatctggactctgtcggtaacagggatgtttgtgtgagcgagagttgcttttcgcggaagggacgagtgaggggacccagactcaaactcttcgccctcgggaattctcggaagccggcgcgctataattcaccggactgtccggtgtgcaccggacatgtccggtgctccaaggaagctcggcctcctgaactcgccagcctcgggttcgcgcggcagccgctccgctataattcaccggactgtccggtgtacaccggactgtccggtgtgccagcggagcaacggctccctgcggcgccaacggctccctgcggtgcattaaatgcgcgcgcagtgcgcgcagaagtcagaatcgcccatgccggtgcaccggacatcaaacagtacatgtccggtgtgcaccggacacccaggcgggcccacaagtcagaagctccaacggctagaatccaacggcagtga

SEQ ID NO: 30743 - DNA, 438 bp, Zea mays
  Peptide Sequence Number=SeqID_74118
ggaaaagcagcagcgaagttcgacgacaacgcaaggcgaagaacggtgctgctgcgggggatcgacgacgcgtggcttgttgtgcatttcatcgagcgtatagcaagtgtcaatggcgcactacgcagcagcgcgcaagcaggggaatggagcttaggcgccgagaggagtagccacggccatggaggcccttgctgctggggtacaagaaaggggggtgccgagccaatatgggagcagggcgttgtgcagggggcgcggccacaggtaaaaggggatgcccgagcctgcagggggcgccatgggaaagctcggcctcggccatgggaaagaaggggaaaggaggaaggggagccagctgccctgcgtggaagaggaatagggagggcgccgggcagaggagatgggagcagggagctcggtggccaccatgactag

SEQ ID NO: 30744 - DNA, 237 bp, Zea mays
  Peptide Sequence Number=SeqID_74119
atgtccgacgagaaaactgaagcagcgaaggcagaagtctactgcctactagaggcaaagttcattgagccaattgattaccccacttggctcatgaatgtcgtaatggccgaggccaagaggttgaagcaccgaagccgtgacttcgcagtaatagatgggcagctatacaaaaaaggaatagatcaagctatgctcaactgcatcacagcggtcgagggcatcgaactcctctga

SEQ ID NO: 30745 - DNA, 366 bp, Zea mays
  Peptide Sequence Number=SeqID_74120
atgacttatgtccatgcggtcaaaggcatgcagaaaaatgatgtctgtctggctgcccttatcgatgagtactttgtgcagatcccaccctgccactctacaatttatcaccaacgcatctgcatggggcgcactgcggaggtcgacatcccttccatcgaagtggtgggggaggtggtaggggttggtttggatgctaggacggtggaggcgatagcactaggatttcttgttgttgaaggcgttgttgatgtggaaatgggttgtggttctactgttgggggtaatagtggtgttcgttttgaaattgatgctggttatattgttggggttgggttctggccattcaatccttcgttgctttag

SEQ ID NO: 30746 - DNA, 189 bp, Zea mays
  Peptide Sequence Number=SeqID_74121
atggccatgacgggttcaacatctaaaaagatgtacctctgccagctttgcttggtcggaccaataccagaaaggccaccacgcaatgggagtggagagatggcgagagtagcatgtaccatccgtgacaagaggctggatggtggtgtatttgtgctctcggttagcgtgaacccattctggtcttga

SEQ ID NO: 30747 - DNA, 114 bp, Zea mays
  Peptide Sequence Number=SeqID_74122
atggcggtgggatatttcacttgcaagttcgtcgtggcgcctgccggtgcaagggctcaaagatggccaaaatcttcatggattaagagatacaagggcacaaactttgcctaa

SEQ ID NO: 30748 - DNA, 576 bp, Zea mays
  Peptide Sequence Number=SeqID_74123
atggcgctaaacaagaccacccaacgaaaagcaaccggacctcatggtgtaccccgacatcagctggctcctagacatgaggggagcagcagcggaagcaatgacccaataggagatttggaggccagggtggcacgattcatgtcagagctacgcgacgggggtagggagcgtgcgcgagatagtcgccgcattgctgaactgtcagcgaaagttcaacgcttgcagttggaaattgcggaacacgacacgaccattgacaaggctataaattcgcgctctttcgcatgggattgtgaggccaaggctctagcccgagtggcggaattaagtgcatccctagaaaatctgcaagcgtattgtaacaccctacatgaagaggtgcacgtgttatatgaccgtctgcatccaaatgtgccgacagaagttgcagcagtgggagctggaccatctggaatagctaatggaggacctaatggggagttggacctttttgaagcccctccttccatgaaccttccagctgaacgttctcccgaggctggcagtggagcagctaaggacaaagagaattag

SEQ ID NO: 30749 - DNA, 153 bp, Zea mays
  Peptide Sequence Number=SeqID_74124
atggccgtgatgggttcaacatctgaaaagatgtacctctaccaggtgatgaaacagccgagttttgttgtttctgctctaaggtggtgccaaaacaggaggaagattactaagttggtttgtgggagggtgttttgcctcccagttatgtaa

SEQ ID NO: 30750 - DNA, 435 bp, Zea mays
  Peptide Sequence Number=SeqID_74125
atggttaaaaattttggcagcaaaaacagtgcaaatagcagtaaatgctgtggtaagaaggcgaagcggcagggtttttacaccaggcgggcagtaacttgtactcgctgcgcagtggaccgcaaagaccaaacagtgactctgcaaggtgggaccgacacgatctcgggaaatgaatcgtttctcggcaacgagctcagggaaggtgttttttggaccttcggcttcccgaagcttgagaggattttttcacggttcaagctcgttacgaaaaacgatctagcgccgcgaaaggggctactgttgggcccatgcttcgttgcgccgaaggccttgcgtgaagaagcagcttcggctgaaatcgtccccaggaaatggccgaaggttcctttttatagagcttcggcgttgcaaaccgacataaagatagaatga

SEQ ID NO: 30751 - DNA, 591 bp, Zea mays
  Peptide Sequence Number=SeqID_74126
atgactggcggggcagcagacgggagtgggggccatgcgggggtggtgggcgctggtgcagaatcgctggtgtggatgggggaatggaggcgaccagcgtggacggtgatggtgcggacaacgaacggaggcggctgcagggaggtgacgaaaccctacaagcgtgagaaacagagaattggaggggcggagtggcgacggctcggcagaacgagggggtgtcgacttcatgtgtccttggtagcggtaagctccactggagcacatctgcagctgcggccaggaaacgagagttcacaggaagatggagcagagctgagcacgactggcgagctggagggcagcgagcagggagggcgcgtagggggcgagctcgaacctccctggtggctggcgctagaggaagatggggaggggatggagaagatgaggtgcgtgcaagagatatggcgagctggagggcagcgagcagggagggcgcggagggggcgagctcgaacctccctggtgactggcgctagaggaagatggggagggtatggagaagatgcggtgcgtgcaagagatagggctgggcggacggctgagtga

SEQ ID NO: 30752 - DNA, 210 bp, Zea mays
  Peptide Sequence Number=SeqID_74127
atggagaggaaaggagccgtgctccctgttgctggcgtggggaatccagggaggaagatggcgtggggagggagagaaaggctgttggcggctgtgggttttctagggtcggagaaggcgaatcgtgatattttaaaatcgctgtcgatacggggttttgagttcggttcggacatgagatatttggccgagtcggataaaattgattag

SEQ ID NO: 30753 - DNA, 777 bp, Zea mays
  Peptide Sequence Number=SeqID_74128
atgaccgagcccccgcgccctgctcgcccacctcacctcttccatttgcgccctctgcctagctctctcgccctctctctcgctctgcccacacgaatcaagaacctccgccatcgtccgccgacgtccaccgcctgttccgtggccgccgttgcgctcgtgccacgcgccctctggtgctcccacgctagcgtggtgcccacggctgagtccgctagatccccctgtgcgtgcctaggccaacccccaagcctctggtgccccgccgtggccggtctgctcgtctctggcgaggtcccgccgcgggaaagagaagcaacctgggaaagagaagatgatctgagagccaaggctcggactcaggctaagtcccggaagacggcgaactccgctccgcccgacccagggctcggactcgggctaagtcctgtgacaccccagcgcacctttggcgttcgcccctgcgagctccatagccctagtcatggtggccaccgagctccctgctcccatctcctctgcccggcgccctccctattcctcttccacgcagggcagctggctccccttcctcctttccccttctttcccatggccgaggccgagctttcccatggcgccccctgcaggctcgggcatccccttttacctgtggccgcgccccctgcacaacgccctgctcccatattggctcggcacccccctttcttgtaccccacagcaagggcctccatggtcgaggctactcctctcggcgcccaagctccattcccctag

SEQ ID NO: 30754 - DNA, 432 bp, Zea mays
  Peptide Sequence Number=SeqID_74129
atgatgcttgccgaaggtgttcaagactcagaaaatggaagtgagttcaccggagacaaaaataaattacaaatgtaccttcgtattgaaggagagaaaatacaagtgtggcgcaaaagtgaatgccaaaatggaattgggattcaggtgggtcaagttaagacggtagaaatcaaggaggccgcggaaaaagggagaaatggggagaccgagaccgcggagaagaaaaggaacataaatcacggactcgtgggtatcctctgtcggaacagtgaccccgtggcaaatccaccaagaacaaagctccctcgggggaaggaccccgatggacacaaggtggagaaggtcaggctcggagataacggacatatggttacctacgaaaggcaactggctgttggggtcgattgggggaatcaccacggcggatga

SEQ ID NO: 30755 - DNA, 450 bp, Zea mays
  Peptide Sequence Number=SeqID_74130
atgggcaagaacaacaaacgcaagcgcgagccgactcctccatcagaggactttggcgactcggaatactcaggggaggagttctcctctgagtccgaggggtctccggctcccgtctctcccccagcgtcgtccgatgactcggacgactctcaagggattgccgtggaggtctggacttacatccgggccgtcaagcgctccgggctcgaaggctcggatgagtcggagtactcctcggacgaggaggactcacctgaaaaggatggcgaaggtgacgacgacgacgacgacggaggcgacgacagcgacgacggtgacggcggcagcaggggcggcaacggcggcagcaggggcggcaacggcggcagcagaggcggcgacggcggtagcagtaggggtagcaacggcggcggcagcaacaaaggcagcaacagggccagtggctag

SEQ ID NO: 30756 - DNA, 351 bp, Zea mays
  Peptide Sequence Number=SeqID_74131
atgtgcacgaagaatttgagaatagctcaccggattgctcaatctacttgcggccgcgggcgaccgaagtccggcgaggacgatctcgggtctctggtgaagttctgccaggtccgagagcttggaaagctccacgagctactggtgaagctatccgagtggctggcgcggcttggaagtgactggagggagctggccatggtggccgaggctcgggtggtgatggcgggcggtggcgcggcgtgctcgagagcatgttcaaggaaatttggcaccactttgatatttagactttttggtttcgagttttggaaaacagggaacacatttgatcttgaaaaagggttctaa

SEQ ID NO: 30757 - DNA, 330 bp, Zea mays
  Peptide Sequence Number=SeqID_74132
atgacgctgcggggtggatggccgagcgggcgggggctgctgcgggggtgctggttatgggagggaaaagcagcagcgaagttcgacgacaacgcaaggcgaagaacggtgctgctgcgggggatcgacgacgcgtggcttgttgtgcatttcatcgagcgtatagcaagtgtcaatggcgcactacgcagcagcgcgcaagcaggggaatggagcttgggcgccgagaggagtagccacggccatggaggcccttgctgctggggtacaataaaggggggtgccgagccaatatgtgagcagggcgtgtttcagggggcgcggccccag

SEQ ID NO: 30758 - DNA, 828 bp, Zea mays
  Peptide Sequence Number=SeqID_74133
atgtcttcgcgctcccttatgcatcgtgtctttccaccttccaagcccccggatgggggatacccgccgtcttttcacctcatcgttggaggaacgcaactccgtgggagttggtacctttcagccatcgttcggcttcaaggattttcatcatgcagcccggctgcacccctccgccggcggtcacccaagatggtgacctccagcttgatggtgggggaaagcgagccgggctgcggcctctgcccctccctcagcctcaaggattttcatcaccagggctggggaggggactgcaccgtgcctggctctcggacgcgagtggcttcggagccgctcgcggcgccggcgtctgccacggcagctggaagaggttcctccaccggcgaggtagccagggccggccacggaccgacctccaactctacggccttctgcccgtccttgcctcacgagtttgggcatgggcgggggcctcctggcagcagcatccgccctgaggtcagtgctgccgctgttcggccccccgaagcagaagtcgtcgtcgtcgctgctgctggagcgggtgacggcgcgccgttcgtcggtcttctgttgctccgcaggccctcccctatcgagtggggttactcgcctattgattatctgaaccgcttcaccaagcatgagtcgccccgtgtcaaggtgacgagtgagagtggagatcctcggaccgtgtcgccgtccgaggctaggtcggacctcgctgaaggtgtcgtcgatgccgagggtgctactgcccccttccagcgtcaagacccgagcctgcaggatcagagtgtcttgtag

SEQ ID NO: 30759 - DNA, 1302 bp, Zea mays
  Peptide Sequence Number=SeqID_74134
atggcgccccgcctgctctgtgacgacggcggctctcagcccccttacggaagcaagaggacctctctcgccctctctctcactttgaccacgcgaatcgagaacctccgccaccgtccgccgacgtccaccgcctgttctgtggccgccgttgcgcccgtgccccgtccagtgccacgacgaagctccgccaccgtcgccccgtcgcatccctgtgcctccgtcgttgccccgtgcctccagcgcttcccctcaaccgccctttggtgctcccgcgccggcgtggtgccctcggctgagtccgccagatccaccctgtgcgcgcctaggccaacccccaagcctctggtgccccgccgtggccggtctgctcgtctcccgatagcccatatcaggtgcactacacatatgtctgtgatcccctttttgccttctcgcctggtggagcgtccactgtgtcgcatggtgcaaggtcagtcaagtcacctggagagactgcatcatcgcctgcacgtggagcagaagcgtcgacgccaggagcaggagcaggagcagcaggactcttccccctcgcctcagcgggaggtggagtttgagaggctgccttcccctgcacctcagccagagatgccccctgcaccaccacagggcatcccagctgctggaggagaccctgatggagacggagacggagacggagacgacgacgacgctggtggtagttcgagccacgacacggagcgctcggaggagccggagccggagggatggatcgctagacccatcactcatgatgccgctcgtgggtgtcacttccacgacgctctcgacaccttgctgcgtcgggccttcgaccgacacacttggtccatcgagtaccgttgtgttgtctaccaacatcgtcgtgggttatacccggaccagtgggaggctacttgcttagtgtgtcatccagacgatgatcttcgagctgatggcctcgacttgaagtactaccctcgatgttcgaccggcaatgctggaggtgtgattgtctcgccagttggtgagggcaatcccaagctgaatagcatggtcaatctggttgtcgtgctcaacacagagttggaccacgcccttgacgagctagtcaaggttcgggcggaggttgcggaattgcgtgctgagtgcacagcacaccactatctggatggtggttctcccgcccctgtcgggattcagcacccttaccattcaccgccccatggtcgcttcgactatggtaccccagactgcagaacccggatagatttggatccctaa

SEQ ID NO: 30760 - DNA, 114 bp, Zea mays
  Peptide Sequence Number=SeqID_74135
atgacgaagctgatgcttgccgaaggtgtcgaaaagctcaggaaatggaaatgtaccttcggtcctgagagaaggtatattaagggcaacaacctctactcgttgggtacatag

SEQ ID NO: 30761 - DNA, 258 bp, Zea mays
  Peptide Sequence Number=SeqID_74136
atggagaaggttggttgtgatcatgccaagactgtagctcagccagattttgccttctcagatgatgatgttagaaacccttcagccgaagctactaccttggctgagctttctccccctctcgatccatatgatcctgaaactgacccatctgtcaaggaggcgctcgatataatcaagattgttgatgatgctattgatgaagttatcgacaagctgctgaacgaagctgccaacaaagtcctaaaggaagactga

SEQ ID NO: 30762 - DNA, 225 bp, Zea mays
  Peptide Sequence Number=SeqID_74137
atggcgttgcctaaggttgcggtccttctgagtgaatatatacttcaaacacttatgatccgtgtatacttgacacttggtccccatgatataatgcctccatatcttaagcgcatgcactacgcctgccagttccaagtcatgagtggggtagttccaggttccctatctcttaaggagatcatagctgtaggattccaaggtgtgaaatctatcttgtcttag

SEQ ID NO: 30763 - DNA, 189 bp, Zea mays
  Peptide Sequence Number=SeqID_74138
atggagattgctgaatacgccgaagccacccccttggcttcggagacaattcctgctatggctgccgaagttactgtcgctccgatatcaactcctgcttctactgaagcttccaagaatgagattgaaggtctagcagaagtagccgctgcaagcgcttctcctacctgtgttaccttcgggatctaa

SEQ ID NO: 30764 - DNA, 994 bp, Zea mays
  Peptide Sequence Number=SeqID_74139
ggttatgaaggctggggagcaccgggaggataaggagggggaatgttttgtccggtttggacatggtggtggcctgactccttccggtataaccgttaagaaaaaggagatcggaagtcagatggaggtccgctgccaaaccagcttgtgccagaatgaagattgtttccccaagttgctgagagcatgcacagttcgcctcggaatcaggagccagccagagtatgatggtcgtgaattcgtcgagcatggcatagagaaatgtgtcgtgactgtgtacattggatccagtccgcaccatgtggaatggagtgtcactgctgctgggcacagattcaaagacacatgtcaagtcgtcgctcgcaaggcattgagggccttgtgtcagatctatgaagaagaagtgaccgacacaccgctcatattctttccgccctttcagagagaccgtccagtttggatggccaggatgcgtgcattggaaggacagcagttgcttgaggacgaccccacagtcgtgtacctcactgcatacctgctcacccaggatgcccagtatgatttcttggctcggcaccaccgtcatatgattgcccgagcagaagatgcagagaagctcaaccgtaagctccatgtggacctcaccatagctcaagcccgtgtagctgccttggaaagtcgtgaagtcattgctgttgaagccctgaagcaagccaaggatgagcacgtccaaaagttgatggaggcctacttggtaacccataaccaacatagagccctgcggatccaagagcaccccgagtcctcccaagatcccctgccagagttgtttgagcccctcaccatgaagaagattccagcaccgtcccgtgagatcaaagaagaagctgcaagcaccccgctagcaccgccaccctatgaggagctacaagggtcagtcccgttcgaagaagagttcaaccccgtgttgccatctcagtcgccgccagaagaa

SEQ ID NO: 30765 - DNA, 399 bp, Zea mays
  Peptide Sequence Number=SeqID_74140
atgacttctcacggatcctcggacgaagggaatgcactgtcccacactgacgggcttgcacgagagggttttccccgtattttgtgggaggtacttcagggggccggttacacgacgcctcctcagtacgcggtgcagcagttcgagaagcaccgagtgccccgctgtaggctgtccactcaccccattggcttgttccccgctgagaaggaggacgacccaatgtggaaggatcgagtggagcatgccaaggacatctgggccatctacccaggtcagactgcccacttgacagtgcggtgcatgaatgccctgtaccgtctgcaagtgatgcggggtgaggcaatgtcccatctgatggcattgttggaggcaactaagatcaccttggataactga

SEQ ID NO: 30766 - DNA, 903 bp, Zea mays
  Peptide Sequence Number=SeqID_74141
atgtcgatgatttactcgggccacgtgcatgaaatgcaacgtttggggtattttgggaatggagttgggcaggcaccgggggttgaagatgtccccgagccagaggtgttggcgaagtttgtctgggcggtgacttcgtatggtgggcaaccgtcggttgaggtcttcgctaagaattattgtcttcattggcagaagaagaagattggtggattgattgcccaatttgggtcttgcacgttcacaccgaggactggaaaggcgtcgatcaaagttgttgaaattgttctgtgtgccaagaataagtggggtaactgcctgtggtacggtccttacctggagggggactctgctgatgctggggacgaccgagagaaaaaggtgaagacccagtctaaagagggcacctcgaagggaaagactgtgattacaacgactcggaagaggaagatagaggcgaaagggactgaaactgggcaggtggtggtggcaccggcgaggccgctcgctaacacgggggctttggcgaagggtgcggttctgacctcgctggacccgtgggcgcatttttgcgcggctgccgatggcggtggagaagtcaccggagcgtctgcgaccgaaggtgtggcggcggctgtcgtgcgacagctgcactatacgactgtcttcgccaaccaagtctggggtgctgaagttgtcagggacaagtcggtggccgagaacaagagccaaaaccttctcgataaggtgacatcgcttgaaaaagagaatgaagatctcggtcgtcagcttaacaatgagaaagatgccaccgctgaggcgaagacggagcccgagagtgcccgcgcggaggcccaagctgcccacaagtgtggcggaaccgcccgaattattccagcttaa

SEQ ID NO: 30767 - DNA, 2169 bp, Zea mays
  Peptide Sequence Number=SeqID_74142
atggaggtcgtcgcgtcctccgaccaatatcgctcgtcctcctcttccgccagcagccccgcgcgccgttactacctgcccaagcccggcgcgctccgccgccccatctccttcgaggactcccccgactgggacgacatccaccccgacgacaccatccacctcgccaccgccgcctctgcctccatttccattgcgagcagcgcctacccctcgccttcgccctccctgccccaagggtcctcctccgcctctgctgcatgccgcgaccggaaggtggccggagttaccctcgtctggaaggacctcactgtctcctcactcgccgcagccacaaaccgcttctccgaccgcctcgtcaagagctccaacggctacgcgctgccggccactctcaccgtcatcatgggccccgcgcgctccggcaaatccaccctgctccgagcaattgcagggaggctcagctctactgagaggatatatggcgaagtctttgtcaacggcgccaagtctcccttaccatatggatcatatggttatgttgaccgagacgatgtgctcattgaatccctcacagtacgagagatgctatacttctccgcgctcctgcagcttcctggtttcctatcttcgaaaaaggcaattgtggaggatgctattgcagccatgtcattaggtgaccatgctgacaaactcattggcgggaattgttttatgacgaggcttcctaccggagaaagaaggcgggtcagcattgcgagagagcttgtgatgagaccacatgttttgttcattgatgaaccactgtacaatcttgacagtgtgtctgcgctgctcttaatggtaacattgaagaaactcgcaagcacaggatgcaccatcatattcacaatgtatcagagcagcacagaggtttttggactcttcgatcgtatttgcttgctttcaaatgggaacacactcttctttggagaaacattggcttgcctacagcacttctcgaatgctgggtttccatgtccaatcatgcaaagtccatctgaccacttcttgcgggcaatcaataccgacttcgacagaattatagccatgtgcaagaatttccaggatgatcaaggggatttttcgtcagtgagcatggatacagcagtggcgattcggacactagaagcaacatacaaacaatcagctgactctgttgcagttgaatcaatgattgcaaagttgacagagaaggaaggtccttgcttaaaaggtaaaggcagggccagtgatgcagcaagaatcgtggttctgacctggagatcgttgctaattatgtcaagagattggaagtacttctggatcaggcttgtcttgtatatgcttattgctgtgtcaattggcacgatatttaccgatattggccattcactatcatctgtaatggtgaggatttctgcgatatttgcatttgtatcgtttgtcatccttctaagtgcttctggagtacccgctcagatcgatgaggtcaagatttattcccacgaagaagctaatcggcattcagggacaatggtgttcctgttagggaacttgctatcaagcattcctttcctattcctggtctccatcctgtcgtcgctggttttctacttcctgatagggctgaggaacgagttcagctccctgatgtactttgtgaccaccatctttgtatgcctgctggcaaatgaagcgcttatgatggttatctcgtacatctggctcgagacatacaagtgcaccttaactctcgttttcctacacgttatcatgatgcttgtggctgggtatctccgaatacgagaaaacttgccttatcctgtgtggacctacccgctgtccttcatctcgttccacacatacgctgtgcagggcttggtggagaacgagtacgtgggcacatcgtttgctgttggacagatcaggaccatacctggtgtccaagccgttcgaggctcgtacgacatttcgtcttccccaaacgcgaagtgggtgaacctcctggttctgctactgatggcgctcggatatcggattcttctctacttgctgcttcgtctagacgtgaggaagaacgcgaggaggcttggaaactggaggtcatggtggtcaagtgtgcattctgctgccactggtgcaaagtga

SEQ ID NO: 30768 - DNA, 1245 bp, Zea mays
  Peptide Sequence Number=SeqID_74143
atggacgccaacaactggcccgcgctctccgacgccgccaagggcaacaagctcccggactcctcggctccatcacctgcgcccgtagccgcaccatcggccgttgccaactcctccagttcgcaaaagcacggcgcccatcacggccgccacaagtccgccaggcgcattggcggtggtggcgaccactctccacgagaccatcctgaccggaacgttgccgctggttgggaccatgctgccggcggtggcgggggcaggggtgcccagaggaaccataataacggaggtggcaggaggggcaatggcgcacctgcctctgccactgggccttctcatcacggttctggtgccggtggcggcagcggcggaggctttggtgctaggcgaagaggggcatacgagccaccattctatcgtggccctccaccaccgatgggcatgggccactacatgagaggtgcgccgccgccaccgcccatgactgtcgcaccaccgttcatgggccctccaccgccaccagtttcgtccatgcgcccgtatgctggaccaatgatgttccatgacatgccatctcccatgtctcctgtatcccccatatacttttatgggccaccaccaccagaggctcttaggggactgcctcttgcgcctcctatggttggcccacctgcttatccatactttcaagcccagcctgaacctgaacctcagcctgatcctgagcctgatgcggaagaggaacgtgtcaagctgctcaagcagatagagttctacttcagcaaggagaacctatgctcagatgtgtacctgaggcagcagatggatggtcagggctgggttgatttatctcttatagctggcttcaaaaaggtccaagggctgaagaaggacctacaatatataaaagagacggtgcagtcctcatctgtactggaaatgaaggataataaaatcaggaagcacggagactgggagaaatgggtgatccctcgcgagagcaatcctgatgccccgtcaagattagcatctgtatcaagacctaatgtcaataacctgacatcacatctaggaggcatgggtctgcatgaatccgctagctctactggcgcagaggagctgaaccatcatgatgtcgtccagaacggatcgccttctggcggaggggtagggcagctggtgaagcagcagagaaggaaggcggtggttacatctggaggcgcctcagatgacatggaagactga

SEQ ID NO: 30769 - DNA, 663 bp, Zea mays
  Peptide Sequence Number=SeqID_74144
atgtcttcgcgttcccttatgcatcgtgtctttccaccttccaagcccccggatgggggatacccgccgtcttttcgcctcatcgttggaggaacgcaactccgtgggagttggtacctttcagccatcgttcggcttcaaggattttcatctgtcagcccggctgtacccccccgccggcggtcacccaagacggtgaccaccagcccctgggtggggagaagcaagccgggctgcgatcttggtcccaccctcagcttcaaggatgttcatcatccttgctggggtggaggctgggctgagccggagctccacctcccgcgcgggttcatgggtcaccctctcctgcggcgttcgagggagagggcgctcactggccctgcgggcggcccggacttcgacaacgcggggctggtcgacggcgggcgtcgtcacccccagcgtgtcgagctcgtcggcttggctcccggtggcccctcctgccggaaggcggctaccgcgccgtactcgcctgttggttgtctgaaccgcttcaccaagcatgagtcgccccgtgtcaaggtgacgagtgaggccaggggtagcgatatcagcatgaacaggggcagagttggctcaaagatgatacctggttggccggagcctagccaggtcgtccgttag

SEQ ID NO: 30770 - DNA, 162 bp, Zea mays
  Peptide Sequence Number=SeqID_74145
atggacatcgagggtgtggagacggtcgcacgaactaatgagagcaaccagcgggggaaagtaggaaagctccgcgcgcagcaacattttgagcataagagactacctgtgaggaacaccgagtggggccctgaaaattccaatttagctgtgtaccgttaa

SEQ ID NO: 30771 - DNA, 249 bp, Zea mays
  Peptide Sequence Number=SeqID_74146
atgtgcgtctaccgcgagaggacggagtctaccacgcgtgccgaggagaagctagaacccctcccgtccatcgtgacgggcctcatgtcctgcgcgtcgctcgtgtcctgcgaaggtgctgcgaatgccttggccctacgagggctacaggcacttgcttctatacttcgaggcctttgtgttacatggcactgcctcgttaaaaacctcaccctctgcgaggaaaagagtgcaggcacaaccagataa

SEQ ID NO: 30772 - DNA, 414 bp, Zea mays
  Peptide Sequence Number=SeqID_74147
atgcggcggtcaccctccggcaggaggggccgccggaagcccggccggcgactccgacacgctggaggtgacgacgcccgccgtcgttcagccccacgttgtctaagtccgcgccgtccgcagggccagcgagcgcctccacccccaaacgccgcgggaaagggcgacccgcggacccgcgcggaagggaccgggaaagggggataccccggaagggatccttctccgcgaaggaaccgggctccgagccccccattactgatcaggggttcgaaggctggccccccgaagggttcaacagtcgcctcagatcgcgtgggcccgacacacactactggtcaggggttcgaaggccagccccccgaagggctccatggccgcctcaggctactcgggctccgcgcccattactga

SEQ ID NO: 30773 - DNA, 1017 bp, Zea mays
  Peptide Sequence Number=SeqID_74148
atgaccgcgccagtaaaggctccgagccttcctactgatcagaggttcgaaggctggccccccgaagggttcgacagccgcctcagatcgcgtgggccctacacccactactggtcagaggttcgaaggccggccccccgaagggttccacggccgcctcaggctactcgggctccgtgcccattactgatcaggggttcgaaggctggcccccgaagggttcacagccgcctcagacgccgagcgagggatgaccatgggtacgttcgatacataaccaaggctcgggctgcgctcccgagctcaccggaggcaccatgttcggcgcccatcgagggcaacatggcgctttcccccctcctccttgcggaaaggcgacgcaggggcaggctcgggggctgctctcgcaaacccggctccggccgaaccgttgacagcgtcaacataccagcccgagaacttgggacccgaccgtacacccgggctacggccagctcgcatgagggaacaaccagaccagccgaagcattacgcgaggcattaagacctcggaggagtgaaaccactcctccgaggcctcgggggctacacccggcgggtgcgctctcgcgcacccaccggaacaaaacgcaaccgagaaaggctggtccccttgcaaaaaagtgcgacgaaagcctccaagcgagtgctaacactcccttcgaggctcgggggctactgtcggggaccataattaggggtaccctcaagactcctaattctcagctgaaggacagcgccgcctgcgccactccgactgcggtgccatttgacacagtgaggctgacaggcagtcaggccccgccggagggctcggactcgggctcaaccccagaagacggcgaactccgctccgcccgacccagggctcggactcgggctaagtcccggaagacggcgaactctgctccgcccgacccagggctcggactcgggctaagtcccgcaagacggcgaactccgctccgctcgacctag

SEQ ID NO: 30774 - DNA, 582 bp, Zea mays
  Peptide Sequence Number=SeqID_74149
atgggagcggtgatttcactgtttcgcccgaatccatataaaactagactgcatatggatggatttgatcaaacagtgaatgtgaaggttgtaatggcaactaatagggcacatactctagattctactttgttgcggccaggtattgttattaaggtatgtactactaagatgaatttgagtgacgaggctgatttggaagattatgtttgcagactggataagatcagtgatgctgatgttgagttgctaaggcatataattgacctaaaaaggcacttcaagcgggtaggaaaattcaaggtcgttctcaagtacttccaagtcggtacggtcgttgagcctgcatctgagttctactcaagtaggctgaaaaatagggaacgcaaagcaacattggttgacgagctgttatcagatcaatctctgaagagctacagagttcagtgctcacttcagttgttaatctcactatctgcaccctctgttctgaacttaaccgaaatgagcacctctacagatggtaatctccaagggtcctgttataggtggacgactataggacgactaggagtcgactag

SEQ ID NO: 30775 - DNA, 1275 bp, Zea mays
  Peptide Sequence Number=SeqID_74150
atgcaggcgacatgcaactgcaccaagggggcgcaccctttcgacttcgacgcatccagcatggaggcccacacatcatgtaaccggcacaccggttactacgtgcgagaaactacaccgccacttgcgccagtaccacgtcttctcgactgcggaaccggtgtcgcgactcgaggcaaccctgcacatggcccaacagtgccaaccgagcacatcgatcacgggtcagtcatccgcgggagaaggcgcgacggtcgatatggccaaaagtgggccggcagtaatggcggcggcaggcgggcggaagcagcggtcaagtcgtctgcaagctcacgtcccctcctggagcagcaggagaaccctctcccacggcgtaaagacgacgcgcccgtgttccgttcctcgaacggctcgcgcacgcacaacggctgccccgcgaaccactcgtcccgtcgcattaactctgcggcgaagcaggcgacgcttcacctccgccatgatgaccgcgtcaaaaaagggaccgggaaaggggatactccgaaagggatccttctccacgaaggaagcgggccccgagccctcctactgatcagaggttcgaaggctggtccctcggaagggttcgacagccgcctcagagcactcgggctccgcgcccactactggtcagaggttcgaaggctggcccctcggaagggttcgacagccgcctcaggccacccgggctccgcgcccactactgatcaagggttcgtaggctggcccccgaagggttcgacaaccgcctcagagcacgtagagcgagggatgactctgggtacgtctgatacatggtcgaggctcgggctacgctcccgagcctcgactccggaagacggactccgcctcgcccgaccccagggctcggactcaacctcgacctcggacgacggactctgcctcgcccgacccctgagctcggactcagcctcgacttcgaaaggcggtctccgcctcgcccgaccccagggctcggactcaacctcaacctcgaacgacggactccgcctcgcccgacccctgagctcggactcagcctcgacctcggacgacggtctccgcctcgcccgacccccggggctcggactcaacctcgacctcggacgacggtctccgcctcgcccgacccccgggcccggactcagccttgacctcggaggagcctccgcctcgcccgacctcgggctcggaccgaccacgtcacaggggggccatcattaccctacccctagctag

SEQ ID NO: 30776 - DNA, 235 bp, Zea mays
  Peptide Sequence Number=SeqID_74151
ctcggagacaactgatcaagccaaggacggaggcaagaagagcttcgaggtaccaagtgcacgggagaaggtcaaggaggctgaggaacccaaagccaaggccaaggcagctcagtctggcacaccggactgtccggtggtgcaccggacagtgtccggtggtgcaccggacagtgtccggtgcgctaggctgaactctggcgaagtggccgctctcggggaattcaccggcgac

SEQ ID NO: 30777 - DNA, 930 bp, Zea mays
  Peptide Sequence Number=SeqID_74152
atggaccgggcggcgctcaccgtgggcccggggatggacatgcccataatgcacgacggcgaccgctacgagctcgtccgcgacatcggctccggcaacttcggcgtcgcgcgcctcatgcgcaaccgcgccgacggccagctcgtcgccgtcaagtacatcgagcgaggcgagaagattgacgagaacgtgcagcgggagatcatcaaccaccgctccctgcgccaccccaacatcatccgcttcaaggaggtcatcctcaccccgacgcacctcgccatcgtcatggagtacgcctccggcggggagctcttcgagcgcatctgcaacgctggcaggttcagcgaggacgagcaagtatgccatcgcgacttgaagctagagaacaccctgttggacgggagcaccgcgcctcgcctcaagatatgtgattttggctactcaaagtcatcagttctacactcgcagccgaaatctacagtgggaactcctgcatacattgctcctgaggttcttctgaagaaggaatacgatggaaagagaatattgggtgtgcagtactcaattccagactatgtccacatatctccagagtgccaaaatcttgtctctaggattttcgtcgccgacccagccaccaggatcaccatccctgagataaggaaccatccatggttcttgaagaacctgccagctgacctaatggatgacagcacgatgagcaagcagtacgaggagcctgagcaaccgatgcagagcatggatgagatcatgcagatcctggctgaggcgaccattccagcagctggtccccatggactcaatcagttcctgaacgacggccttgacctcgacgatgacatggacgacctggactcagataccgatcttgacctggaaagcagtggggaaatcgtgtatgctatttga

SEQ ID NO: 30778 - DNA, 171 bp, Zea mays
  Peptide Sequence Number=SeqID_74153
atgaccgacattggccacgcctcccatcgttgtcccatcctcgactgcgcctcaccgcgacgccgccttgtcgcctcgtctcagcgatgccccgcctctagtgaagcccctgtgtctcaggttgttaatttccgacgtccatcttattttacaccgtcggaagttagttag

SEQ ID NO: 30779 - DNA, 801 bp, Zea mays
  Peptide Sequence Number=SeqID_74154
atgatggtagacgagggcagggtcggtgaaatggtggggtcgatggggctgcgcgtgcatgagaagagacgtgagtggaggcatcgaggccacgtgtggcccaggcagaagcacgagcggaggcgtaggaaccacgcgtggagcgaggagaggcacctgggagggtccaacaaggggaaagacatcttcgtcaaaaacaacgtgacgagatatgagtatgcggtgggaggtgagatcaaggcagttgtaccccttatggagggggttgtgccatacatggcaaagtggggagtgggatggctcacctccttcgaagggaggggaggcgattggggagatgggtgctggtgttcagggcctccgcccagtagctggcagggagagacgcctgaaataagaggcagtgatcatattggtggtggtgcgaatgatgcgtttggcccggccattctggggaagggtgtaggggcacgagatacgcaactggacgccgtgggtgaggaagaaagagcaagatgtgttgttgtcgaactcgtggccattatcacactggagggcatggaacgggcggcgaaactaggtggagacccaggcgaagaagtgagggtgctaaacgtatcatacttcaatcaaagtgggaaagtccaaaaaatgagagaagtcgtccagaatgaccagatagtatttgtaaccagagaggctgaggacaggaggaggtctagagatcataatggacaaggtcggaggtctgagcagccctggacgtggaggtggaaaagggaagatgagagtgacggatga

SEQ ID NO: 30780 - DNA, 720 bp, Zea mays
  Peptide Sequence Number=SeqID_74155
atgtctcgatctctaaggaggcaatcacagctcggggaaaacaagtggtccaggcacgaggtggcctgcatgtgggtgaagctcgacgcaatcatgaaggacaaggcccatggcatgatcaaaatccgcgagggtgccccagacaagtgtatgttgtggaggaggacgcgcacaagaacggtacctaggatgggagccacaatggaaggagtcgccaaaggcgaagctagagaggcggaggatggtgagaccccggtgggtgcggtcacgccgctgggaagggtggctgctgcaggaacaacgagggggacaccaggtgtgctgctgatgttgctgcgcagtgagggcagcaaggaggatggcgggatggggcccaatgccggagatgtgagaggtcccatccccaacaagctcgatgggagcaggggcggtgtgggtggggaccgcacccgcgtgctgcagggacgtgcccacggcgatgggagaacccagcacagaggggaagatgccaacgacggcctaaagactgacgaccaccgtggagaagtggagagttgtgtcatggtcgtccgtggggaggtggtggtctgcgcaagcgtcgatgccggagttgaaggcaaaggcggccgcgtcttgccaacagcgacatcggtcgctatggccacgacagtgaggtggggacggcgacggacgggacccggatgggggcgcggccgatga

SEQ ID NO: 30781 - DNA, 267 bp, Zea mays
  Peptide Sequence Number=SeqID_74156
atgatgacgccgtcgcaggccttcgtctggtgccgaacgaaacgaagggtgtccctgcccgttttgtctccgtcagaccagcgactgcagcgaaggcctcgagcgaagggtggcgtctttgccttcgccccaacatcgaccacccagtcggacgagggtggggtcatcgccatgatgctgaaggtggtggtgagggcggctgggtcccatcctccagctagcggggaccaaggtgtcaaggtggaggtgcccggaggcgggagctaa

SEQ ID NO: 30782 - DNA, 336 bp, Zea mays
  Peptide Sequence Number=SeqID_74157
atggggacagtggccaggacaagctccagcgtcgtagccacagtggaccggtgttgggtggacgcaggcacctccaggcacttggacgcctccaccaccccaaggatcgcagccagtcccgggatgggtgccaccggtctcccagccaccggcgggctctcagccatttcaagcgtggatggcaccgccaccgacgggggttcagcgtcacatgctcatggatcggagggtggtgtcaacgtccaagacttcctcgtccatggtgctggagggagtggccaccttcctggtggcggaggagggagtggccaaaactcccacagcccgccggagtga

SEQ ID NO: 30783 - DNA, 336 bp, Zea mays
  Peptide Sequence Number=SeqID_74158
atggcaagcacgtcccccacgggcaggcgcgtcgccgtcgggagggttcgtgcggaggtcttcagccatcggcgagataagtcacagcaaaaaccagtcccctccttcgcctccacctccctgcatgtggcgaagatactgattctcatcgccgatcggcggtggatcgactcctctagtggcatctgcaggggaggctcagatcccgttcctgttggggagatcactgggatcgaagctgttgggggccttcctcttctgaagactgctacaggagactttgactttgagatgaaggtatgcgtgatatggagatacaacctgaaggcaggatga

SEQ ID NO: 30784 - DNA, 1656 bp, Zea mays
  Peptide Sequence Number=SeqID_74159
atggccatgatgatgctagcgcgcaacctgtgctctcgtctccgcccaccgctcgccgccgccgcggcgttctcgacggtccccgcggcgtcggcggccgcagcggaggcggagaggtcgatacgggacgggccgcggaacgactggagccggcccgagatccaggccgtctacgactccccgctcctcgacctcctcttccacgggaagtgtgagctatttataggtccatctgtagtgttgataggaaggtactgcccccaagggcatttaacagcaacatatgcatttggtgtagaactactacatcctgagtatcttgacctatcatggattgctcaggtccatagaaatgtccataaattcagagaagtgcagcagtgcacacttctttcaatcaagactggtgggtgcagcgaagattgttcttactgccctcagtcatcaagatacgacactggattgaaggctcaaaaattgatgaacaaagatgctgtcttagaagcagcaaaaaaggcaaaagaggctggaagcacccgtttttgcatgggagctgcatggagagaaaccattggaaggaaaacaaacttcaaccagattcttgaatatgtcaaggaaataaggggtatgggcatggaggtctgttgcacactgggcatgatagagaaacaacaagctgaagaactcaagaaggctggacttacagcatataatcataacctagatacatcaagagagtattaccccaacattattaccacacgatcatatgatgataggctgcagactcttcagcatgtgcgtgaagctggaataagcatctgctcaggtggaatcattggtcttggtgaagcagaggaggaccgggtagggttgttgcatacacttgccaccttgcctacacacccagagagtgtccctattaatgcattggttgctgtaaaaggaacacctctcgaggaccagaagcctgtagagatatgggaaatgatccgcatgatcgccactgctcggatcgtgatgccaagggcaatggtgaggctttcagcgggccgagtacggttctccatgccagagcaagctctctgcttccttgctggggccaactccatctttgccggcgagaaacttctcacaaccgcgaacaacgactttgacgcggaccaggcgatgttcaatatccttggcttaatccccaaggccccaagctttggagaggaagaggcggcggcagcggcggtggcggctcctaagagaatagagcaaagtgtgtgtgtgcagaagagaattgagcaacagagacagataagattacgggagagaacgcaggactgtgagagaatattcttctacgtacatcgcttttcctattacatcctacggcaggtgcctaaattgaaaagccaactaactaatggcctcgccactgacagcacggcgctacaccgcaccacctcccacatggtgcctacaggttcctcaagcactgacgaggaagtcgcccgcaagaagatcgaatcgaagctcttctggccccctcccaagccgctaaggaggccctcgtcgcccgcgcccgggtacagactgctgctaccgttgcaagcagacgccaccgctcaggctttgttagtttacgcaaatccagctttggattag

SEQ ID NO: 30785 - DNA, 1204 bp, Zea mays
  Peptide Sequence Number=SeqID_74160
atgaacaaacacaccggcattcgaagtgccattacaaacggaactccggttccccctccgcaggtacgaacaacccccctccgagggggaaggcctgcggagcaacggaaggccgacgaatggtgcgccgtcacccgctccagcagcggcgacgacgacgccttctgctccgagggaccaagcagcggcaacgccgacctcaggctcgatgccgctgccaggaggcccccgcccatgccaaaacttgtgaggcaaggacgggcagaaggccatagagttggaggtcagcccgtggccggccccggctatctcgccggcagcagaacctcttcaagctgccgtggcggatgccggcaccgcgagcggctccgaagccactcgcgcctgaaggccaggcacgctgcagctgccagcgccacggacgacggccgcctctccctccaatcactgagtgaaggagcgggccgccgcccacgcgggggccgacctcaactcggcgcactcccctccccagccctggtgatgaaaatccttgaggctgagggaggggaagaggccgcagcccggctcgctttcccccaccatcaagccggaggtcgccatctcaggcgaccccccattttcgcccagaccaacgggcagaaggggcgggcagccgtgcaggcggcatgcaaccgcgccagatggacgcgcttctccgacttctggcacgccagcttgggaacccaggcccacgcgtcgagcaaccggcgcgccagttgctgcatacaagcaaccgctccgccacttgtgccaccatcgcgcctcttcggttgcggagcctatgtcacgactcgaggcgactcaacagcgccagcctggcgcgtcggtcaaagcgaccgaaagtgggctggcagtaatagcggtgacaggcgggcgggcgcagcggtcacatcgtcagccaggctcacgtcccatcctgagacagcaagagagcctcctctcacggcgtggagacgggaccgggaaagggggataccccgaaagggatccttctccgcgaaggaaccgggctccgagccccccattactgatcaggggttcgaaggctggccccccgaagggttcaacagtcgcctcagatcgcgtgggcccgacacccactactggctggcccccgaagggttcatagtcgcctcagacgccgagcgagggatgaccaggg

SEQ ID NO: 30786 - DNA, 387 bp, Zea mays
  Peptide Sequence Number=SeqID_74161
atgtttggaactgaggcaatgtttgctgaccttggtctattcagtgtgagagctatacaggtaagggcatataagaatgttgaacttcaaaatttcgggcaaggcggaggcgacaggagttggttggtcttaaatcgagttctcatgcttggttcacaagctcaaacagttattgggaagccaatactacctgatgctgctgttcatgctgttgtagaagaacatatttcagatttattggagtgtatttattttagcaattcagttgatccaaacaagaaggaagagaagcacaatatcaagagcagcaatatagaactggcgaccacagagattgcaaagaagctcagaaataggtggcaaaaggtgacagataacagaatatga

SEQ ID NO: 30787 - DNA, 480 bp, Zea mays
  Peptide Sequence Number=SeqID_74162
atggcaatgggtacccgctacccgaaatccgtgggtatgggaaacccgttgggtacccgaaacccgcatgggtatgggtttgggcaaaattttatacccatcatggaaacaaatggattactcaaaaatcaatttcctggagaacccaatatgatagatttatttgccgactctaaagctggatgtaatttagagaaaggagctcctagattggttgaaaatgaagtaaacttgaaggttgatccatataaacaagttgcaaatgttgactacacagatatggttgatagtaaatctgttgtggcatttgttaatagtgagatgattggttgcttaaatgtttcaacccttcaggaaccatgtctggtaattttggaaccggaatcagagtctacatgctcaagaaatgcagaaggtttcatgaaagaaagaatgcatgttcttcataccatgcctaagcatcaccaagatcatcaatag

SEQ ID NO: 30788 - DNA, 282 bp, Zea mays
  Peptide Sequence Number=SeqID_74163
atggagagctgggagctgctgcttctgcataatctgcaatttcagtttggaaaccgccaagagagcacacctcaaattggcacattaaaacagatgaaggaatttcatcatctgatagatggcaatatagagtttcttgtaaagttgagagatttggtcattgatgggtacaagaaggttttcaagtttttttccagaaacttgatgggcattttcatgtgctttctgggagaagcaaaaaaattcccaggagtcaactactctggattctgtgcaaattga

SEQ ID NO: 30789 - DNA, 405 bp, Zea mays
  Peptide Sequence Number=SeqID_74164
atggcaccggggagtagcattgtgactgtagtccccgagtcggactgtggagatgacgatgggcttcctgagtcgattgggggtatcaggcttgacgtagactctgcaagtaaaccgtggtctacatcggcatcgctagccaatgttgcattgtcatcgctgtgtggcttgaatgatttgctcgaatgcccagtgtgtaccaactcgatgcgcccacctatactccagtgcattgcggtgaaccccacgatggagagctgggagctggcagctctcactgattttcagaggcgtttctgttcaactctcggaatgaccaatcaagctgttaacgcagcgaaggaggcagttcagcgctcagaggaccttgatataaggtttggaatttcagactctacatgctag

SEQ ID NO: 30790 - DNA, 165 bp, Zea mays
  Peptide Sequence Number=SeqID_74165
atggcgtgccagccgttggatccgcgatggatgtctgcgattagatcagcccatattggttcaaggttgaatccggaccgtagatcggacgatgtacggataggagtagatctcggcccagaactcaggaaaataggaggaattaatttagaaaatgatttttaa

SEQ ID NO: 30791 - DNA, 513 bp, Zea mays
  Peptide Sequence Number=SeqID_74166
atgagcaagaacacaagggacacaagatttatcccgaggttcggtcacaccaccaaggtaccctacttcctcgttgaggcgcccacaaagagccgggtctctttcaaccctaatcctccctttgctgaccacaaaggtcaagcccacacaataatctttgctcaagcgagcgggctaaaagttctagatttcatggacaacaacttcaccggcatagtccctgagagcctgtactcgtgcaacgacctcatcacgctccgactgtcctccaacggcttccacgaccagctcttgccggggattggcaggctcaagtcactcaggttcctgtccctgacaaacaacttgttcacgaacgtcacgaacgcgctccagatcctcaagagcgctccgagcctcacgactctgctgatcgacaccaacttcagaggcgaggcaatgccggaggacgagacgatcgacggctaccggaacctccaggtcctgtccctggcggactgctcgctgtcatga

SEQ ID NO: 30792 - DNA, 456 bp, Zea mays
  Peptide Sequence Number=SeqID_74167
atggatggtggccgcatcctcgacccgctgctctcgggcgccgtggattccgcctccctcctgcgttctcatcccactcggccccctcctcgcacagctagccgcatgccaagcatggcggacccgcctccccatccgcaccctaaccacttgctcctcgtggcctccaccatcccattcgtgggagccgcatccacggccgggccagcctccctcatcatcggcccctacttagtaccgttcctcctccccacttccgcctccgcctccttcggtcacgtcatctctggcaagctctatgccccatcccacgccgcgctcgccgagcttgatgccttcgaggcaagcgcctcgcctcctcgtcaaaatcgttgttccctgtccactggtttggttttttacatttcctatgacttgccactcatatttcctacgacttgccactcacatttgtga

SEQ ID NO: 30793 - DNA, 708 bp, Zea mays
  Peptide Sequence Number=SeqID_74168
atgccgtggcccgggttcggtgcgctggacatcatgttcaacaacgccggcatcggcggagcggcgtgccacaacatccgagagaacaccaaggaggacttcgagcgcgtgctgtccgtcaacctcgtcggcccgttcctgggcaccaagcacgcggcgcgggtcatggtgcccgccggccgcggtggctgcatcatcggcacgtccagcctggcatccgcggtggccggcgccgcgtcgcacgcgtacacgtgcgccaagcgcgcgctcgtggcgctcacggagaacgccgcggcggagctggggcgccatgggatccgggtcaactgcgtctcacccgccgcggccgccacacccctcgccacggggtatgtgggactggagggggaatcgttcgagcaagccatggaggccgttgccaacctcaagggtgtgcgcctgcgggtggcggacatttcagccgccgtgctctacctcgccagcgacgacgcacgtcttagcaggtcggctgagcgcaaggatcatgcacccagagaagaggatggcgtgccaactgcgaccctgtgtgttgaatgcgtcgaacactacgagaggagggaagcatcggacgtgagagcgaaagcagcaggcaccaatctcacgctgacgttcttccctggctggccgcatgcggacgagccccagacgtcgcacaaggtacaacaatga

SEQ ID NO: 30794 - DNA, 249 bp, Zea mays
  Peptide Sequence Number=SeqID_74169
atgggcacgcttctcatttcaaagatcagagaggagtaccctgatcagatgatgctaacattatctgtctttccctcgcccaaggtgtcagacactgttgttgagccatacaatgcaaccctgtctgtccatcaactggttgagaacgctgacgaatgcatggttcttgacaacgaagcactttttgacatttgcttccgaactctaaagctgacgacccctatctattatatacacatggctgcctaa

SEQ ID NO: 30795 - DNA, 921 bp, Zea mays
  Peptide Sequence Number=SeqID_74170
atggccataatctcaaagatttgggcccaatccacgcttgaacttgacctctctctgcgctgcctcgtgctcgacgctgtgccaggcgccagagcgcgcactggcgacttcaccggaagcccgagatcgacttcaccggacttcggtcttccgccgccgcgcgtggacagagctaaccagccggactactcgccgccgacgagcatccccgcctgcgcacgtggactggccaactccgaccatccccgacggcgacccgcacaccgttgtgatccccaagacctccccaacgtcctcgaccacttcactggagcaatctcgccgccgatgaattcacccacccccgccagtggaggagacactcgtttcagttccgacttcctttctcgcgatggctttccttccatcttgtgggaagtgcttaactccgtcggttaccctacgccccctttgtacatggtgcagttgtatgaggagcatcaggtacctcgttgtcgggtctggctgactttggaggctcatccccttcagccgggttggcgttctcttgattctgagacaattggactcaggacggacgacaccgttgaagcagcagccatgaagactctgacgactttctgtggctaccatcccctagagatggtgatgcaccccttgggactcttccctgctgagaagaaggatgatcccatgtggtgtaatcgcgtgagccatgtgaaggatgtgtgggcgatgtatcctgacttggttgggagggtcactgttcagtgcatgagtgcgctgtaccgccttcaggcccttcagagcgatgctatggcactccttgctaacaccgctcaaactgccaagctcactctcgacagtcgagaagattttgtggtcgatctatccaccgagttggtagagaaggatctgtag

SEQ ID NO: 30796 - DNA, 378 bp, Zea mays
  Peptide Sequence Number=SeqID_74171
atgcgacctgatctgatctctcattttactgcatcattctatgacattgtctttgaactctctcttcccaatgatacagaatctagtgttagtttagggactgatggggttgtgaatactagtgaaccggaatcagtgtacacacttaagaccactttgtttcaaattggagatgtatgcgacatgcttgagaagtgtgctctgtccatcaaaaagtatgttgactccaagagggctaaaattattcaagatgaagccctgcaatatgctgaagatgatgaagctgcagatgatttggaggaactcccaagcccagatctccttactcaagccgacatattggaaaaatattttggaattgagtatgatagcgactag

SEQ ID NO: 30797 - DNA, 1932 bp, Zea mays
  Peptide Sequence Number=SeqID_74172
atgcagaggatcttctccaccgctgctgctggaatgagagaaaaaggggtcaggatccactgcctgttcttgatagtccgtggccacacagccaaacagatccaagcggagagggaggacgtgagggctggagagtcggactgccagaggaggcatggacgcacggggttagagcatagaggcgctctgctgttgggcgttgggaccaggcgaggcaggtatgactgtgtggcgcttaccgcctgggggctagggtcagggataggttggggtggtgggggttctaggtgcattgcgtcgacaactctagatgaacaccgtttgcattttgagaaggataaggctttggctcgcagattccagccagtattggtgaatgagcctagccaggaggacgctgtcaagatattacttggtctgcgtgagaaatatgagacttaccataaatgcaaatacactttagaagggatcaatgcagcagtttacttgtcagcaagatacatccctgacaggcatcttcctgataaggcgattgatctgattgatgaagctggcagtagagctcggatggaatcatttaaaaggaagaaggaagaacaatgctccattctctccaagtcaccagacgaatattggcaagagattagagctgttcagagtacacatgaagtggcactggctaacaggttgaagtattctcttgatgagaatgacaaagatgatggtgttaatattgaagtcataggggacaacaagattgcttcgccatcgatgcctccaacttcagtcgatgaacctattctggttggttcagaggaaattgcaagagttacatcattgtggtcagggataccagtccagaagttgactgcagatgaaacaaaacttctagttggactagatgatgaacttagaaagcgtgtcataggtcaagacgatgctgttgtggccatatctagagctgtgaagcgatctcgtgttggcctgaatgatcctgacagacctattgcaacactactattctgtggtccaactggagttggaaaaactgaactcacaaaagcactagcagcgagttattttggatctgtgggttatgccttccttcttgcatcattctcgcgttctgaaaagacatgttgcatggatcatgaatcagctatgattaggttagatatgagcgaatatatggagaggcatgctgtgagcaagcttataggctctcctccggggtacatgggatttggtgaaggtggaactttgactgaagcagtccggagaacaccattcactgtagtcttgcttgatgaaatagagaaagctcatccagatattttcaacattcttctccaagtatttgaagatggacacctgacagactcacaaggacgcagagtttccttcaaaaatacgttgattgtcatgacatcaaatgttggttcaacatcaatctcaagcggaaggaggagtataggtttctcaacacaaagggatacagaggagaccacctatgctgcgatgaaatcacttgtgatggaagagctgaaggcattttttcggcctgaattgctcaatagattggatgaagtggttgtattccaccctcttgaaaagacccagatgatggctattctcaacctaattctacaagaagtcaagagtagacttctagcccttgggattggcctagaggtatcagaatcaatgaagatcctgatttctcagcaagggtatgacagaagctatggggcacggccacttcgaagagccgttactcagctggttgaggatgttatcagtgaagcaattctctttggacagttcaagcctggtgacacgatattgatgggcactgatgccacagggaagccttgcttgagccgactcaatgatcagaccgtccaattgtccgacactgctccaacaatatga

SEQ ID NO: 30798 - DNA, 129 bp, Zea mays
  Peptide Sequence Number=SeqID_74173
atggctgccaggagtaagaaccgcctgtttgggagtggacggggtgttacaaatggtatcaaagccgaccctgacgatttcacgggtgtgtgtgggctaggggttcaggtgcaaaaaggttcaatataa

SEQ ID NO: 30799 - DNA, 744 bp, Zea mays
  Peptide Sequence Number=SeqID_74174
atggaggcccaggcccacgcgtcatgcaaccggcgcgccgaatgcttcgtgcatacaactgcaccgcctcttgcgccaccaccgcgcctcctcgactgcggaaccaataccgcgactcgaggcgacccagaacacgacccagcggcgccagcctggcgcgacggcggcgcctctggcaggagaagcgagcgacgcttcgcctttgccataacaaccgcgtcaaaaaagggaccgggaaagggggataccccgaaaaggatccttccccgtgaaggaaccaggctccgagcctccctattgatcagaggttcgaaggctggcccctcggaagggttcaacagccgcctcagagcgcgtgggctccacacccactactggtcagaggttcgaaggccggcccctcggaagggttcaatggccgcctcaggctactcgggctccgtgcccactactgatcaggggttcgaaggctggcccccgaaggcggcagcctcctcccttatctccacgcccacctaccgagctccaccatccatccatggccgcgccgagcttccaccggtcgtcctgtgtgccgaccgccagcacgaacacgcgtggcctgaggccacagccggccttgctacaggcaccggcgggcgagccagggacgcagccagccctggccaacctctgccggcccagccgaagccgacctccgtcctccccaagcggtggtggcagccctgcgtacatgcagtttga

SEQ ID NO: 30800 - DNA, 1107 bp, Zea mays
  Peptide Sequence Number=SeqID_74175
atgtattcgcgcttccttatgcatcgtgtctttccaccttccaagcccccggatgggggatacccgccgtctttccgccttgtcgttgggggaacgcaactccgcgggagttggtacctctcagccatcgttcggcttcaaggattttcatcagccagcccggttgtacccctacgccggtggtcacccgagacggtgaccaccagcccctgggtcgggagaagcaagttgggctgcgatcttggtcccaccctcagcttcaaggatgttcatcatcctcgttggggtggaggccgggctgagccggagctctacctcccgcacgggttcgtgggtcggcctctccttcggcgttcgagggagagggcgctcactggccctgcgggcgggtcggacttcgacaacgcggggccggtcgacggcgggcgtcgtcagcctcagcgcgtcgggctcgtcggcttggctcccggtgccccctcctgccggaaggcggctgccgcgccgcgtgcacgggaggaccgcccaagatatcgcgcgctgccagggcggcgttcgtgttctggggcggtcctgcctttgcaccagtacggcgcctccgtgcggaggtcggtgcttcactcgtccgggagggactccctcggctcggtcagccttgttgcccgaggcttctcttgcttagttaaaggaacccctcggccgctcttcgatgagccgaggccaggggtagcggtgtcagcgcgaacagaggcggagttggctcgaaaagaagacctggtcggccggagcctggccgggtcgtccgttagcgggatcgacgccggaattgacctgccgaggcctcgggccgggctgatatccttggaggacagctggccgaggccccggggtgaccggccgagccgcctgctcgggccggattctcggagaagaccctggcggcgatggcccgagcttggtgatgatgttgtccttcagagcagagaccctcggaccgcgtcgccgtccgaggctaggtcgggcctcgtcgaaggtgttgtcgacgccgggggcgctgctgctccctttagccatcaggatccgagcctgcaggatcggattatcttgtag

SEQ ID NO: 30801 - DNA, 288 bp, Zea mays
  Peptide Sequence Number=SeqID_74176
atgtaccttcagcttgaaagaaggtcccctgcgtacaacttcggctctgcgccaaccttcgtattcttcgtacttcttcacgttgtggttctgatccgagtccgaaggaccttcgaaagacgaaggcccccaacaaaatccgaagagcccaaacaatcacaagatcaactgtcatattccaatcaagcacctccaccaactcaagatgagaaacaggctcaagatgatgaaaatgaagatcaagaggatgagctacctcaagaggaggacaataagacgaatctctag

SEQ ID NO: 30802 - DNA, 456 bp, Zea mays
  Peptide Sequence Number=SeqID_74177
atggtggctctcagctcccttacggaagcagggggacgtcagcaaggacccaaccgctccgacagctgtccctccgccaggctccgttgctcctccgacagccacgacaccacaccagctgggtgccaagatctctccggctgccacattggcatggccttcttagagaaggttggccgcgcggggacgaggacgggacaggcgctctcttggggccgctcgcttccctcacccgcgtggacgcttgtaaccccctactgcaagcgcacccaacctggacgcgggacgaacacgaaggtcgcgggatctccacctctctcacgcccgtctccagccaccttgcttccccccttcgcgctcgcccacgcgctcgacccatctgggctggggcacgcggcacactcactcgtcggcttagggaccccccggtctcgaaacgccgacaactttaaataa

SEQ ID NO: 30803 - DNA, 921 bp, Zea mays
  Peptide Sequence Number=SeqID_74178
atggcggcgcgaagggcaggaagggcggttctctcttctctggctagatctctcgggttgcaaaaacctaagaggcaggcaggaagcggagcaaagaaccgtcaccggaccctctcctgggtatataaagaccaaggcgaggacggttccaacgttccgcccggaccggacgcgggattcaaaaacgcgaggcgaaacggccgttcctcgaacggctcgcgcacgcgcaacggccgccccaccaactactcgccccgtcgcattgactccgcggctggacaggcggcgcttctggcaggagcagcgggcgacgcttcgccttcgccgaaacaaccgcgccaaaaaaggctccgagcctccttactgatcagaggttcgaaggctggcccccccgaagggttcaacagccgcctcagatcgtgtgggccctacacccactactggttagaggttcgaaggccggccccccgaagggttccacggccgcctcaggctactcgggctctgtgcccattactgatcaggggttcgaaggctggcccccgaagggttcacagccgcctcagacgccgagcgagggatgaccaggggtacgttcgatacataaccaaggctcgggctgcgctcccgagctcaccggagacaccatgttcggcacccatcgagggtaacatggcgctctcccccctccttgcggaaaggcgacgcaggggcgtatgtaaaaaagccgagtctgtccctgatcgccctcttgccctgtgcagaggctcgggggctgctctcgcaaacccggctccggccaaaccgttgacagcgtcaacataccagcccgagaacttgggccccgaccgtacacccgggctacggccagctcgcatgagggaacaaccagaccagccgaagcattacgcaaggcattaa

SEQ ID NO: 30804 - DNA, 549 bp, Zea mays
  Peptide Sequence Number=SeqID_74179
atggcagtccataaaagtagcgcagaaagaaatgagaacatgtaccgaaagaaaccaagagcatctggatctgaaaagataaggtcttgccatattgctagatcagtctgggggtatgtggcaaaatgtcttaataccagtactgttcctgggaatattgtgcaatgttggttctggctatccctaaatctaccatatgccaaagacatatcagttattggtgctccgtgcttctgccatttgttgggctttgtggaagagtttggtcgtcgccgtcaggataatgttgaggtgatattcccagaatcacaagttgtgggcagcggcaatccatcttctgttgcggataacacagttcttgcttcggcatcatcagcctcagccgctgcagattctgcagctctcgttgataaggctattgcaaagttgcctgctgatgttcgtgcacacgcaactgattcaaagagaaaggccaaatcacaagatcctggttggaagtttggatggtggccagatcctaccaagaaagtttgtgtgatactggtttaa

SEQ ID NO: 30805 - DNA, 792 bp, Zea mays
  Peptide Sequence Number=SeqID_74180
atgtccgcggagcagccgctgcagtttcccgaagctggcgagttcctgaggccactcttccttggagcaccggacactgtccggtgtacaccggacagtccggtgaattatagcggagcgcctctggaaattcccgaaggtggcgagtttgagttggagtcctctggtgcaccggacactgtccggtggtgcaccggacactgtccggtggtgcaccggacagtccggtgccctagaccagagacagctgatcgaactgagggcgaaggccagaaggacttcaaggtaccaaaagcaagggagaaggtcaagaggactgaggtacctaaagccaaggtgaagaagaggttctgcaagagtaccattgaaatgtgttgggctcaaggtatggctagaatgatcaagtcatgtgacttagaggtttggagtccaacattgagcttgaacaaaccaaaaaggatcaacatggtgaaaaatgttaagtatgataggtttgaacattttatatttgaatatgttgcatacaccttttacaacgttattagcactatggtgctcaagaaagttcaaattgattggaagaagaataaaaaaggacttaggagctacaatctaggagcaccggaccccctatatgaatcggtctggtgcacaccaggccccaacagagaactgtatggtctcaggaatttggctaaaattcaccataccatccacagtactcgggccactggtgcatcggacctcatggtccaacggctaattggtgggcaacagtcggctaatggctag

SEQ ID NO: 30806 - DNA, 342 bp, Zea mays
  Peptide Sequence Number=SeqID_74181
atggtgagagaacgaagaacacaaacaaacacaatgagcaagaacacaagagacacaagatttatcccgaggttcgatcacaccaccaagatgccctacttcctcgttgaggcgcccacaaagagctgggtctctttcaaccctaatcctccctttgccgaccacaaaggtgccaaaggttcacaaaaagccaataaaaagaccaacaaaagggttcaacaaaaagagcaagggataaccgaagtgtgccctggtctggcgcaccggacagtgtccggtgcaccaggggactccaagctaaactttgcaccttcgggaattctcagagacgcttcactataa

SEQ ID NO: 30807 - DNA, 2442 bp, Zea mays
  Peptide Sequence Number=SeqID_74182
atgtactccccggtctacggggccgaagcctaccttcccccggaaacccttctggactccccatgggtccaagcttctgacaagtccatgcagaaatggctacaacacgaggacgaggactccatcatcaaacgcagatgggaacccagggacctctctgcgaaagcaggagggcccgacagcctgagggccggttctaaagaacaggagcccgttccatggggtggtccggagcctgtgtggctgctgagcctggtcccgtacccgaaagcctgcacactccaccaccccgtgatgggtaccctagtatttggagctataagtcctgtgggtccggcaacctggggtccagaactagagaatgaacacttgtctcctggggtggttcggagacgtgtagtcgctcagtctggtcctgtaccgtgggcctgcacgctccaccactctatgacgggcccaggtcctagtcgaggctacctcctgggcgccattgccaactctttcttaggtatgctggtctgcagcctcgacaaactgagcctacatcccaagggggccagcggcggcggccacctctgctccgagcggctcgccagcggaggcgaccacctctacaccgagcagctcgccagcggaggcgaccacctctgcaccgatgacttgccagcggcggcaaccacctctgcgccgggcagcctccccagcggtggcaaccacctcagcgtgcgcgccatggcgaagaggccctcgcccctgccctcctacgggggtgaggacaagaccatccaagccatggagttgggagcacgacagcaggcggaagaggcgggtcaccagcccatgtgggaggtggagccgcggctcagctcgctctccaccaccatgaggctgatgaacatccttgaatccaagcactggtggaagagcgccgctcccacaaggcctcgcacctccagtagaggaaagacaagaccggcagcaccaacccgctggggaggacaaaaggcacaaactctcgagcgacaagttcaccggggtggagggtgccagcgcaaatccttccgccgaacgccggcgcatcccatccaagcaggcgagaagtcgcaccgccgctcgcgccagtaccgcgcctcctcggggccgctgcagaagactgagatggtgaattttcaaaaccaatgcagcggtatcgaggcaccccgcgcatggcccagtgaaaccatcaagtacggaagtcacaggtcagtcagccgtggggacaggcgtgatagttggcatgaacaggaagcaattacaacagcaagcgcgcggaagcagcgtgccaatcgccaatcaaactttgaccccacctgcaggctcgttccctcccctgaggcgggcccgggggccactgtcggtaccctgaataggggtaccccttactacagtatgaaggcacgggtgcaatcagttggaccagaccttcatgaggaagcaccggacccctgtacgcacagcccggacccccgaatacggtccaggactcccaaagaggacgcgtcgcctgtccaccctgctgacaggcgatgtgccgcctcagcatttattgtgacctatccactcaactggcaggcggcgtccaggccatcctgcaggcagcgtgcctgtccagtccattgccaaacagtacgcccgtgctgcaaggagctaaagacctctcacaacaatctaaaagaaagttgtgagaagcttaaggaagctcaaaaaccctcttgtgtggatgacatcgtggtggtcaccaaagatgttggagtcactcttgacttacttgataatcccacaagtgaaccacatactactaacattctttgtggtaaatgcaatatgtctctcatgaatgatattattgtttgtgatgagtctcaagttattgttgagaatgaaatgctagtaggtaaattaaatgctctaactcatgatttggagaaggcatatggtgggaaagccaagttggatttcatctcgagaagtcaacgttgctcacttaaaagtgagggccttgtttatgttcctaaaaagtggaatgcgaagcgggagccagaaccgtaccttggagacgaagttccggcaaaggaagtagcgaccagcgatctgcgcgaggcgcgcgatctggaacgggaagatgtcgagcatgcaaagctccacgaagatagaagccagggagcggccgatgcagggcgagaggtcacgctcgcggcatgcttgcttgtcgctgatgcgtgcgcagccagaatcgtcgacggcgctgcgcccttcgactcctatgtcccggcctacgccgcccagttcgacggctttgacctcgaccatgcagccttcctcagcaacgggaccaactccggcctcatgggctccgccttcttcaaggaaagagaggaggcctacaagtgcatgccctcgtag

SEQ ID NO: 30808 - DNA, 342 bp, Zea mays
  Peptide Sequence Number=SeqID_74183
atggacggctccatgggtgccacgtggccagaaaagatgatatatcttagggtgcaatcagttggaccggacctccacgaggaagcaccggactcctgtacgcacagcccggacccccgaatacggtccgggactcccaagcggagacccgatgctgccacatggcttgttgcctgtgacgcgatgtgccgcctcagcatttattgtgacctgtccactcagctggcaggcggcgtccaggccatcccgcaggcggcgtgcctgtccagtccattgccaaacagtacgcccgtgctgcaaggtgcactgtgggccatcatcacttatgcgttgccagggtag

SEQ ID NO: 30809 - DNA, 2088 bp, Zea mays
  Peptide Sequence Number=SeqID_74184
atggccgcagcgccgcgtagtcttgtcacctgcagcggcgggggcagtagcagtagtcgcatcctgctcgccgtcttcctggcggccgccctcttggcgtccgcggccaatgcggccgtctcgtacgaccaccgctccctcgtcatcaacggccgccgccgcatcctcatctccggctctatccactacccgagaagcgcccccgagatgtggcccgggctgatccagaaggccaaggacggcggcctcgacgtcgtccagacctacgtcttctggaacgggcacgagccggcgcaggggcagtactacttcgccgaccgctacgacctcgtccgcttcgtcaagctcgtcaggcaggccggcctctacgtccacctccgcgtcggcccctacgtctgcgcggagtggaacttcgggtaccggccaccaccaccaagtaccaacacaacactcttgcagactctgaaaatcgtagccgacgtctgtacctgttcttttttcagtggctttccagtttggctcaagtatgtgccgggcatcaggttcaggacagacaatggcccattcaaggcggcaatgcagaagttcgtggagaagatagtgtccatgatgaagtcggaggggctgttcgagtggcagggaggcccgatcatcatggctcaggtggagaacgagttcgggccaatggagtccgtcgtgggcagtggcggcaagccatacgctcactgggcggcccagatggctgtcgggaccaacgccggcgtgccgtgggtgatgtgcaagcaggatgacgccccggaccccgtgcttaacagcttccagttcttactctgtgtaagccggtcactgcagatcaacacttgcaatggcttctactgcgactacttcacgccaaacaacaagcacaagccgaccatgtggaccgaagcctggactggatggttcaccaagttcggcggcgcggcgcctcaccggccggtggaggacctggccttcgccgtggcacggttcgttcagaaaggaggctccttcgtgaactactacatgtaccatggaggaacgaactttgggcgcaccgccggtggccccttcatcgcgaccagctacgactacgatgcccccattgacgagtttggtctgctcaggcaaccgaaatggggtcacttgaggaacatgcacagagctatcaagcaggccgagcctgcgttggtttctggcgatccaacgatacgatctattggaaactacgaaaaggcatatgtcttcaagtcaaagaatggagcctgtgctgcgttcctgtcgaactaccacgttaaatctgctgtgaggatcaggtttgacgggcgtcactatgacctcccggcttggtccatcagcattctgcccgactgcaaaaccgcagtcttcaacaccgcgacggtgaaggagccgactctgctgccgaagatgagcccggtgatgcatcgcttcgcttggcagtcctacagcgaggacacgaactcgctggatgacagcgcgtttgcaagggatggcctgatcgagcagctcagcttgacatgggacaagtcggactacctgtggtacaccacccatgtcaacattggttccaacgaacgattcctcaagtctggccagtggcctcagctcagtgtgtactctgctggacactccatgcaggtgttcgtcaatgggaggtcatatggatctgtttacggcggctacgacaacccgaagctaacattcagtgggtatgtgaagatgtggcagggcagcaacaagatctccattctaagctcagcagtgggccttcctaacaacggtgaccatttcgagctgtggaacgtcggcgtcctcgggccagtgaccctctccggcctgaacgaggggaagagggacctgagccatcagagatggatataccaggtcggcctgaaaggcgagtcgctcggcctccacaccgtgaccggaagctccgccgtggaatgggccggccccggcggcggcacgcagccgctgacttggcacaaggttcttccatccatccgtcagcgatctgaagagatgcatggcaaggcagcgtggcagtga

SEQ ID NO: 30810 - DNA, 198 bp, Zea mays
  Peptide Sequence Number=SeqID_74185
atggcgggcggaaatacgctcgccggagctaaggaacggtggctggccggtgagggtaatttggcacgacttcgatatttggatcttctggctttgagtttggaaaagcagagaacacagatgatctttgagaagaggtctgaaattcagaaattcagaaatctgaatttctctaagggttcattgatcaagggctga

SEQ ID NO: 30811 - DNA, 327 bp, Zea mays
  Peptide Sequence Number=SeqID_74186
atgaggaaatgggcaaggcctagcccactactcctcatgctcctctcctgccggagcaacatcccactcgaccgtccaacccggtggcagggtggtaggccaagtcacaccatcaactacatcctgcatggtacctgcaaaaatggtgccacaagcaaggctgagtatactaatactcagctagacttaaccgtgaccgcacttgtacccaccatagatagcatgggagaccctgtctcaagtcgcatgagggataaagtccgcgcccggcttcactcagggcagaaggggtactttgaactacaactattatttaacagtgggtaa

SEQ ID NO: 30812 - DNA, 555 bp, Zea mays
  Peptide Sequence Number=SeqID_74187
atggccggggatgcaagccaatgcctccgcgtcaaagtgcctatcctagtggtgcatcacggtgtggggaccgaggggaagctcatggggataaccgtaccaggaatgaagatgccgagagcccgcgacgatggcgaaagcactcgaccaccatggcggctcccgactctgttctatggcgacgaattcggtgcgacaacggcgctgattgcgctacgatggcgaaacttccctctaatggcggcgtctgcctttggtggacaaggcggcgccgagcagtacgggcgagccagaagagttgcggaggcgcttagggttttattcccccacgacgcggcgagctcagtcccgccattccgcaatccccgcgaggaccacgcgctccgccatgcgcggaagttcgttgacggggatgaagctgtcatgcgggtcccgcatttcagtgtgagctgtccctccgccaggctccgtcgctcctccgacggccacgacatcacaccagctgggtgccaagatctctccggctgccacatcggcatgtacttagggcgctag

SEQ ID NO: 30813 - DNA, 534 bp, Zea mays
  Peptide Sequence Number=SeqID_74188
atggctaaaaattttggcagcgaaacagtgcaaatagcaatgaatgctgtggcggacacccgctcgcactcgctgcgcggtggaccgcagagaccgaacagtaactctgcaaggtgggaccgctatacgctggaagatggaatcgtttctcgagaacgagctcagggaagcgatgaggtcgtcagacttcttggtcttcatgactatgtcgtcaacatatacatcgatgttgcgactgacttggtcggtgacgcactggagcatgcatcactgaaaagaaaggagctcgcaccctatggtggagtctacgacctggtcgatacgatgaagagggaaatgatcttttggacatgccttgttaaggccagtggaatgctcggtgacttcccattggatccccggcatgtttgcgagcttccaagggaacgctgcaggtcgaccgtgaccttcttcgggtcctcaaaaaacttgaaggtgccggtgctaaccttgggggcatctggggcacccgagggtgtatccttctggagctag

SEQ ID NO: 30814 - DNA, 210 bp, Zea mays
  Peptide Sequence Number=SeqID_74189
atggagaaaactccagcgacagcatcaagcccatggaggacgatgaggagccagagcctaagcacagtcatgggtgacaccttgaacgttgggaggccacctgtctggtgcaccgcccagaggacaacctctacggtgcagaagctctctcagagcactactccatctctaagagagactgctgaggtgaccattcaagatgcggcatag

SEQ ID NO: 30815 - DNA, 609 bp, Zea mays
  Peptide Sequence Number=SeqID_74190
atgtccatatatgagcaccaattcggattcggaattcaaaatcagaaagtggacagaaattggaaaaatgagtatcaggccgcggaccgtccgcctatggaccgcggaccgtccgcagcatcaggaaatggacagtccgagcagcctcgcagaccgtctgagatcatcagggcgcggaccgtccgccgcccccgcgcggaccgtccgcgacagggcagaaaaagggacagagcccgcagtcttgccagttgtgcccactcggttgttctcttttgctctcctctcgcatatactctcttgtgtcgagtgtgcgcggaccgtgaagagaagttgcgtgcggacagtccgacagctagcagcaccattcactcaacatgtcttcatcacgtggttttggtggtctccgcaagaaacttgcaggtcgctttaaatcaaagcgccctcgtggcaatgatgatgattatacaccttgaagagccaaaaaggcccaatcctcagctgggggcactgaatccatggatgctgaagattttcttaatgttcatccagattatcccattgatatccaaggatggacttatcccaagcggcgattttatatggctttga

SEQ ID NO: 30816 - DNA, 1044 bp, Zea mays
  Peptide Sequence Number=SeqID_74191
atgacggtggcagacgcgcgggagcagcgggcacgtcgacagccaagctcacgtcccatccgggggcagcgagagagctccctctcacggggtgaagacaacgcgcccgtgatccattcctcgaacggctcgcacacgcgcgacggctgccccgccaaccactcgccccgtcgcattaactccgcggctggacaggtggcgcttctggcaggagcaacgggcgacgcttcgccctcgccgaaacaaccgcaccaaaaaaggctccgagcctccttactgatcaggggttcgaaggctggcccccgaagggttcaacagccgcctcagatcgcgtgggccctacacccactactggtcagaggttcgaaggccggccccccgaagggttccacggccgcctcaggctactcgggctccgtgcccattactgatcaggggttcgaaggctggcccccgaaggctcaccggagacaccatgttcggcgcccatcgaggaggctcgggggctgctctcgcaaacccggctccggccgaaccgttgacagcgtcaacataccagcccgagaacttgggccccgaccgtacacccgggctacggccagctcgcatgagggaacaaccagaccagccgaagcattacgcaaggcattaagacctcgaaggagtgaaatcactcctccgaggcctcgggggctacacccggcgggtgcgctcgcgcgcacccaccggaaccaaaagcaaccgagaaaggctggtccccttgcaaaaaagtgcgacgaaagcctccaagcgagtgctaacactcccttcgaggctcgggggctactgtcggggaccataattaggggtaccctcaagacgcctaattctcagctggtaacccccatcagcataaagctgcagaggcctgatggggctcggactcgggctaagccccggaagacggcgaactccgctccgcccgacccagggctcggactcgggctaagccccggaagacggcgaactccgctccgcccgaccaagggctcggactcgggctaa

SEQ ID NO: 30817 - DNA, 2472 bp, Zea mays
  Peptide Sequence Number=SeqID_74192
atggaggcggcgctgggggcgctgtgccgcgccggaggctggtcgtacgcggccgtctggcgcttccatccccaagaccctcgaatactgaccggtgttaccccgttcgataccagattgctcacattgggggactgctactgtgaagatgaggcaaaagcaatggttcagaagatgcttaatcttgttgaagttgttggagaaggcatcctaggacaagctctagtaagcggagagtgtcaatggatttacgacgatacttgccacgcgttgaatcagataagccatgctgataacggagatttacatcagactattgcagtgttacctcttcagttgcatggactggtgcaatttggttccacacggaaggtcagagatatatttgatcggatgaagaatgcttcaagcgatggtccaatggagtatacccagaataactctcttgcatgcggtcagcaacctatccttacttcatcgagacctgtcaatgacatgctcgtacataacaaggtcaacccattgcaaactgagaaacttttggaggatatcgagagaacagaatctataaggagttcgatctgttctccaagcaattcacaaagatctttaaatgatctaacctcccatggtactggtaacagcagcatggatactaatatattagccatgcctgttaactccaagtctatatatgatctcaaacgatttgataacgtcacagagttgtttcatcgaagttctaatgacagaattggttttcaagtcagctctagtaaagagcctgattctaccattgctggtgtaatgtcagaatacaaaagtttgaacaatattcatatgacagaaaatgattcatgtggtcaaaacataggatataccccgtacctttacactaccaccaactcttcaaattctggccttgatgaactttcttattctggcgttgctttgtcgtcatcgtttacagcagtatcagggaaagttaaagattgcctgcaaactgagagtgacaagtttctatgtaaatctgtatcattcggcagcaacccttgtgcttctaaattccaagaaaatcgcctatcaccataccatgccctcatgcacgaacaatccctgatacctgaccctggagaatctgtgaggctcctctcacaagaagaatcctttattgttcaaggtgactcaagtcaattcaaggatactgccgactttacaggccagggtaacagtacatttcctgaattacctaacagatcacctgaagaagctactgctgaaactctagaaaacaacatgaaggactgtagtggaaacaacagtctgctggaaactatgatgcttgatcttagcaccaacagctttgtgcaagattggtgggacaacagtgttctactggcagaaaaccttccaaattcaagcgaaaaggacccagagcctgctatggaattggccaataggcattcattgccaactggggagagaggctcgcctttcatacctgtcatcgaacaattgctaggtgatgttgcacatccacctacacctaccggacatagttcacttgaggctgaagctactgctttagctggccgtgtttcagattatcagctgcctcagtttgctttccgagactgcctaacagtagacaacgcacaaatcccagcattggcctgcagtaattacacatgcagaactagaagtgcacaaaatggttcttcagaagtgccatcagcaaacgtatctgtggacgacacctgcagtttgaacacagcaaactccaatggcagtcagtcgagcaatcctgagggaacgaaggttgctaagagaagagctagagctggggagagtacccgacctagaccaaaagaccgacaactgatacaagatcgcgttaaagaattacgagagattgtccctaatggtgcaaagcgaacaattaagcacatgctgtttctacaaagtgtaaacaaatatgcagagaaaattaagcaagctgatgaaccaaagataatcgacaaagggagcggtgttatcttgaaagacaacccagttgctggcacaaatggtggtgccacgtgggcctacgaggttgctggccaaactatggtttgcccaataatcattgaggatctttcgccacctggtcagatgcttgttgagatgctttgcgaggaacaagggctctttctggagatagctgacaacatacgtggaattggtctgacggtcttgaaaggacggatggagctctgtgatggcaagatatggtcgcggtttcttgtcgaggcaaacagagaggtcacaaggatggatatatttctgtcgcttgttcagttactggaacagaacagccttgttcgatctactgaccagatggccaaggtcatgaataatggggttccatcctttgcaaaccaccaacggtctccgctgctagttccagtgggcattcctgagagactacagtga

SEQ ID NO: 30818 - DNA, 414 bp, Zea mays
  Peptide Sequence Number=SeqID_74193
atggagcatccgaaagaagatcatggagttcgcgccgactatgttgcaaaagggcacacgcaagcggttgagattccgaatgtgggcggcggcagccggtggcggtggcgtcgtggcctgctggtccttggcggccatcacaggctgaggcacgatcgcgtggaaccgcggaccacggagcgaagactacggtcgatgggacagttcagggactcaacgtgtcgcttaggatgtctggatggagcggaggcatgccgcaaacatggtggtacagagctgaacaaccaaggggcaacaaaaagcagagagccatccagacgattaagcggatacgacacaggagacgggacttccggatccaaggtatggcgtaagccatacctggctataccggaagctccgccactgtcgtag

SEQ ID NO: 30819 - DNA, 1263 bp, Zea mays
  Peptide Sequence Number=SeqID_74194
atggcttttcttctctctcctcggctcaccaccccttgcatcaaaagaacaaccatgctgtcccagggtgatgtgttgcagacttgcagtgcagcagcggtactgaaacacacagcacaaccctacaagagcacaagcagcaaaggtgtgttttgtgctgtgagcctagggctggtgaagcccctggaggagatgctgatggcggccagcgcgggggctgcaaatccgagccaaggctcgaatccgaacccgccgccgctggcggcgcccctgacggacgcgggtagcaccgagcggcgcgcgcggccgcagaaggagaaggcgctcaactgcccgcggtgcaactccaccaacaccaaattctgctactacaacaactacagcctccagcagccacgctacttctgcaagacgtgccgccgctactggacggagggcggatccctccgcagcgtccccgtgggcggtggctcccgcaagaacaagcgctcctcgtcctcgtcctcgtcctcgtcctcgtcggcggcggcggcgtccgcctccacctcctcctcggccacgagctcgtccatggccagcacaccgggggcggcgtccaagagtccggagctggcgcacgagggcgcgcacgacgacctcaacctagcgttcccgcaccacggtggcctgcacgccgccgagttcgcggcgttcccgagcctggagagcagcaacgacatgtgcgaccagggtggcgggatgacgagcaatggccggggcggcggcgcggggcccgcggtcggcgcgctctcggcaacggagctgttgcggagctccggctgctacatgccgctgcagatgccaggaggagattacacggcggcagggttcgcgctcggggagttccgcacgccgctgctgccgccaccatcgtcacagagcccgctcgggttctctctggacgcgcacgggccggggtcgtccggtgctgccgcagcggcggggtacggttccagcgcggggctgccgcagggcgtgccgggcaacgcgggcaggttgttgttccctttcgaggacttgaagccgccggttagccctggaggtggtggtgtgggcggaggtggtgcaagtgcaaccggtggcgccggcgacggaaatagcagccacgatcagtttgaccacaacaaggagcgaggcggaggcggcggccgcggtgccggtgccgggcacgacacgccggggttctggagcagcatgatcggcggcagtggcgcttcttggtaa

SEQ ID NO: 30820 - DNA, 273 bp, Zea mays
  Peptide Sequence Number=SeqID_74195
atggcggacctagaggtgggttcaatttggtcagaggaggtcgggagggggctgcccgcggggaggtggcggagcttcgcggcgggggttgccgtcgagaggaagagaaaagagggggagggactcaccggaggggagaacgacgtcggcgcctcgcgaattgtgctcaggggagaggaggagagggatggccggggctggtgcgaggaaggaggggctcgtggcgagccttttataggcgcgcgggggaaggggggcggtggagctccctga

SEQ ID NO: 30821 - DNA, 543 bp, Zea mays
  Peptide Sequence Number=SeqID_74196
atgaggcgcgccaaggagaacaggggcctcctccttcgacaggcagctgctgcggaaggaggtggtgaggagggtcaaggccgcggtggcgggacacctaaagatgtttgctcaacttttgctatgaatttattagtaggatgtcttggatatagatggaaggaaacagtgggcgatgaaagcaaggaatttgggaggtacatgcgacagagagaagagcaagagaagcaggaagtggagttgttcactcgggctcctgtaaccaaacatgataagcagatcgagaagctcataaggagacaacttcatggcacttggtttgcccattgggattttcagcttgtcttaatatccaacgtacaccaccatctgatatctgatcccgacaataggctaggaggcttaactgatggttttggccttgggatgaacatgctgttgggaggagacaaggaagatgatggcggttcaagcaagtcgcatggcaaaagcggaaaccgaaagaagcgcccgaagaacagcaagaagaggatgaggcattag

SEQ ID NO: 30822 - DNA, 276 bp, Zea mays
  Peptide Sequence Number=SeqID_74197
atggggttctggcttgccttatcttccatctccgcaatccctggtgtacaattgcaaccgagtgagagaatatccgagggtgagcgtgtcggcggtgaggggaagctgtgggcgagaatccgtttgatcatcgattcgaccacgtggactaggacaggggaaagcatagggcacggggaagatactcgcgggcgcgggcagagtaatcgagtctcagctgcgcgtggtttcgaggatctgaagaatcaccctggtaactggaatctcaagtgctag

SEQ ID NO: 30823 - DNA, 888 bp, Zea mays
  Peptide Sequence Number=SeqID_74198
atggcgtcgtcgcggccgcccttgcaatcaactccattgcccctgcgattcccttccccgacggcactcatcttccattggtggcagcgcgctgggttctacaatataccttcttctctcagttcctgcccctcgctcgccggccaatcaagtcctgagcgtctgcctccacacaactcccttctcgtcgtccctagagaagacacagaggtgcacggattattgagccagcgaccagattggaacaaaggcaacaagtttttgatggaaccggtcgtattgaaccgcgaaagagccgcagcggaccacctaaaacggatgcctatgatgttcgacgactaccgtgaagaagatttttatgggctaccgcggaaatacagtattgtcgctcgggtagaagttaaattcccgaaggaaccacgtttccatgacagacaacatttcgttttatctgacatcaatggagccaagatcgaggccataacatatatgtatgagacagtcaaacatttcgacaatatgctccatgaaaagcatgtttacaagatgcataatgtaaagttcagtcttcatccgggtgaatttaattttcgtcatctaaatggtcccatggaattgtgtcttgaccaacaaactatcgtggagccttacactgttccaattcaaatggcgccattcccaaaacaaatactcttgaaccttgctgatattgccgagttgccaaacaggactttagtcgagtgcctcgagtcttcggatcataccgcaatacacttcaatccgttccatcacaacacccatcattttggatcaattcaaaaagctttggtggcgcagaacaaccgtcagtttgctgttacatttcttgaagaacaaaggcgtacatag

SEQ ID NO: 30824 - DNA, 294 bp, Zea mays
  Peptide Sequence Number=SeqID_74199
atggctggcctcaaggcgagattagatgagttggagaagcaggagaagtatgcgatagagtgggggcgtgggagcgaaggcgcggaccctaaactgagagcgtccactgcgagtacgtcaatctcattgatagctcttctccattcccttccccttcgactacctcttccctttcaccgcctacggatagccctcaagactagctgctccaagattaggcatgacatagaaaagcaagcaggggaggacaagacaagattgcctactatggtttttggagctgcagaacaatag

SEQ ID NO: 30825 - DNA, 840 bp, Zea mays
  Peptide Sequence Number=SeqID_74200
atggctcaaagaagatcccaaaagaacaagaacacaactcggaaggaggtaactcttgagatattattttccgattgttataactatgattcatggtctactagtgtactaaatgcttttagaactatagatccacgattagaacaaattatagacaagagtatcataccctctgattatgatgcttccgaggaagatcaaagatgtatacgcttaaaccatctagctcttgacatcttaggatcaaaagtaaatttgatgagtccaaacatgatagttcattttgagcttctacttcctttagttcttatgatactaaaccctttaaggaagaagaagaaaatggacgatggagaccaaacgatgaatccacctctccaaaagttgactaaagaacatgaggagctaaagtgctctcatgttgatttggtccaaagcaaatcttcctttgagctagaatttgcaggaacaaacgatgatacatatcaaaagctcaaagaagaaaatgagagtctaaaaatgagcttgacacaactaaaagggaagtgcattgctcaaccttctcaagataaccgtgatcatatggtgaagaagcttgagacgggaacaacagtagcatgcaccaaatcccttgaagcaaatgtcaaggacttgaggattgtcaagagaaaggaacaaaagaagaaaatcaatacatcttccaaaagcctcaaccacgcctccataaaaggtaacatccaagtgttcttctttctttactctttcccatttgcgaggaatctccacaacttggagtctctcgcccttacaatcaggatcaaagtgaaagcactagagtaa

SEQ ID NO: 30826 - DNA, 204 bp, Zea mays
  Peptide Sequence Number=SeqID_74201
atggagaacgcgtacttgcccgatgatgaccttctcacagacgaagtgaagatcaatctccacatgcttggtgcgttggtgaagaaacaagccatcaggacgtcgctcaacgatgatgacaaggaaacggtgaagctgcccaaggggtgttataacgacaactcttgggggcttgtgtacgggcatcacaagcacatggtctag

SEQ ID NO: 30827 - DNA, 315 bp, Zea mays
  Peptide Sequence Number=SeqID_74202
atgtcctgtcatgccaatcgaaactcgtacagatccggccgaggagtcgaaatgagagaaggcagcataacatctgaaggtactgacccagcaactacaataaaactaccaaagccatcaagtgtttttgcagcgactccaagaaaaaggagaatggctagtgtattagacgttgttttggaatccgtgaagatgccagctcccgcttctgtcgaagcttctagcgaacaaactaaggatgtgaaagaagctgttgctctgagcgctgtcattgctcctaccgaagctgggccttcggaaactgggccaatataa

SEQ ID NO: 30828 - DNA, 249 bp, Zea mays
  Peptide Sequence Number=SeqID_74203
atggtgtcccgcaagcttgccaacgtgacgaccgccgtggaccggttgcaccgacaagctccaccgcctagttttgtggccagaccagctccgagcaccagagacaccgaccggtacctcgacgtgaccgccagatactccccatcctcgcccaaccattcgctggaaccctaccaacgccggaaaacaaaagaggatactaacaataggaaccagagaacaatcctattttttaacaagcctaagtga

SEQ ID NO: 30829 - DNA, 138 bp, Zea mays
  Peptide Sequence Number=SeqID_74204
atggggagggtgaggctggcacatggatcccgcctgtcggcgcgttgtgcccatgactacagtatgggccacgtaggggtgggaaaactgggccggctaaattcaattcggcccatgagcagggataagccttcgtga

SEQ ID NO: 30830 - DNA, 633 bp, Zea mays
  Peptide Sequence Number=SeqID_74205
atggacatgctggagattcgtcccccacaacaagatccagccccagttgctagtgcagtagtgttctctcctgcggaggacgatgacgacgatgacagagatgttgatgcatcgctgcgacgatgccttgcacataatcgacaaggaatactaccaagagcttcagaaagaaaaagaattgcagggtcaccaacagcggaggagcagcaccttcgttccacgacagccaacgacaccaaccaaggcatcatcttctttgggcgtacgaacatccacaccttcctccaccagcagcacgcgcagcaccgcaccttcggcatcacaaggacacgacaacagtacgtccttggtgccttcgggcgcaagaacttgggcagaataacacagccatgtgttcgacgcgccctggcaacgccagagcacgccccggcgctcggccccgcgcgcaccgcgccgcgccaagccaaacccgtgcccacgcccgcgcccgcgcctataaagccaatcgaggcttcgaccgtacacccccactcgctctcaacctcgctagagcgcaagttcaacggcgatcgctctgtgcacggcgtgcaagcggccgcccgagagccgaccaccgtagaccggccaccctag

SEQ ID NO: 30831 - DNA, 399 bp, Zea mays
  Peptide Sequence Number=SeqID_74206
atggccgccgtatctgttcctctattcaagctcgcctcagcactgtgcatcgcgaccctgctcacatctctagacgcgccaaaacatcagagctatagccatggctccccggtgctcggactcggccgcgcccttacaccctccctcgccggtgacgcctgccgcgaagcgccccttccttctcccccatcctcgtcgtggtcagcagcttcaaatccatgggcgccccaacctctacctctcatgcggcttccaggagctgggctcctcgtcggctcgacagcgccctccctctgcgcactcgaccggcaacttatcgcggtcctagacctccctgagcttgcatctggtggtcgcgcctccttgcacctagagcctccgtgggctcctgctcgccag

SEQ ID NO: 30832 - DNA, 324 bp, Zea mays
  Peptide Sequence Number=SeqID_74207
atggggaagcttggcccatcactcctcatcctccccctctaccgagcgaccacacttgtacccaacatattcagaatgggagaccacgtctcaggtagcgtgaggggtaaagtctgcgggcaggttcactcaggtactaggcttaccgatttaccaaatttctcgttatgcatagaaccggggcttgccttccaaagctggggcagaaagatcctcgatggcaggctctggtgctggctcctgggctacctcttgagcaactccttgctccggaacgaggatgtactccccgtcagcgagattacagtctatcgaatgcaatga

SEQ ID NO: 30833 - DNA, 669 bp, Zea mays
  Peptide Sequence Number=SeqID_74208
atgtcgatctactttgctagttgcttctccctaggcccacgaaataatgacctcacgatttattgggcccttgggcctttcgtggggtcttttactcttttagtggacccgggggatatctatcccccacaagcccccgatctttgggttaatttagaggctgaagccttgtttcgtgctcgtgccttagaggtcggcattttgatttgtaggattctgaacttcattgggtgcaccggagaaatcggcatgaagctattcgcattatgctttggaggtattcactgcgtgccctgcacagatgtgaccgttttgaaaaatatactgataattcctgggcgtcccccccgatgggtgtgggcaagggacggcttggggattgccgcggaggtctggacgtacatccgggccgtcgagcgctccgggctcgagggctcggatgagtctgagttctcctcggatgaggaggactcggacggcggcggcgaggacgaggacgacgacgacgacggcggcgacgacggtgacggtgacggcgacggcagcggcaggggcgacaacggcggcggcaggggcggcgacggcggcagcaggagcggcagcggcggcagcagcaggggcagcggcggcggtggcagcagcaagggcagcaacaaggccagtggctaa

SEQ ID NO: 30834 - DNA, 1116 bp, Zea mays
  Peptide Sequence Number=SeqID_74209
atgaccgcccaccagcccagcgcgcgcatcctcgccatcctcgacaggctgctcctgctctcgcgggggcgcaccgtgtacgccggcacgcccgcggggctcaagcccttcttcgccgacttcggcgcgcccatcccggacaacgagaacccggccgagttcgcgctcgacaccatccgcgagtacgagcgctgccccgacggcgccgccccgctcgccgacttcaacgtcaagtggcagaacggcagcagttccacttccacctttgacaacaacaacgacgacgacaacgatagcagcagcaagctcatgccgctggagctcgccatcgccgagagcgtgtcccgcgggaagctggtggccgggagcgcggtcaccgcgtcgtcggtgccaacgttcgccaacccgccgtggaccgaggagcgccacatctacctccgcgagaccgcgcacaacgcctaccgccgcatctcctacgtgctggccaacgccgtggtcgcgttcccgccgctggtgttcctgtcgctggcgttcgcggtcaccacgttctgggcggtggggctcgcgggcggcgccccctcgttcctcttcttcgtgctcatcatcctcgcctccttctgggcgggcagcggcttcgtcaccttcctctccgctgtggtgccgcacgtcatgctgggctacacggtggtcgtcgccatcctcgcctacttcctcctcttctcgggcttcttcatcaaccgcgacaggatcccggactactggatctggttccactacctgtcgctggtcaagtacccgtaccaggcggtgctgcagaacgagttcagggacgcctcgcgctgcttctcgcgcggcgtcgagatgttcgagggcacgcccatagggcacatgacggagcccgtcaagctcaaggtgctgcaggccatcagcaggacgctggggtccaacatgacggccacaacctgcgtcaccaccggcgccgacgtgctggcgcagcaggccgtcacggacattggcaaatggaaatgcctgctggttactgtggcctgggggttcttcttcagggcactcttctacgtcgtcttgctcgttggcagcaagaataagaggaagtaa

SEQ ID NO: 30835 - DNA, 444 bp, Zea mays
  Peptide Sequence Number=SeqID_74210
atgtcgttctcttcctcgtcgtcgtccgttgcaagcgtgtcgccgaccacaccatcgtctgagaagacgattagcgattctgcggcgtttgggttctgcacctttacgccgaggactggaaatacctcggctgaagttatcgagattgttccatgtgcgaaaaataagtggggtaactggtgggagttctggttttatgtggcgccaggcgacgtcgaagggttgcccagtttgccccctgctatcttgtgctcgcattgttatgtggtgtttccacagtttaaggtggcaaagggggatcaagacaaggaggcccttcgctacgcagcctatctgagcagtggatgtgacttcgtggaagagtttatcgcttccggagtgtggcctttggcgcatgggtgggctttgggcgagattatacctcaccagatgccaaccatgtga

SEQ ID NO: 30836 - DNA, 252 bp, Zea mays
  Peptide Sequence Number=SeqID_74211
atggggcggcgaaagaggcaggatggaggggagagcaagggcggcggtcacggcgccgagtcggggggcgggggcatggcgcaccctgtggccgagggcgagggcagggggcgcggtttggtgtggggcaagatacccggcggcgagagcttcgagcgtgaagggagtcggtttggaacagtagagctcggagggacgtggagagtagaaaaagagaagaagcggttgaggtttaagaagcacgagatatag

SEQ ID NO: 30837 - DNA, 252 bp, Zea mays
  Peptide Sequence Number=SeqID_74212
atgtctgataatgacatttctatctgtagtcaaatgtcgcaaagtttgagggtcatgtcggaccagtcactgctatgtctttctctgaaaaatggttacttcctagcgactgctgctcatgatggtgttaagctttgggatcttcgtaaattaagaaattttaggactttctcttcctatgatttggacacgccaaccaatactgtggaatttgattttagtggaaactatcttgccattggtctgatatga

SEQ ID NO: 30838 - DNA, 888 bp, Zea mays
  Peptide Sequence Number=SeqID_74213
atggaagaatccaggggcatcttgagggagatgtttcagtgcaaagaagtcacggagttaataaacagtgttggagataagattcaggcagagtcccttgttgatctcctatcttctgcatgtgatcaggggaggattgatgagattctcttgtttgaagacctaaatgttaataatggtgtgtctgtctgtctactgcttgtgtatgtctgctactcatgttggatctcttgtttcatattttgggatgtggagataatcttcgtgtcgctggaccgcgacgaggccagcttccgggaccacttccagggcatgccgtggctcgcggtaccgttcgacgctgctggcctactacggcagaagctgtgcgcgcgcttcgccatcgagcgtatccctgcactgatccctctgtcagcgtcagtgacgtcgtccagcgggctgggatgtggagaggactcggtgaggctggttggcgagtatggagtagatgcgtacccgttcagtgcgcagaggagggagctggagagcatggacgatgccaggagagaaggaggccggcttcaggagcttcttggctgcgaggagagagactttgtcatcagtgcagatgacataaagatccctatagctgaccttactggcaagacagtcggcctgtactttggagcacactggtgcccaccttgccatgtcttcaccaaacagctcaaggaggtgtataacgagctgaaaatcttgagaccgggaagcttcgaggtcatcttcgtttcgatagaccgcagcaagggggaattccaagcaagcatgagttcaatgccatggcttgccatcccttattctgacgctgcaaggaaaaggcttataatcaaagagactaattttgattga

SEQ ID NO: 30839 - DNA, 507 bp, Zea mays
  Peptide Sequence Number=SeqID_74214
atggccatgggggccctccaagttgcaatttctgctgccctctttgttgatactctcttgctcacggttcgctatgacatatgcactgtcatgagattgtacaagattggccactcgtactcgttcccgcgatttagaacatctgtttggcagatatggaaggagttcagtgatcatcgcgatgctgatgaggctcgataccagctagatggcagggatgttgatgggagtcgtattgttgttgagtttgctaaaggggtcccacgtggttcaggtggctcacgtgaatatatggggagaggccctccaccaggtacaggtcgttgtttcaactgtggagttgatggtcactgggcaagagactgtaaagctggtgactggaaaaacaaatgctaccgttgtggagaaaggggccatatagaaagaaattgccagaacagtcctaggagtctcagcctatctttaacggtattacttgctcttgatgaatatgtgacgaatctctag

SEQ ID NO: 30840 - DNA, 648 bp, Zea mays
  Peptide Sequence Number=SeqID_74215
atggcgcggcttgatggctaccggccccggcctgccgcgaggttggaacttggaagactagcgaacggcgatttggcgaaggcgacggccgacgagcgtaagtgtctacgtgtgctagaagagcagttgccagtggagggtctggaggtccaggaggacttgacctacattgagaagccagcgcagattcttgagactgcagacagagttttggagacggtgatcgccggatttggaccccgaggtgagctcccctcccctctccctctctctcttcccctccccctccccttccttttcccctacgcgtgtcccctgcgcgcccgcggccccgcggcctcacgcatctgcgccctagcggcggctcaccccgcgcccctctccgccccagcggcctcgcctgtggcccccgcgcccctccccgccccggcggcctcgcctgcgaccctcgcgccccggtggcccggtgtccccgcgcccgtgcccctgcgcgtccacgccctgtggcggctcgttcccacgccccgcgccccacgccccggcggccctcgcaccctgcgcgcctgcgcgccccgcgaccccgcgctcgcgtgcccccggcacgcgcagcgtgttcgcgcgcgcgtgactgtgttgcgcggcgtttaa

SEQ ID NO: 30841 - DNA, 546 bp, Zea mays
  Peptide Sequence Number=SeqID_74216
atggcttgttacctagaggccattgatcttggtgttcagagagtcactcgtgatgggatgaaaccacctaaaaatcctaagaagctcaccacaaaaaatgagcttgttagagacatgtattctcgtttaaatctaatcatcaatgagctcaattcttttggcattaataagctaggtgatgcggacattgtgaggaagattatctccctactaccacaacaaaaatatgagagcatcatcactattcttcacaacatggaggacttgagtcaaatgaccccgaccattgtgattggaaaaattgcaacatttgagatgtcgcgaaaaatgggtcgacaagaggagccaacttcttcaagaccatatgcttttgcatgtgatgaaaagaacaatggaaagaagaaggctcccactccaagctcctcaagtgaagaagaggaggaagaagaaagtgatgatgatgaagataatcaaaccatcaacatcatcctccaaggacggagaaacaatccgacgcgttggaaaggtcaaggatcttctctttaa

SEQ ID NO: 30842 - DNA, 891 bp, Zea mays
  Peptide Sequence Number=SeqID_74217
atggcaaagaaaggccaatatgtgaaaagtcaagaaactggcactgctctagaccgagccagtgctgaacagctgaagatgtcatcccccatccttcctcttccaaaacttcatacacaggaaaataaaaagaaaaaatactatttagaagcaaggttaggtttggttgacatgaacaaacctcctgaaatgatatctggcaatatgaaggtagggtcagcaaactcgtttgaaagaaaagacctggaaagggaactcttggccaagcttttggtgtacttgtgcacagctcaagagcacttgctgagccagaggcagctactccaggggttccaacatgttctatctaccttggaggatgtcgtgaccgatgcgccgaaagcgaccaagttcctgggccaaatatttgctagagtcgtactggaagacgggatctcgctgacggagggaggagggctcctgcaggagtgggatggcagggaagagccagcaggacagcatgccctggaggacagcctcgcatccgaggatctggggagcatgctggagtccatcagagtggagagggccaaatattcactgatgtgctttcagttccctgttggacgtatccaccgtcagttgaagcagatgactcaggcaaatggtcgtgttggtgccaccgcatccgtctacttagctgccatcctggagtacttgactgccgaggttctggagctggctgggaatgctagcaaggatctgaaggtgaagcgtatcacccctcgccatttgcatctagccatttgtggagacgaggagctggacaccctcatcaagggcaccatcgcaggcggaggtgtcataccgcacattcacaagtccctgatcaacaagtcatccaaggagtga

SEQ ID NO: 30843 - DNA, 624 bp, Zea mays
  Peptide Sequence Number=SeqID_74218
atgatgagccccgacatgtgggcccaggggcaaaacggaaggaagctccgcccgctggctcacgtcacgggtagtaggccacgtggcagcatcgggtctccgcctgagtggggagctgaagcgtacacggtatggtccggacacgtgtcggctctggacccctgcctggccttggttaaggcctgggtattctttgtcccagaatcccaggaccctactgtgagtggcccggaccccacacagaggggtccggaacccatcctaggggtccggtttgcgcccgtggaggtcccggacctctcccggaggtccggtctgcatatacaggggtccgacactctcccatgggggtccggactcactgttgataccttagagtatatcatcttctctagccatgtggtggccctggagttgtccacgtggtggggtcgggtgatgtttaccacgcgactagatatagtcgcgtgggcaccgcgtcttcatactgtagtaaggggtacccctgtttcagggtaccgacagtggtccccgggcccaccttgggggaggatacgagcctacaggtggggccaaagcttgattggcgattggcgcgccgctttcgtgcgcttgctgacgtaa

SEQ ID NO: 30844 - DNA, 531 bp, Zea mays
  Peptide Sequence Number=SeqID_74219
atgggtgccaagcaaggctgccgcgacgacggtctatacctgaattattccgagtccctgttggggagctggagatgtcagggaaatctgatgcccacacggctagctctcgcgggggcgtcgccgcctgcattgttggctgccgcgttcttgcttgctcccgttctcgggctacctccggtcctgacagggcctcgcaaaccaaccaatgcaacattttttcgcagtgacaagggcaggggtggtggtgctgtcagtaatgtagaaagacacctagctgcaggcaacaaaaaaaaactggtgggagaaagggagacgggtactctacaacttcttgcgcctctactgctgacgggagcgaagggagcggatctggtgatccgtggtaacgtagttctcaacacgttatcagcacgctctacctcgacgttactgtgggatcagatctgcgtcaactcatcgtcaagtcggcaggtccctggcctagccgaactgtcctacgcgacaggcttcgatttttgctctacgtaa

SEQ ID NO: 30845 - DNA, 399 bp, Zea mays
  Peptide Sequence Number=SeqID_74220
atggaagcggggcgaccgctgcttttgctgttgctgctgttgttgttgctgctgctggtgcccctgggggagatcgcccccgggtggtggtggcggcggcgaacccgacggtggtggtggttgtggtggcggtggacccgatggttgtggtggcgggggactgacgcgcctctgcgtgccctgggcctgggagccggtctcctcggccccaccagcagtcctctgacgcttctgggagccggcctcctcggccccaatgggggggtccgaaacaaacgatccgtcggcgcggcgcagccgacgtctcctctcttcctccgacaccccggcgccgcctggggcgaaggagctgcttgtagcccctttgcccttttccaaggggcagggggccacgactag

SEQ ID NO: 30846 - DNA, 633 bp, Zea mays
  Peptide Sequence Number=SeqID_74221
atggttcagatcgtcgagcaccatgatttcatgcccgaggacttcccggtggaggaagaggctgcatcttccacacctcgagccaccaaccaccttgcgcctggtgttgttgttgtgcactctgcgcgacagcacacccctgcgcaaacatccagggcgtcaagggctgcgcctggggcgctgtctgcggtcagggaattgctgcgccaccctcctagctccacggcctcgccaggggccatgaagcaatggcgtgacgacgtcgaccgactgctcggtatggcgcattctggctcagccaggcctaggcctcggtcatcccggcgtcaacatgaggcatcggcatcagtgcgctcaccctcggtgagggccgcaccgattgaggacctacgcgcggagctcaaccgcaggcgtgcgggagaggacgccccagtttctctagaaaggtctaatgatctgcgggcagaactcaactgcaggcgtgcgggcgaggatgcccgcgtctctctggaaagggcgcgcgagcgccgaaagaacgtcgagggttgcaacctcgactacgacttcgtcgtggtcgcatcgcagactccaacggggcccggatctaggcgggtgtcccactggtcagcgtag

SEQ ID NO: 30847 - DNA, 1482 bp, Zea mays
  Peptide Sequence Number=SeqID_74222
atggcctcagggcaaacgctactgctgaaaggccctcgttcacgtcccctcacgggggacgagaaccagccattaaagccaaagagccggaggtccggagcgcaggtggcactaatggtgtcgtcggcggaagcaaccaccgctgcggtgggaagcctcaccagcggtggccaccacttcagcaccggcgacagcagccacctgcgcacggcacgaccgtcgtctgggtggaggatggacagctacaccctgaccaggcagcggcagttcgccttcccccgcatagctggagaacgtctcctccgcaaggctggaggatgcccttctcccccgaatgttggaggaagaagcgggtcaccggcccacacgggaggcaagacccaactcggcgcgccctcctccccagcccggatgatgaacatcattgaagctgagggcaggggggaggccacgacccggctcgctcttccccaccatgaggcctatgaaccagtgccgcgattcgaggcagccctgcgcgtgacccaacagtgccaattaagtgcaacgatcatgggtcagtcagccgcgaggataggcgcgatggttgatatggccaaaagtggaccggcaggcaagcgacacctccagcaggagaagcgggcgccgtttcacctccgtcatgatgaccgcgtcaaaaaagggaccggcaaaggggatattccgaaaaggatccttctcagcgaaggaaacgggccccgagccctcctactgatcaggggttcgaaggttgcgccctccggggttcggcaaccgccccagagcactcgggctccgagcccactactgatcaggggttcgaaggctggcccctcggaagggttcgacagccaccccagagcatgcagagtcagggatgaccctgggtacgtccgttacatggtcgaggctcaggctacgctctcgcggtaccctaggacatttccgagaccagcgggaacgatttgtaacggaatcccaccggagggaggcatcgagccctcggaccctatcgaatgggttcgggtctggcaaatcacctgtagggaccaggaaaggggatattccaaaaaggatccttctcagcaaagggatgaccctgggtacgtctgttacatggccaaggctcgggctacgctcccgaggtaccctaggacatttccgagaccagcaggaacgatttgtaacggaatcccaccggagggaggcatcgagccctcggaccctatcgaatgggtccagacaggaaaacagcactgttcgccccgctccggctactgtgccaaccaccagggagaaggtctccgcctcgtccgaccccaggcctcggcctcagcctcggcctcgggaggagtcacatcctcgcccgacctcggcctcggcctcaggagaagtctccgcctcgcccgacctcagcctcagaccgactacgctataggggatacatcattaccctactcctag

SEQ ID NO: 30848 - DNA, 138 bp, Zea mays
  Peptide Sequence Number=SeqID_74223
atggcggagaagctgttagttccccccaagcgcacggataagagggtggggtctgcgatcagggcctgcatgtcagcggtactcatcgcgcgcacacgcatggcagatgagatgaatggagacatcacacacatatag

SEQ ID NO: 30849 - DNA, 825 bp, Zea mays
  Peptide Sequence Number=SeqID_74224
atgggtggaagaacacctccacgtgttcgacgcgccagagcacgcccagcgcccgaccccacacgccccgcgccgcgccatgccacccccgtgtcccctgcccgcgctcgcgcctataaggtcagcaaaggcttcagctgtactccccctcgcactctcgacctcaccggagcaagagatcgccggagccagccctgcagacgacgtgccagcggccgcccgagcacccgccaccgtagaccggccagcagagccatccccaaccccgtccaactcttggaagagactctacgtgcctcggtgaagctcccagagcgaggaatcgagctctgcctcgccggagacgccagatcaaggttactggacttcacccgaccgctggcgaacgtagaccgagctccacgcagactttacccctcacgcgacctgattgaacctggcagcagactttacccctcacgcgacctgagacgtggtctcccattccggttatggtgggtacaagtgcggtcactgcacgacggcagtcgaggacaaggcgtccactacgatgttgaggcgccccggacggtacacgacgtcgaagtcgtagccaaagagcttgctgatccactagtgctgcggcatggtcgacaggcgctggtccagcaagaacttcaagctataatggtcagtacgaatattaaaatgacgcccccacaagtaagggcgccaatggcgcactgcctgcaccagccgaatcagctcgcgctcatatgccgccaacttgaggtggcgagcggctcatatgctgaagaaagcgagaggctcggcgccctggtgtag

SEQ ID NO: 30850 - DNA, 354 bp, Zea mays
  Peptide Sequence Number=SeqID_74225
atgtctagccccaaccctccaccttctctccaccacccgcagccaccaccatctccagggctgtcccagccgtcgggtgcccagccacaggcgctggcatcccaggggacgagcgccctcatgctcggcgaccacacggcggccacgctggcgcccactgcgccgccgggcgacgccctgaccggctcttcctgcctccaggcgttcacgcagcatgaaatgacggtggccatcctggagctgggccaagaggtggcggggatccgcgccttcctggcggggccctacacgccgccaccgccgcaaccacccgcgtcggcgacctcgtaccattacgggatgccatcggactag

SEQ ID NO: 30851 - DNA, 306 bp, Zea mays
  Peptide Sequence Number=SeqID_74226
atgggtcggcgcgagacggagcacgaaggggggagaaacagcaaaggggaatcccgcggcctccgtgttgtcctgcgcccaggtcggcccaaggtcacgcgaggcagaggctcctccgaggtcgaggctgagtccgagccctggggtcgggcgaggcggagtccgtcttccgaggtagtggctgagtccgagccctggggtcgggcgaggcggagtccgtcttctgaggtcgaggctgagtccgagccctggggtcgggcgaggcggagtccgtcttctgagatcgaggctgagtccgagccctag

SEQ ID NO: 30852 - DNA, 555 bp, Zea mays
  Peptide Sequence Number=SeqID_74227
atggcgcccgaggctggacttggctgctatcagcctcactatgtcgagtggcacagcagtcagagcggggcaggcggcgttgtttccctgtcagttcgttggcgtggcgatctggccaaggttgcttctccacgaagactgggcctcgggcgagccgaagaaccatctcctccgcggaacccgcgcgtgtaccagaacgccgacttggccgcgcacgaccgcgttcgggccgagaactccggaacagttgaacttatatctacgacttccttcctggagttgtcacttaccgttttctcatgccccaacctctattctcgccgccgctgtgaggttagggtcgaaccaatggagagagaatacccgcctgcgtcatccactgttgaggaaactcgggattccggtggtggcccaggagcttcgcgggaccacgcggaacgtgtacaactcatcctcgggggcgattggcgactggtgctagaggaattgctcaccgtcgacctcgggcacccgcggattcgtctgacgccgtgggcggagctatggagtcattaa

SEQ ID NO: 30853 - DNA, 360 bp, Zea mays
  Peptide Sequence Number=SeqID_74228
atgggtcggcgcgagacggagcacgaaggggggagaaatagcaaaggggaatcccgcggcctccgtgttgtcctgcacccaggtcggcccgaggtcgagcgaggcggaggctcctccgaggtcgaggctgagtccgagccctggggtcgggcgaggcggagtccgtcttccgaggtcgaggctgagtccgagccctggggtcgggcgaggcggagtccgtcttccgaggtcgaggctgagtccgagccctggggtcgggcgaggcggagtccgccgtccggcgtcgaggctgagtccgagccctggggtcgggcgaggtggagtccgcggtccggcgtcgaggttgagcccgagccctag

SEQ ID NO: 30854 - DNA, 282 bp, Zea mays
  Peptide Sequence Number=SeqID_74229
atggcgatgactcgatccacggtacagggtgtcacggacggcattggagatcccagtgaagagttcccgggggttgcagagatcaatcccgaacgcgacacgatggaggacaccgacagcaaaatcggagttcagttgtggcgcggcgcgattttaccggaggtcggggatgacatccgggccctacgcgtaagtgacggagcagtgaggagcgcgcgcgcggtgaacaagcgccgaggccacccgtgcaggcgtgcatactgggacgaaatcctcttctga

SEQ ID NO: 30855 - DNA, 438 bp, Zea mays
  Peptide Sequence Number=SeqID_74230
atgctgctgtatagcatgtggttcaggggaagtgttatacaacctattgtggttgttcgaggaaatgagatggttgtccgtgctcggcttcaggcgctgtcggcgtttcgagacaggggggtccctaagccgacgatcggagtggcgcaggcggcgctgtccttctgtcagactggccagtggagcggtggagtgacggcggtcacctcggctctgccgggggcgcgtgtcaggatagaggtgtccggccacctttgcgttaaatgcccctgcaatttggtcagtcggtgtggtgatttagtcaaggttgcttctgagcgaagccaaggccttgggcgagccggtgatgtgtccgccataaaaagggggcctcgggcgagacggaagtctctcgaggtcggctgccttcggccgaggctaggctcgggtgaagcctga

SEQ ID NO: 30856 - DNA, 279 bp, Zea mays
  Peptide Sequence Number=SeqID_74231
atggagatcccggtgaagagttcccggggggttgcagagatcaatcccgaacgcgacacgacggaggtctttcccccagacctagtggaggccgcgaaaacctcacgaggcgtggacgatggtttaacagagaattccactgtggcggcagcggtatttttccctccctgcgcaacagcgcaatcctttcttggtggcggcggaaagaggagaaggcatagggaagagagagaggggtctcgggtccgctttttgaagccgattttcctttctatttga

SEQ ID NO: 30857 - DNA, 396 bp, Zea mays
  Peptide Sequence Number=SeqID_74232
atggccatcactttccagcacaagatgaagagggaactctacatcgaatcgcggatccaccggacagaaaaccttcctcaacaatctctgggaaagtcggagcgaagcaggaaaaagcgcgacctccagcgctccgagcgaagactacctcctgcaagccaggagcagaggatcctctactcggagaaccccgctgtccacctcctctatggaaaaatggacacggatcacaaggaaaaaggaagcaaacggggtgaaggctcgtcaagctgctcttctggtacctctgccctcaaaggagaacagaaagaagcttgtcactgtgacggttccattctaccccgacgtcctcttcatcgggggaagagtggaatcgaccctcgtctccgacgatga

SEQ ID NO: 30858 - DNA, 420 bp, Zea mays
  Peptide Sequence Number=SeqID_74233
atgcgcccccaggcgccgcaggccgagtcttctccaacacgctccaaggccctcccctgcgactcgggggatgggccccgcatgtcatgcaagccggctcagggcagaagaagccaaaccgccgcgcatgggaccgggaaagggggataccccgaaagggatccttctccgcgaaggaaccgggctccgagccccccattactgatcaggggttcgaaggctggccccccgggggttcaacagtcgcctcagatcgcgtgggcccgacacccactactggtcaggggttcgaaggccagccccccgaagggctccatggccgcctcaggctactcgggctccgcgcccattactgatcaggggttcgaaggctggcccccgaagggttcacagtcgcctcagacaccgagcgagggatga

SEQ ID NO: 30859 - DNA, 1887 bp, Zea mays
  Peptide Sequence Number=SeqID_74234
atgccatcttcttcttcttccgccaacgccacgccgccggccgccgcctcgtctgaggagacgttgagtagcgtgatggtggaggagttgcgcgccggtgactctgttgaatttggagtgtcacggatgacgtctgcccgcattgaagatatgcagcggttgggctattttggcggcggagtcgctcgtgctccggggacggaggaagtccccgagccggagggcgagttggttgttttcgaggcgttcttcgtcgccggactccgcttgcctgcgcaccgggtcttcgaattaaatcaactgccgtacgacggctaccctggtcaagacgaagcggaccgccgtgggaagaaaccggcggtggagactggaggcgaccctgcgctggtggccgccgcctcctcgaaaaagaggaaattagtgatggacaaggatcgccaaggtgcggcgcgaaaacgccaggcgaccgtgagggttcacgaagctcggccgaaaaggcagcggggaacggcgaaggctgaggcctccggcggaggcaagccgccgctgccggcgaaggtgggcgccggaggccccaagctgtcgaaggtggtgccgtccgtcagcggagtggcggaggctgcgaaggcggcccgatcgttaccgccgcctggcaaacgcgttgccgacttcggcaccgagattaatgtggaggattatcttggggggtcggacgagggcccgcttgctctagttgtgcctggcgcggcgatcgcgacggctgcgccggcgccgaaggcggggggagagacccttggcgctggaggcgaggtgtctgccctcgcgctggtcagagacgaggcgggcgtggcgacccgccggctgaagggagcgacggaggcgctgagtcgcgcgacggaggcgctgagtcaggtggctgacttcaccagccgcactgcgtcgggggcccttacggtagcgttgtctgccgaggtcgagagacttcggacacaacatgcggacgctgtccgtgagaagtcggcctccgacagcaagtgccgcaaactggcggagaaggtggccgcccttgagaaggagaaggctgacctccggcgccagctggcgggggagaggagggaggccaacgaagccatcgccaaagagcaggctgcgcaggcggaggccaggctggcgcgggcggaaggcaatatcgccaaggagctcgccggagagctgcagcggcggcttactgccctggagagccgcgcggagggggccgaggccgcgatgcgagcggaggtcgaacggacgcgcacgcagctcatgacttcatatcgcgagctgggtgtgcggacgggtgacttcgaggtgccggagcgagaggccgggcttcgctgtcttgaatgggtgcaggaggaactgcaggagctccccactgtcttggcggggttgatgtcgttcacctccctggtcacctgcgaggcagcgatgaacgcgctctctcgcgaaggctgccggcactttgaggccctcgaccaggtggatgaggattttgggcgagatatctttgaggtcgaagaccccgtggtgaaggaatccgccggggccctctatgaccggatgtggggttcatacggtcgtgaggtggtccgggcgcgggccgaggctgcgagggctcaggcggagcgcggcgagcgggtggacgacttcggggcgctgaacagcgtgctgcctgagccggagacgacccctgcggaggccgcgactggagtcgccccgggaccgaccccggagactgtggaagatgcaccaggcgcccctgcatctgctgcggccggcgaagaccttcccccaaaggtggccgaaggcgcgcctgatgccccccgcagctgctgtgccgagcgctga

SEQ ID NO: 30860 - DNA, 354 bp, Zea mays
  Peptide Sequence Number=SeqID_74235
atggcgccccgcatgctccctgacgattgcggctctcagcccccttatggaagcaagaggacgtcagcaaggactcgaccgccccgacagctgtccttccgccaggctccagcgctcctccgacggccacgacatcacacgaaccgggtgccaaaacctctccggctgccacgacggcatgccttcgtcaaagagccgagtcctgcgaaggctgtccctgcccgctttgtctctgtcggaacagcggctgcagcgaaggcctcgagcgaagggtggcgtctatgccttcgccccaacatttgccctccgagggaccagttcgacaaagtcacctggtgccgaagacgtcgctag

SEQ ID NO: 30861 - DNA, 163 bp, Zea mays
  Peptide Sequence Number=SeqID_74236
atggacctcgtgtttgccccaacaggatccgagcctccacccgtgcaggtgaatggtggcgccaccgaagatgaagattcaccaccgcgacatgagaccgatggcgggatcctcaacctctacctcgatagaacactcaaagaggaggccacggagaaggcgg

SEQ ID NO: 30862 - DNA, 141 bp, Zea mays
  Peptide Sequence Number=SeqID_74237
atggcgaattattttaaggaggaggccaagaaagagttcaaagatgaccactccatagatgcaaataattccagcagctcaaacgccggcttccaccgagggtacgaccatcccaagctctgtcgcgtcaacgggaaataa

SEQ ID NO: 30863 - DNA, 600 bp, Zea mays
  Peptide Sequence Number=SeqID_74238
atggctcaccagaatttctccgacccgctcgaggctttctcaccgtcgttctcccctcactgcccgtggagtcatggcctcttccccgccattgagttcgtcgtggcgccctcttcccctctacccaattccagcgaccccggagccactctagctcgcgccagcctcaactccggcgatctaaccgccgcggagatgaacaacgccgcccgcagcctgtcagtaaattccgcctcgcccgaccttgggcctcgacctcaggaggaggtctccaccttgcccgaccccagggctcggtctcaacctcggcctcggaaggaggactccgccttgcccgaccccaaggctcggcctcaacctcggcctcggaaggtggtctccgcctcgcctgacccagggctcggcctctacctcgacctcgggaagaatcgtgtcctcgttcgaccccggcctcagcctcaggaggagtctccgcctcgcccgatcttgggctcggaccgaccgcacaatgggggatacatcattaccctacccctagctagatcgggctatttggaacaagaccgacgtcccatctggcttgccctagtaaacgagtaa

SEQ ID NO: 30864 - DNA, 822 bp, Zea mays
  Peptide Sequence Number=SeqID_74239
atgtatcgcacccttcctccttccgcacccccggatggggagcacccgcgtcgccttcgtcttgctgttgttggaggggcacgaccttgcgggggttggcaccctttagccatcgctcggcttcaaggattttcatcatgcagtccggctgcattccctcaccaatggtcacctaggacggtgaccaccagttcgatggtggggagaagcaagccgggctgcggcctctgccccgccctcagcttcaaggatcttcatcatccttgctggggaggagggcagggtgagccggggttctacctcccgcatgggccagcgatccgcttctccctccggcatccgggggaggaagccatcctccagctctacggaggaggcgtcctccagccatgcgggggaaggcgaactgctgctgtctggccagggtgcagcattccgtcctccatccgggggactgtggccggctgtaccagggggtcgcacaacacgtcgtacgccgcgagggtggtggccgctgtcgtcggtgctgaggtggtggcagccggagagggtttctccgccgacgacatcgtcagtgccacctgcgctctgggcctccggctctttggctttaatggctggttctcgtcccccgtgaggggcaaggtgacgagtgagaaccttcggctgctctgcgatgagctagagccggaggcagcggtgtcggcgtggacagaggcggagtcggctcgagaagaggcttcgtcggcccgggagcaggtggcttcccaggccgaggaggtgcagcagcggcggctgaagcttggccaggtcgtccgctag

SEQ ID NO: 30865 - DNA, 735 bp, Zea mays
  Peptide Sequence Number=SeqID_74240
atgcaggtggcgtgcgaccgcaccacagtggtgcaccccttcggctttgtcgcatccagcatggaggcccatgcccacacgtcatggaccgggaaagggaatatttcgaaagggatccttctccgcgaaggaagcaggccccgagccctcctactgatcagggagactgatgagcacgattcaggtcaaggcttcgtctactcaagggacgcgatctcgcctcgcccgagcccagcctcgggcggaaacagaagtcccagacgaattcacgcctcgcccgagggcctcctcaagcaacgggcgcaccctcgactcgctcgaagcccagctcgggcaggcttcgcagtgaagcaaccttggccagatcacctcaccagccgaccgtatcgcaggcgcattcaatgcgaggatcgcctgacaccttatcctgacacacgtgcctcaatcggcaaggtcgaagaggaggtctccacctcgcccgaccccagggctcggcctcaacctcggcctcggaaggaggactccgccttgcccgacccagggctcggcctcaacctcggtctcggaaggtggtctccgcctcgtccgacccagggctcggcctctacctcgacctcgggaagaatcgcgtccttgcttgaccccggcctcggccccaggaggagtctccgcctcgcccgatcttgggctcgaaccgaccgcaccatgggggatacatcattatcctacccctag

SEQ ID NO: 30866 - DNA, 1710 bp, Zea mays
  Peptide Sequence Number=SeqID_74241
atgaagcttgaacctagcgcccatgaagagctccatgatgaacatactattcttgatgcacctacccttggcgtagtcaagctaccgagagggtgctactgggccaactcctccgaccgcccgcaggcgaaggagctctccgccttcccgccctcgtgtcatccttcccatcgcgacccgcgaggccacgagcccacgagctccagctcttgttattcggaagggttctggatttgggagccaagcgactggcgcagcggcagagcccggcggacacgctcccccctgtcgcccattctcttcctccccgagcggcacccccgcgtgttgccgcttgtagcatcggggagaaaaatacagaggaaggacatgagggatccatttgatgcaccggttgatctcattaatgtggaccataatggtggctatcaactatccaggactggtgcggtttctgctggggaccatggtttacaaaatggtggacccaaatcccttgctccaaactccgacactgtagtcaggcatcaactccagggtgcatccttgcacaaagacttagctcttgaagatcctaatactcgtatcatggatcccgagaccaaggaactttactttagatcacaatcacaagaggacgagatcttgttgcttcgcaagaaaattgctgaggcgtctctcaaggagctgagtttgctgagtgaaaaacacattctggagaggaggctcacagacttgaggatggctgttgacgagaagcaggaagaagctatatctggtgctttgaaacaattgaaccagaagaaaacccatctcgaggacaatatgcgactggcaaatgaactaaaagacaatttaggtgatatgcctcaacctggaaacatttataactccagtcatcagcaacagcaagtaaccctaccaagaaatgaagcttccccatcttataatatggtttcaaataagaatgctcttcaacaatatgctcaaggtccaagtgaccgacatattgagcaaatggatactggaggtactactccctctaattattttgaagaaggaagagtagacggtggctcacagttatacccatctgatggtgatgctttacctggtattgagggatttcaaattgctggtgaacctagaccaggatgtcaattaacagcatgcggtttccctacaaatggtactaccctttgcaatttccagtgggttcgccatcttgaaaatggtatcaaacagtctatcgaaggtgccacgatgtatgactatgtggttactgcagatgatgttggtactcttcttgctgtagactgtacgcctatggatgacaacggccgccagggtgatttggtgacagaatttgctaataatgggaataagataacatgtgatccagagatgcagagtcatatcgatgcatgtatttctaaagggagagctgaatttgaagtttttgtcctgcaggcttattctcctgaggaatgggaactggctacattggtgctcacacgacctaattatcagattaagttcaaacagaccggtaatgttgtaattgacgagaagtactcacaaagtctacagacaaaaattccaaatgggcgcacaactcagtttgttttaataactgcgggtacaactcttccatttaacacacagggaatatcagagccaaacaatgaggattacgatgttagtatttga

SEQ ID NO: 30867 - DNA, 2283 bp, Zea mays
  Peptide Sequence Number=SeqID_74242
atggaggaagccgccgccgccgccgctgcttgggcgtctaatgccgccacgcccgtcccatccgagcccatgagatcccctcctgatgctgaagcctccgttgatcctaccgctgttggtgacgatgagcacgactccaaggaggtcgttctgcgcaggtacttcctccaggagtgggagctggtctcagcgatcctccaccgtgtcgtcgccggcggcggcgttgccgaatccgccgatgtccataggatccgctctatcgcaagagagcacaggagaatggagactaaatgtgttgttctattgtggctttatatactggtcctgatcccatttgacatatccactgtggatacaagcattgctactgctgataacgtcgatgggcctgaggtcgttccactggtgacaagaatactggacatctgtaaggattatctctccagttctggtccaatgagaaggatgtcaggattattgcttgcaaggctcttgactcgtcctgacatggcaaaagctttcagcagttttatggactgggcacacaagatgttactgtctgtatcagatgactttgttgatcaatttagatccattggtatagtggaagctttagcatcaatatttaagattggtaaccgtagagcactgcatgatgctgtttctggtacttggagtgattgttcacttgtgatgaagactaatgtctcagccaggagtccacttcttagaaaattcctggtgaaactggcccagagagttggtctcatcagcttgcctccacgtttaccatcatggcagtataaggctttacactatgatgtaagaagaggtccacatagcattgggtcacattgtgctgctgttgaggcattaaagcattttattccaacatacctggtatcttctggtgaaaagattgctagtgatattatctcaaaatatgtggcacttctagatgacccaaatgtggctgcaagacgaggagctgcactggcccttggaatattaccattcaaattcttgatgttgaaatggatgcctgtcatgagtaaactctgtagctcatgcaccattgaggataagcctgatgaccctgatgctgaagcacgtgtgaactctgttagggggctaatttcggtttgcgaaacactaacagcatcttttgatcagctctcaaatggagattctctatatgcatacataaaagattatgtcatgcgagctttatttagagcactcgatgattatgctgtggacaacagaggagatgtgggttcttgggtacgtgaagcagcaatggatgcgctagtacgatgcatgttcatcctctgcaagagagatattgttgctttgagagcagtgtcagccactggccatgactctgaactgggtgatatggaagtaaatgcaagtagtactgcataccggctatttgattctggtattgcacaggatctggtagcaggcattgcaaaacaagcagttgagaaaatagataagataagagaaatagctatcaaaaccctgcagagaattctgtaccaccaggaacacctcatcccatttatacctcacagggagttgcttgaagaaattattcccaacagcagagatttggagtgggcggagtctttgaagaaagcttcaatgtcagctttggtagggtatctccaagattcagacatcaatactaattgtgaagggaaaagtagagagtatctattgagttgtgatcttctatggggcctccagcactaccagaaatgtgaccgtactattgaggctctcttcagtaaaaaggttttcttgaacaaggaggggtacagtgagttctacagtggactggtagattccgtgagctctgaactgaagggatccaaggattttacaaagttatgtgcaggtctctcgatccttgggtacatttcttccgagtcagatggaacttgcaccaaggcattttcccaactcctcacattcctaggccacagataccccaagatccgaaaagctgcagccgaccaggtgtaccttgtgctgctgcaaaatgatgaccttattgtgtcggagaatatggataaagcccaggaattacttgcggagacgtgctgggaaggggatgtggaggaagcaaggcgtaggaggtcagaaatcaacgagatggctggttttagggtcaccacttcacagaagtctggaaagcaagaaactagaacggtcgccgcttcgacggatgagaacagatcttattcgtcattggtcgatttcagcggatactaa

SEQ ID NO: 30868 - DNA, 645 bp, Zea mays
  Peptide Sequence Number=SeqID_74243
atggtgatgggtttcaaccggatttccgaggttcacggccagctcccagaatcaatcgcgcccgccccggagttctctcggtcagtttcaatggagggggaaagtgctgacgcaagtggcccacccgccagcggctttgccgacgcggactccgcttcccgcgatagaaccagggaggtccgcgcgagttgggagcctgaagggcgggccccaccggccagcgagtgtagcacgcgttggcccagggaaggtggtgaacacgcgggtgcgggaggctgcggccgcgcggcgatagctgggtcggccagaaggggtagctgggccaagggtgtggaaatcggcctaggtgcaggtcctaacgctcgaaaacttttctgccagaacgattttcatgccttttcgactatatcgataacagaatcctgcagacgagtaagagtacacgttcagacatcggcagagggagcagcagcaccctcggcgttgtttccaccttcggcggaatctggcccagcctcggacggtgacacgggtggaaggatctccgcctcaaaggaggacgccagcaccgcactcgggccatcgcagccagggtctgcgcaagggttccggcctgagcggacgcctcggctggccgctccgtag

SEQ ID NO: 30869 - DNA, 1152 bp, Zea mays
  Peptide Sequence Number=SeqID_74244
atggagaaaggagcctcggaggcgtcggccccctgcgctcgctgcggcaagcccgcgcagctccaatgccccaaatgtgctgaacttaagctaccgcgtgagaacgcagctttctgcacacaggactgttttagggcagcatggagctctcacaaatctgttcacccaaagcctggtgcactggcatcccagcagtctccggaaggttggaaatattgtttgagaaaagggcggggacgtgcattgcaacttcctcgttttgaatggacaggtccattgagaccatatccgatatcaaagatgcgtgtggtgccagatgaaattgagaagcctgattgggcgcttgatggaattcccaagatagaaccagatagtgacttgcagaaaagagtagagattaagacccctgaactaatagaaaggatgagagaaacatgtcgaattgcaagagaggttttagatgcagctgctcgtgtaattaaaccaggaattacaacagatgaaattgatagagttgtccatgaagagacaattgctagaggtctgtcaatgaagtcatttgccatggaattccagatgccagatcctttcatttctgaagtaattatcaaggaaacaagtcaggaactgttatgtctgataacagcacacttgggatttccattttaccaagggaaattagttcattttcccttgaaaaatggaattgccaaactagcccttaatgatgcagttagggaagggaaacttgaggatggtgacattgtaaatgttgatgtaactgtatactataaaggtgttcatggtgatttaaatgagacatattttgttggaaatgtcgatgaagcttccaaacagcttgtgaaatcctattgtggccatggcataggggaactgtttcactgtgccccaaacattcctcattattcaagggtttggaatgatcggctctggcctgatgattggactgcagtcaccacagatggtgacagacacaggatgcgaagttttgacggcacggttaccctcatcaccagacgtttttccatggttgaaaccgtgatcgggcaccccaacagcaacaagaaagtgatactgacaaaccggggctgcaaaatttttgttctactctttatcagtcagtcaagctga

SEQ ID NO: 30870 - DNA, 552 bp, Zea mays
  Peptide Sequence Number=SeqID_74245
atgccatcagggaaccaaactatgacctttgtagctgtccagctgcttatgattcttcaatttggaggatatactctagtaaggaactccaaagttctatttgaaagttttggcttcgaggatcagccaataataattggactgatcattttccagcacaccataatacccatccaacaccttctgagcttttgcctgaaccttgttagcaaagcatttgaatttcaggctgatgcctttgccaagaaccttggatatgcccctcagctccgagcggcccttgttaaactacagagagatgcatctctatggagagtggagatgcgtactgacctaaccctcaagaagctcctggggatctgcggcaatggaggctccctcctcctgcatgtggatgagcggcaacggcatgagctaaccacccacattggccggacaagtcgcgagcacgcaggacgcggacacattatcctactcactggttatgggccgcccggagtaggaaccacaggccggcctcgtgacaacaagctgatcattagcagggcataa

SEQ ID NO: 30871 - DNA, 357 bp, Zea mays
  Peptide Sequence Number=SeqID_74246
atggcgtgccctacgcccgtcgatgagtctctaagaccaactccagtagactccctctccgtatccctaaaacgcgcggccaacagattctctctcctctccgtatccgtctccgtttccagcaacactccccatcccactccgcatacagtctatgacacctggggcccgccaacaggcgcgcgcacgcagagagctgcggagaggagagagaaagcgtggaaatggggagtgcagggacacggcgtctattttgcggagagggatgcgaagcctgctggagagcgtaatagtgcctcagaccgtgcaaaatgcggatgcggagtgggatggggagcgttgctggagttggcctaa

SEQ ID NO: 30872 - DNA, 924 bp, Zea mays
  Peptide Sequence Number=SeqID_74247
atggctcgacttagacacactgcacgaaagtcagtcatccccttcttaccctcccgtcttgctgagcgtccgcttcgccgtcccgtggccggacagtccagccacttggagagactacaccaccgcctgcgtgaggagcaggaacgtcgacgacaggagcagcagagctcttccctctcgctccaccaggagatagagtctgtgaggagctgctcccctgtgctttctctggagccgccccctgcaccaccactgggcgtcccagcttctggagtagctgctggaggagacccagacgacggaggaggcgacgacagctcgagccacgacaccgacttctctgctaaccctgagccggaaggatgggttgctcgacccatcactcgcgacgctgctcgcggcatagtcgcgggggtctacccggaccgctgggaggcgacttgcttggtgcgctgcccggaggacagtctccagggtgcagaggcctgttcagagcactattctatctctgagcgggactcagctgaggcagccatgcaagatgctgcacggcgtgcgctttcgcactactgctcggttttcggtggggcagctgacggtcttgacctgaagtattacccccgccgttcatccggcagcacaggaggcgtgattgtctcacccgtcggtgagggcaatcctaggttgagcagcacagtcaacctagccgccgtgctaaacacggagctggaccatgcactagacgagctgagtagggctcgtgctgagatcgccctgctgcgggctgagcgcgcggaacgtcgttttctggacggtggatcccccgctcccgttgggactcagcacccgtaccgctcacctcagcgtggacaccagtcttatggcaatcccgcctgcaagaccaagatcaacctagaaccatag

SEQ ID NO: 30873 - DNA, 474 bp, Zea mays
  Peptide Sequence Number=SeqID_74248
atggagatctccgacgccagctggcggaggagtggagggaggcaaacaaggccatcgctgacgcgtaggctgcgcaggccgaggccaaagtggcgcgggcggagggcagtctcacccgccaacgcgccgaggagctggaggcaaggttcaacgccctgcgcagccgcgtggacaaggtcgagtcctctacacgcgcggaggtcgagcggacgcacgcgtagtttgtggacgcataccgcgagctgggaggagctgctggtgctcctgaccattgtgacaggtttcatgtccttcgccttcctcgtcacctgcaagggggccatgaatgctttgtcccgcgaggggtgcagtcactatgaggtcttcgaccgagcggacgaaaactttgaacgtgaaatcttcagggtcgaagaccccatggtgaagcagtcgacgggggcactctttgataggatgtggggtccgcacggctga

SEQ ID NO: 30874 - DNA, 552 bp, Zea mays
  Peptide Sequence Number=SeqID_74249
atggacgaaggctggagcgaagggtggcgtctttgccttcgccccaacaattgcttgctgattgatgaccctttaactggccacatgcctcgtcatgggtggtacccaaggaagagccccagcattgaagttggtcgcgagaggatgtttgcctcccactttgaaatcaataaacttgtgtgcgagaggtgttttgcctccctgtatgagatctcagaatgggattcagccattgattgggccgttaactcgcattcgttcgcttgggactgcgaagcgaaagctctagctcgtgtggcagagcttagtgcgtacctcgaaagcctgcgagtgtactgtaatactttacatgaagaagtgcatgtactgtatgctcgactgcacccggacgtgccttctaacattgctgcaatgggagccagaccctcgggtatagcaaatgaaggacctgatggggagctggacctttttaggccccctccttccatgaaccttgctgacgaacggtctcctgccgcaggaaatggagcaatgaaggatgaagaagactag

SEQ ID NO: 30875 - DNA, 1110 bp, Zea mays
  Peptide Sequence Number=SeqID_74250
atgcaggcggcatgcaaccgcaccaagggggcgcaccctttcgacttcgacgcgtccagcatggaggcccaggcccacacgtcatgtaaccggcgcgtcggttactacgtgcgagaaactgcaccgccactcgcgccagtaccgcacctcctcgactgcggaaccggtgccgcgactcgaggcgaccctgcgcatgacccgacagtgccaaccgagcacatcggtcacgggtcagtcagccgcgggagaaggcgcgacggtcgatacggccagaaatgggccggcggtaatggcggtggtaggcaggcgaaagcagcagtcaagtcgtcagcaagctcacgcccctcctgggacagcgagagaaccctctcccatggcgtgaagacgacgcgcccgtgttccgttcctcgaacggctcgcgcacgcacaacggctgccctgcgaaccactcgtcccgtcgcattaactctgcagcaggacaggcgacacctttggcaggcgaagcaggcgacgcttcacctccgccataatgaccacgtcaaaaaaggtgcgccatgtcattcgatttcgtatccttttccacttcctctttctctctcttgccacagggaccgggaaaggggatactccgaaagggatccttctccacgaaggaagcgggccccgagcccccctactgatcataggttcgaaggttggcccctcggaagggttcaacagccgcctcagagcacttgggctccacgcccactactggtcagaggttcgaaggctggcccctcggaagggttcaacggccgcctcaggccactcgggctccgtgcccactactggtcaggggttcgtaggctggcccccgaagggttcgacagccgcctcaaagcatgcagagcgagggatgaccctgggtacgttcgatacataaccaaggctttggctacgctcccgaggtaccctaggacatttccgagaccgactggaacgatttgtaacagaatcccaccagagggaggcatcgagccctcggaccccgtcaaaaggggaccgggtccggcgaatcacccacaggtacttttggagcgcgcctccgggccactagccgacccctaa

SEQ ID NO: 30876 - DNA, 108 bp, Zea mays
  Peptide Sequence Number=SeqID_74251
atgaaggatgccaagcccatcaagacacctatgggaacaaatgggcatctcgacctcgacacgggaggttccaagccgatcctgaggaagttcaccttagggccatga

SEQ ID NO: 30877 - DNA, 447 bp, Zea mays
  Peptide Sequence Number=SeqID_74252
atgggcaagaacaacaaacgcaagcgtgagccgactcctccatcggaggacttcggtgattcggagtactcagaggaggagttctcctctgagtccgaggggtctccggctcccatccctctacgtgagtcgtctgacgattcagacgactcccaggggcttgcggcggaggtctggacttacatccgggccgtcgagcgctccgggatcgagggctcggatgagtcggagtactcctcggacgaggaggactcgtccgagggcggtggcggcgatggcgacgacgacgacgacgacgacgacgaaggcggtggcagcaatgacggtgacggcggcgatgacggtgacggcagcggcaggggcagcagcaaggatggcgacgacgacagcagcaggggtagcaacaggggcggcagcggtagaggcagcaacagggccagtggctag

SEQ ID NO: 30878 - DNA, 942 bp, Zea mays
  Peptide Sequence Number=SeqID_74253
atggcggcggcgcagccgaagccggccaagaggctgggcggcatggcggaggcgctcgccatcgccgccgacctcggattccccgcctctaccacgcaggaagatcagactagctccgacaaaagcgatgatttggtgaaggtttttgagggaactgactgtcgtgcagaggaacattgccaacttgcaagtggagctacagggaagaaaggtgagtccaagtggctccttgagccagccctcaaactggcgacctggagtcgatccctggcgttggcaccaggaggcccctctgttggccttgtgaaaaaagaaaaaaacgataatgtcatattcatgaagttttgtttgccacaggatgataaaaacattgctcatttgactcatgtgagtgagatggaaaagaagtgcgagtctttggccagaatgactgcaattttgaaagatgtaattcagaacaaggatcgtattattgctcggctgcaacagccttattcccttgactgcataccagttgaagctgaataccagaaacaattctcggagctacttctgaaagcagcaagtgactatggggcattgacagcatcagtcggcgatttccagtggagccaaaactttagggaatcaccagctgtctggggggaaatgctgcgaccgattcctgctgcacttgcttcctgcacccggttcttcgaggcaatgtctgcgatgagggaatccttttctactcttcagaaactacgcgttggccattcctctctgtcaataaccccaagtgactccagcgacgattcaaagttcttgacgccacctcagtggagagacggctcgatactcgatagctggaagcaaatggatgacatcaacctggagagcagtggaattgacgccatgaatcagaggaggttgtcttggccctccatcaagagggacccgtag

SEQ ID NO: 30879 - DNA, 219 bp, Zea mays
  Peptide Sequence Number=SeqID_74254
atgaagccactgaggaagtgcatcatcttgcttaagatgaacaggatcgaagaccccaacacagggagcttcgtcaagaaggcttgttcaatgaagatggatggttgtcgcctcctagacggcttggtggtggttccccgtgagctcttcaaaggagactgtgaagaggccgcggtggtgattgtgagaggcgttgtgcttgcctcgccggagcggtga

SEQ ID NO: 30880 - DNA, 123 bp, Zea mays
  Peptide Sequence Number=SeqID_74255
atgtccatcccccagcatgtgaacgaccatgttacaggaatggtctgcaactgctgcgcgggctctctccagtcgttagggtccgcctccagctggctcaaggtgttgcactcttccacctga

SEQ ID NO: 30881 - DNA, 726 bp, Zea mays
  Peptide Sequence Number=SeqID_74256
atggcactcggcaaagagccaaattccggtagtgatgatcatgataggagagctgatgatctcaagatactctataaggcctatgctatagaagtactttcagatggaattgtggatgataagaaggaggtattatatatgttttggaaagaaatttacagacagaagcttcagcagtttgtagctgatggagagctgagcaaggaggaagtggaagctctgatggcattccaagtgcgtctttgcatccctcaagaaactgtggacgctgcacatactgagatttgtggacaactgttcaaaaaggttggtccaaccacatttgaagcaaagttgcagcctcatcttctttggagtcttgatcaggtgaaagagaacatcaagacccagacacatcaacttatagatgctcgatcaaaacctaggctacatgcatttggtagtttctatgactgcttgaaagtatgttcttctctcttttcttttgagaggcacaacaattttttaagtcgttgtaatgaaataattcctcagtgtgcagccgctcagtgcatactatttgatggtgcagttcccgagccacgaaaggggattagaagtgggcatgtgcctgggagcaaatgtgttccgtttcctcaggttcttgacagctcacaaaagctattgcctccagatgagcttcgtaaactgtttgagcaagaagttaccacacatgctgccatctga

SEQ ID NO: 30882 - DNA, 273 bp, Zea mays
  Peptide Sequence Number=SeqID_74257
atggagagggagctaggggggcgcggccatggcgatgagctcggggaagtgagaaaccgcggccaggaagcaggagcgcgctggaaagacggcaagctggaacagagactgagcacttgccgtactactgctcgtgagaatagagataaagagaagggatcgctcgcagaagaagaaacaagtaaatttccgaccccttcaccggtcctggatgaacgagatatgcatcaattagctttggaacatgtcaagaacataaataagacttgttag

SEQ ID NO: 30883 - DNA, 216 bp, Zea mays
  Peptide Sequence Number=SeqID_74258
atgacccagctcttcgagttctacaaggctgaagatcctgagcatctgtttggtgaaggcaaagatggttggtttacagatggtgacaaggatgatggttttaactatggtaatggtaagtggtattctttccgtttggaaagggtaaataagaaggagaacagtgtcgaggcggatctccgggagttccaggacttcgacaagttcgaggattag

SEQ ID NO: 30884 - DNA, 261 bp, Zea mays
  Peptide Sequence Number=SeqID_74259
atggaggggctcggcgccaagggaaacagaggcgagcaccagggagatgcggtgttagtcactaaaggggtatcagccggcgaccagcatgacggccaccagagcacgcgtggccagaacacgacagcggagcagggcgtgactagacaggagacgatggcgagcgttggggagccagagagatgggcgcgcacagccaccagagcgcggtgcagggaggccgagcagcacatcatcacggccgggacaacggcgccatga

SEQ ID NO: 30885 - DNA, 372 bp, Zea mays
  Peptide Sequence Number=SeqID_74260
atggcgtcgggtggcgaggagatgggaggtaggtcagtcttcggtcagatccgatggtgtaacagcaaggctcgtgcgacacttgtaagacgctcgacaaaaatactgattcgggagtggctacttcgtcttcttcgtcgtatgggaatcgtcgtgctgacacgccaagtcgtcgatcgtcatcctcgtctacgccaagtgatgcttcagtgggtgggaatgttttcgaaaagaaaaacttgtgatggtggatccatcagggccttgatgggttcaacatcggaaaagatgtacctctgccaggttatgagtcacttgattgtgattggtgttaagcgccggtgggcacgaccttcttataagtctaagtaa

SEQ ID NO: 30886 - DNA, 286 bp, Zea mays
  Peptide Sequence Number=SeqID_74261
atgccgcccaccgcgcccgcctccagcccgccgcctgcagcacccgcgctgcccacccgcgccgcccgccgcaacctcccgtactttgcctggtacgcttcgtgccgccgccgcaacctcctcctccccgtcacaaggactggtgtcattccttgtgctattgcacaaatcgtttgcatgtattggagttttggtgtcagtcttagtaaatgttgcccatgtgttcttgctatgtatgttgctattcaagctgacctttccctatacgctagtggctgtaccactg

SEQ ID NO: 30887 - DNA, 213 bp, Zea mays
  Peptide Sequence Number=SeqID_74262
atgggagcttctcccactgcaccagggaagctagggaggagggagctcgccgggaggggcgccgagggaggtgcttgctgctcgccagaaggaggagcagggagggcgtcgctggtggctgttgctgccatgaagaagaagaggcagggaagaaagaaggtggcggctgggaaaatggaggggtgggagtgcaaaaatgcctccacttgctag

SEQ ID NO: 30888 - DNA, 267 bp, Zea mays
  Peptide Sequence Number=SeqID_74263
atggagtggatagcgctcggggtcctagaaatatcaccgctgtggataactccggtcactaaacaagtccgaccaccgtaccaagttgccacagccgctacggatgaattcgccgaaaacgaagaagagattgaagtgaccgaagagaagacaccaccaccttcggattctcaggccggcaattgtttctacttcgatatctgcgggtccgagcctaactcacctactaacgaaggcaagccccggtgcatttgccaccttccttga

SEQ ID NO: 30889 - DNA, 306 bp, Zea mays
  Peptide Sequence Number=SeqID_74264
atggcatccacggtccaggcggtgcacaagtgctacaagggcgcgggcatccgtatatataggcccggccgaagaggacggatggccccggcaacagctcggcgaaatccacgtgagctagaggaggtcatcggttccgagttcgccgccgcgcgggatttatcggtgcggcaagttcggtgcctggaggttgaaggtgccctgacgccgtggtcccaccggcaggggtaccagaggatgcacacggatttggtgcctgttgagtttgctgcccggaactgccacgagctggtgtactttgagtga

SEQ ID NO: 30890 - DNA, 1002 bp, Zea mays
  Peptide Sequence Number=SeqID_74265
atggtgaccaccagttcgatggtggggagaagcaagccgggctgcggcctctgccccaccctcagcttcaaggatcttcatcatccttgctggggaggagggcggggcaagtcggggcctgcctccgcgtgggccggtgacccgcttcttcctttggcattcgggggaggaagacatcctccagctctgcggaggaggcgtcctccagccatgcgggggaaggcgaactgctgctgcctggccagggtgcagcattccatcctccgttcgggcgactgtggccggctacaccggggggtcgcacaacacgtcgcacgccgcgagggcagtactcgtgttttgggacggtcccgttctcgttctcgtggtgagaacgggagtgaggacctgccggtgcgctttggggcggccgccgctcgctggtgcggtgttggtgggcaggtggccgctgtcgtcggtactgaggtggtggcagccggagaaggtttctccaccgatggcaccgtcagtgccacctgcgctccgggcctccgactctttggctttaatggctggttctcgtcccccgcgaggggacatgaacgagggccttccagcggtagcgttcaccctggggccatcactgctgctgtcttgtcgtccgagacggaggtcgttgccgcgctgttggtgcagcggtcgccggcgagccacccagagtttgtcgtcccgcaggccctccggagtccctcggctcggtcggccttgccgctcaaggcttcccttgctcagtttgagatccttcggccgctctgcgatgagctggagccggaggctgcggtgtcggcgtggacagaggcggagtcggctcaaaaagaggcttcgtcgacccgggagcacgtggcttccctggccgaggaggtggagatccttctgcccgtgtcgtcgtccgaggccgggccagatttcgccgaaggtggaaacaacgccgagggtgctgctcctccctctgtcgatgtctga

SEQ ID NO: 30891 - DNA, 1113 bp, Zea mays
  Peptide Sequence Number=SeqID_74266
atggcgtccacggtccaggcggtgcacaagtgctacaagggcgcgagcatccttatatataggcccggccggagaggatggatggcccctgcaacagctcggcgaaatccacgcgagccagaggaggtcatcggttctgagttcgccgtcgcgcgggatttatcggcgcggcaagttcggtgcctagaggttgaaggcgccctgacgccgtggtcccaccggcaggggtaccagaggatgcacacggatggggatgcgctcgtagtaggggttacaagcgttcgagagggagagagagtgagcctgttcgtcagcccgccctcccgcgcgaccctcttgcatgagggccctggaccttccttttatagatgcaaggagagggtccagggtaatgatgtatccctcgtggcgtggtcggtccgagcccaaggtcgggcgaggcggagactcctcctgaggccgaggccggggtcgggcgaggacgtgattcctcccgaggtcgaggatgaggccgagccctggggtcgggcgaggcggagaccaccctccgaggctgaggctgaggccgagccttggggtcgggcgaggcggggtcctccttccgaggccgaggttgaggctgagccctggggtcgggcgaggcggagtcctcctttcgaggccgaggttgaggccgagccctggggtcgggcgaggcggagcttcctgttgcgcctaaggctgaacttggttgttgccagcctcactctgccgggtggcacagcagtcggagcggggcgagcggcgctgttttcctgtcaggtcggtcagtggaagggcgaagtgactgcggtcacttcgaccttgtcgactgaggcacgctggtttgttgacgttgtcaacggtttggccgtaaccgggtttgcgagagtagcccccgagtctctgcatggagcgagaggacgatcaaggactgtctcgacttttatcatacgccccttcgtcgcctttccgcaaggaggaaggggggaaagcgccatgttgccctcggagggcgccgaacatggtgtctccagtgatttgccggacccagtcccgttcgatagggtccgagggcttgatgcctccctctga

SEQ ID NO: 30892 - DNA, 333 bp, Zea mays
  Peptide Sequence Number=SeqID_74267
atggcggcagcagacgagcggaagcggcggtcaaatcgtctgcaggctcacgtccccttctgtagcagcaggggagccctctcccatgggaccgggaaaggggatatttcgaaagggatccttctccgcgaaggaagcgggccccgagccctcctactgatcaggggttcgaaggctggcccccccagaagggttcgacaaccgcccagagcactcgggcttcaggctcattaccgatcaggggttcgaaggctggcccctcggaagggttcgacagccgcctcagagcactcgggctccgcgcccactactgatcaggggttcgaaggctag

SEQ ID NO: 30893 - DNA, 297 bp, Zea mays
  Peptide Sequence Number=SeqID_74268
atggctaggcagcgcaacggtcggctccaacggtcgcctgcagaagctacagtgcgcggacagttcgcgcagagtcagagcagccgccagaaggcgcaccatacagtgaacagtgcctgtccggtgcgggcaccggactgtccggtgccacatgaagacaaagctccaacgatagaaaccgtcagaaccctagatatatgtgtagatgcaattgtggacattaatccacaatccatcacactcaatcaaagatccaaatcagacaagtatcataagaacaaacattcaagttcatag

SEQ ID NO: 30894 - DNA, 369 bp, Zea mays
  Peptide Sequence Number=SeqID_74269
atggctcctgttctccggcaaggcaaccacaacatgagctcctcaagtgaagagatccatggtagccgccggggtgctggtaacgttgaggtcatctttcttgagtctcatgtggttggtggagcccctgcatcctctgttgctgacaacaccgagcctgtgtcgacatcgttggccgctacagattcttcggcacttgctgagaaggacattgcagcgctgtctcctgagcttcgtgcacaagcaactgatccaaagagcacgcaaggtcacaggaccctggatggaagtttgggaggtggccagacactgtcacactgcaaaggactttgttcagtgtattttctgtttgaagattcttccttctag

SEQ ID NO: 30895 - DNA, 603 bp, Zea mays
  Peptide Sequence Number=SeqID_74270
atgcaagatgagagtgtcgcgacggcccaagacacgacaagtcaggggatggggcgagctgcaggagcaagggagcggtctgcaggcacgaccgaagttgaaaccgagcagaggatgggcgagctcggaccttcctggtggccggtgagcagggagggagcgctggcgctgtcggggacgtggcaggggcgccgaggtggctccacgggcgcggcgcggtcggggcttcggctgctcctggcgtcgtgctcggggtgcagttgctttgtgcttcagacactcggcaaagcctggaaaacattcgacaaactctttctcgagtctgagtctcagcaaagaagactcggcgaactgtacatcggtaaagttaatggccgtcaactatatacggctactgatggtcctttgtcgagcgtcgcattttgccgagagtgtgacactcggcaaagcctcctttgccgagtgtcttcctatgccaagtgtttcgccctcggtatacgagcttctggccaccaaaagttgatgcggattgccaaatgccctagcttttcagcccgcttctataagaatcgctttggtaaaaatcatccaaaatcaacatga

SEQ ID NO: 30896 - DNA, 399 bp, Zea mays
  Peptide Sequence Number=SeqID_74271
atggctctccagaggctccggaagcgagagttcatggtgtgcaggccagaggccgaaccgagggaggcggaggaggatggatcggccggtgctgagaactcgacaagggagagcggagcggggagcagccacaactacgtcggtcgagctcttggttgcgttgaccgagtccctaactacttagcacttggtcgcatcgaccgatcccttgatggcaccaggtccatctttagttaccacaaaatcgagagttcaaatccatacattgaagaagtgttgcgtaaagtaaatattcccgtatttgatgatgaatatcaggactttgtagtccgctatgggaatcatctggttgcccatattgacttggtcaaggatcatgatcaattggagatggtgtag

SEQ ID NO: 30897 - DNA, 567 bp, Zea mays
  Peptide Sequence Number=SeqID_74272
atgacccgcgcgcccgtgagcagcagagccccggccgccgcggcgctctccagccggcggaatggcagacgtggagggggcgcgaggaggaggagcctcagcgtccacgacggtacagcttcaggaggcaccggtcgggcgcggcggagtgggcggcgccccgcgcgccgtacttgggcggtgcgggcggcgagcctgaacacgctggtgtacgggcagacgggggcgctggacgacgtgcagctcacggtccgggtggaggcccgcaacggcaacgcgcactcggcggcctacttctcgcgcctcgagtgccgcctcgcgttcgccggcgcgacgctggcgggcgtcccgctgggcgacgccggcagcgctgccatggaggccgcgctccgcgacggcgtggtgccgttccgggtggagggggaggcccggacgcgatggaaggtcgcggggatcgtcgccatcgaccagtggacgcgcctggcgtgccagctccgcttcttctggcccaacggcaccgcgctccccttcagatgcagctccaagtccaagttcttgttcttctga

SEQ ID NO: 30898 - DNA, 2224 bp, Zea mays
  Peptide Sequence Number=SeqID_74273
atgacgacatcaatagggggagcagcagcaccctcggcaccgactccaccttcggcggagtccgacccagcctcggacagcgacacggatgaaggatctccacctcgaagaaagatgtcagcaccgcgcctgggccattgtcgccggggtctcctccaggaacccggcccgagcagacggctcgaccggtcgcttcgtagcctcagccagctgtcccccgaggacatcagcccggctcatggcctcgggaacccgactccggcgtcggccccgccagtggacggcccggccaggctctggccgacgaagcttcttttcgagccaactccgcctctgtccatgatgacaccgatgcctctggctctagctcatcgcagagcggccgcgggtttttctttaactgagcaagagaagccttgggcggcaaggccgaccgagccgagggactcctacgcctccgggatacggatacctcactcatcaccttccgcaagaggcaactcacacttggttaagcgccacaatgaacagacactggcactcaaggtgccattacaaacggaactccggttccactcccgcgggtatgaacaacctccacatcggagagcctgtgggacgacgaactccgggcgactcgccagcgacctctgcagcagcagcgatggtcccgggacggacgctgccgccggaaggctctcgttcgcgtccccactcaagggacgagaaccagacattaaagccaaagagccagaggtcggtccgcgagtagcgctgacggtctcatcagcggagaagctttctccagctgccaccacctcagcaccgacggcggcgtccacctgtccaccaacaccgcaccggcgagcgccggccgccccaaagcgcaccggcagcaacagttcgccttccccggcatggctggagggtgcctcctccgaagagctggaggatggtttccacccccagaagctggaagaagaggtggcccgccgacccgtgcgggaggtagagctccgactcgcctcgctctccgccccagcaaggatgatgaagatccttgaagccgagggcggggcagaggtcgtagcccggcttgcttctccccaccatcaaactgatggcgactctccccgcttgcgtcctcagccatcgcggactgagtcttcaccaacacgctccaaggtcctcccccttacgacacgggggctgggtcccacgcgtcatgcaagctggcccaggacagaaaaagccaaaccgccgcgcgcagagcgcgtaactgcccagcggttacaacgactcctccactttcgcccggaccagcagatgaaagggcggaccgccatgcacgcggcatgcaaccgcaccaagggggcgcaccctttcgacttcgacgcgtccagcatggaggcccaggcccacacgtcatgtaaccggcgcgccgattactacgtgcgagaaactacaccgccacttgcgccagtaccacgccttctcgactgcaaaaccggtgccgcgactcgaggcaaccctgcgcatggcccaacagtgccaaccaagcacatcggtcacgggttagtctgccgcggagaaggcgcgacggtcgatatggccaaaagtgggccgacagtaatggcggcggcaggcgggtgggagcagcagtcaaatcgtctgcaggctcacgtcccctcctatgacagcgagagagccctctcccacggcgtgaagacgacgcgcccgtgttccgttcctcgaacggctcacgcacgcacaacagctgccccgcgaaccactcgtcccatcgcattaactctgcggcagggcaggcggcacctttggcaggcgaagcaggcgacgcttcacctccgccatgatgaccgcgtcaaaaaagggatcgggaaaggggatactccgaaagggatccttctccacgaaggaagcgggccccgagccctcctactgatcagaggttcgaaggctggcccctcgaaagggctcgacagccacctcgaagcactcgggctccgcgcccactactggtcagaggttcgaaggctggcccctcagaaggccgcctcgggccacttgggctacgcgcccattactgatcaggggttcgtaggctggcccccgaagggttcgacaaccgccttagagcatgcagagcgagggatgactctgggtacgtctgatacatggccgaggctcgggctacgctcccgag

SEQ ID NO: 30899 - DNA, 417 bp, Zea mays
  Peptide Sequence Number=SeqID_74274
atggggccgaggacggcggcactgccccgcgattatatagggtcaacaaaatcggtagcgggatgcgttgctcccggaagaatcgcggagttagttgagctcgggtcatccggcaatggcattgagagggaagggatagagttaacgaataggtcccaccccgcagtgacaccgagtcaaactcgcgcgcagcaatacaaatcggtcgctgacacctggccccccttggcaatgaacgtggcacgcaacagaggaataggggtgacggctgaccagggccccccagtgtcagcgcggggcgtggggaagaatgggccgcacagatgttatcttcagatgggccaaatgaagtatctgaggcctagatttcttacaaagtggctcctacaaatcctaccccccttaacaacgcataag

SEQ ID NO: 30900 - DNA, 660 bp, Zea mays
  Peptide Sequence Number=SeqID_74275
atgcaggctgcacattgtggctatgagggttctgtgaacgaggccatcaagatgtttaatcccatggttcacgctgggttcatccagaacatgtggcacgtgcctgcaatatgctttgttgcagttgacaatgaactatgtttcttacagtgtttatatcttcctgtgcaattgcacctagcagttgaggagtgcctctttggctcttttcgtgtattttcggattcagaattatggatatggagcacgaccaggacgaaggctgagtcagacgaaggtcgggggcagccgaagctaaatgattctttggtgatgcttatatcatatttcatgctttatgtgagtccttcgtcattacttgttatgtttacgaaggtctttggagctgaggatgagcgcataatggcgcaccgtctagcattggctgccctgaggtgcaccgtccactcgcagtgcgattgttggctttgcattggctactcggctctggcatgttcaaaatctggtgcctggtctcacccattggttttaccctgtcgtgtttgttcatgccgctctatgatggcgttgcccacaggctaccatatcaccatatcaatcgaggtccttcaacgtggtgtgctctgtggagtgttgtatcctatggactgcttatggtag

SEQ ID NO: 30901 - DNA, 393 bp, Zea mays
  Peptide Sequence Number=SeqID_74276
atgggtgatcttatcctattagcagtgggtaaacaatcattagctaacgaatatagacagataagattatttatttctcataagctggagggcatatacacagtcctacatcatcctttcactgcaccaaatcctaaggatatgaacgatctaccatcaacccgtgctctggtgtatgacatgatttacaatggtggcggcaactacaccagtactggcagtgtgggcttgaagccccgcacacgcgttggtgatgctcgtcgtggacgtcggcaccgggtgcggccccgcagtagggctggtggtatgatggccgggccaagcaacgacttcgaccagcttagcgccatggtcaccgtgctgctcaaccttgtcaacctacccctccggtga

SEQ ID NO: 30902 - DNA, 480 bp, Zea mays
  Peptide Sequence Number=SeqID_74277
atggatcccaacgttgagattgaagaatgtgtcaccctgatacaatttaatgagctcaaacaaagcatagaagccaagcaagatctgttggcacaagatcttcagacacttatggctgaaatcagaggtcgtcgtcgactccccgacggtgtaagaaaccatgatgaagatggggaagaagatgaaggaaattattctagaagagcaagtgaacatggaaggagaaatcaaagtgctgcatatggtagaggaagaggccggaatcgaagaaataatgacaatgaagaatctgaatttggggatgatcagtctcaacatcgctatggtcgtcgtcatcatagaggcgtcaaccaagaagagagatttgggaaacttaagtttaccatgccaaaatttgatggtagatatgatcctgaagattatttcacatgggaattgaaagtggagaaatcttccgcctacataattattcagaggtga

SEQ ID NO: 30903 - DNA, 909 bp, Zea mays
  Peptide Sequence Number=SeqID_74278
atggctcgtcttagacacactgcacgtaagtcggtgattcctttcctgccatctcgacttgcggagcgtcctctgcgccgcaccgtgtccggtcagtcgagtcacctggagagactgcaccaccgcctgtgtgaggagcaggaacgtcggcgccagcacagagagcagcagggctcttcctccccaccccagcaagaggtggagtccgtgaggccccgttcctctgttgcccagctggaggcgccccctgcaccgccgcgggacgccccggctgttggaggagctactggaggagatcctggaggagaccccgatgacaacgactcagaccatagcacggagtcttctgagccgcaggaggcggaaggatgggtcgcccgacccatcacccgtgacgccgctcgcggttgtcacttccacgacgcactggacaccttgctgcgccaggctttcgaccggcacacctggtcgatcgagtaccgttgtgtagtctaccagcacagtcgcggggagaggcggctatgcaggatgcagcacgcgtgcactctcccagtactgttctttgtcggtggggtggccgacggtcttaacctttggtactacccccgccgccctactggcagcaccgagagtgtggttgtctcacctgttggtgaggctaaccctaggttgagcagcacagtcaacctagtcgcagtgcttaacactgagctggaccactctctggacgagctgagcagggctcgaacggagatcgcggagttgcgtgctgagctggcagagcgccatcaccaggagggtggttcccccgctcctgttgggactcagcacccataccgctcgccgccacgtggtcaccacacttatggttcccctgcctgtaagaccaggatagatctggatccttag

SEQ ID NO: 30904 - DNA, 132 bp, Zea mays
  Peptide Sequence Number=SeqID_74279
atggaggccaagtcacaccatcaagcaaaacaagaaggcctcaccgccttggcgtacaatgctccactgaccccgaccgccgccgtgcagtggtcgcacttgtacccaccatatctagaatgggagacctag

SEQ ID NO: 30905 - DNA, 267 bp, Zea mays
  Peptide Sequence Number=SeqID_74280
atggagggggagtacgaggaggccagtgtgcactactggagggtcgtagctcggtcggaggtggctggtggagcgccgcccacggctgcgagcagaacgacggcggccatggacgggagctcgcgagaatgggagggacagcgctgggagcgtggagaaggaatggagaacgttggggagtgccctggcgccgtttatatagatgggggaggcagagaagggtcagacaggagggggcaatggcagatgttctgcaacttttattaa

SEQ ID NO: 30906 - DNA, 792 bp, Zea mays
  Peptide Sequence Number=SeqID_74281
atggcgcactctggctctgccagggccagacctcggtcgtcccggcgtcaacacgaggtatcggcatcggtgcgctcaccctcggtgagggccgcaccaaccgaggacttgcgggcggagctcaactgcagacgtgtggctgaggacgctccggcctctctggagaggcctgaagacctgcgagctgaactcaaccgcaggcatgtgggcgaagatgcccgcgtctctctggagagggcgcgtgagcgccgacaaaacctcaagggtcacaaccttgaccaagacttcgttgtagtagcaccacagacaccaaggggtgctcggttccagacgggtatcccattggccggcgtgggctgcgctgctctagtggatcatctccgcgcgacgacgtggccatccaagttctggccacacctgctggacaagtacgacgtgaggcaggaacccggagaaactctctgggcattcatctcccgcttcactaagggcggcaagaagaagaagaagaaccgcggccacgagaagccatggaccgccgctccggtcgtcgcggtcgtggctgggggctggaatgagcgcaacaagcgcctgcggccccagggaggcaacagcggcacatgccatgtgcaccccaacagccaccacagcgccacggagtgccgcgagatcatcaagctcgcgaagcgcgtcagcgagcggcgcgagcagtcctccaaggatggctcaccacctcgtcgctggcctggcaaggagagggccgacgagggcgccgcggccgtaggggaatga

SEQ ID NO: 30907 - DNA, 534 bp, Zea mays
  Peptide Sequence Number=SeqID_74282
atggatgaaggaactcccctcggtggtctggagtctgaggacgacgccaagccgagccacgggcttcacgccgtactttctagtatatggggccaaggctatcttgcccacaaacttagaatacggctccccaaggacaaggacgtacgacgaccgaagcaaccaggccagtcgagaagactcactggaccagctggaagaggctcgggacatggccttactacaatcggcacggttcagacatcagtagggggagcagcagcaccctcggcatcgactccaccttcgacggaatccgacccggcctcggacagcaacacggtcggaggatctccacctcaaaggaagatgtcagcaccgcgcctgggccatcgccgccagggtctcctccaggaacccgacccgagcagacagctcgaccggccgctccgtagcctcagccagctgacccccaaggacatcagcccggctcatggcctcggcagcccgactccagggttggtcccgccagtggacgacctgaccaagttctag

SEQ ID NO: 30908 - DNA, 1167 bp, Zea mays
  Peptide Sequence Number=SeqID_74283
atggacaagggaaaggggcatgcaagcagcgcctccgccccaggtgactccaggggggcggaggacgagaggcgtcacaggctgcgccgcgccgatgggtcgttcgtcaccgagccggcccagaagcgccagtggactacaggcgtggccgaggagatgggctcccaggcccacgacgcgcagaggcacgtcagtttgccgccaccacctccaccaccgccactgtcaggcccaccgccgccaccgccatctaggggtgacctcccccaggggcagcagcagcagcaagggcggcgatcccgcttccagggccaatggatggtccagggtcccaaggcttcctccccctctactcccaaaatcgcgcctcctccaccggacgccaggcccaccaacgggtttggctcccaacaacaggcatctgctgggagtggtgccggtgtcccgcctccggctgccaccgagaccgcgccagcggcttcccacgcaccaactggggatccggcggcagcggggccatcatcggatagctctgcagcagcgccagcgttgggcggcgccgcgacggcggaggagacgccagctggagggtccgcgccccctccagacaccgaggttgaagcgggaggtgtgtccagctcctaccccccgcctgctccggaggaggtggaggtggtgttcgggcgacgcctccggtcgggcactgagccagaagaggcgctagtcccgctcccccgcgtgctatcctgcgcccaccagaaggtatacgccagggagctggaggcgtcccggaaggagaataggttggcgaggagggaggaggccttatcccagcgggaggccgtcgctacagagctccgggccaagcggagcgccctggaccagatcctggaggagcagcgggcccaacagaccggggctatagagaggctgcaggtgtggcagcaagagctcgatggcaaggccagcgaggctgccctcgctgaggagaggctcaaggccaaggagcagtccctggacaggcgggagacggacctcgccaggcgggagacagatctctccaggcgggagacgaatctcgccttccgggaagagatgctcacccggcggggcgagatgctggccgagcacaagctcgaggccgaggcgaaggagaaggagctgtag

SEQ ID NO: 30909 - DNA, 309 bp, Zea mays
  Peptide Sequence Number=SeqID_74284
atgtgcgagtgtttctacggcttgctcgggattgtggcggggtcgcggccaacggactgcaatggtgtttgcgggcgggcggattgcggcgagctcacggcgtggtgtgcgtgggcgggcgggcattacagcgaggcgggcggttttgtcggggattgcggtggggtttgtgttgttcgcggcatggtttgcggaggcgggcggattgcggcggcattggcagcattggtggcgtggtttgtggaggtgtttggaagcgcggcggtgtttgtgggcggaggcgagggcggtggcggtctacagtactaa

SEQ ID NO: 30910 - DNA, 606 bp, Zea mays
  Peptide Sequence Number=SeqID_74285
atggtgaccaccagttcctgggtggggaagagcaataagaactgcgatcttggtcccaccctcagcttcaaggatgttcatcatcctcactggggtgggggccaggctgagccggcgctctacctcccatgcgggcctgcgggtcaccctctcccgcggcgttcgggggtggaggcgctcactggccctgcgggcggcgcggacttagacaacgtggggctgatcgacggcgggcgtcgtcacctccagcgtgtcggagtcgtcggccgggctcccggcggcccctcctgccggagggcggctaccgcgccgtgtgcacgggaggaccacccacgataccacgcactgctagggcggcgttcgtgttctggggtggccctgcttttgcactgggacggcgccctctcgcagaggccgacagatccccactcaaatccgctggtgtcccctgccatcggcgccgaggcggaggcggctcgagaagtcctcgtcgccgacgggatcactgccgccatccgcgccccgggcctccggttcttcgtacttgtcctcgcccctcgagcgtcggcgtgggcgagggcaagattgcagcagcgcccgccctga

SEQ ID NO: 30911 - DNA, 180 bp, Zea mays
  Peptide Sequence Number=SeqID_74286
atgaacaagaacacaagagacacaagatttatcccgaggttcggtcacaccaccaaggtgccctacttcctcgttgaggcgcccacaaagagccgggtctctttcaaccctaatcctccctttgccgaccacaaagattttgagaaaaccgaagtgaaccagggtatatgggagttttag

SEQ ID NO: 30912 - DNA, 645 bp, Zea mays
  Peptide Sequence Number=SeqID_74287
atgcaagtccgtgccatctttgaagctgctatagcgatgaccaaccagggcgttcaagtctttccagagataatggaattgggacatcaggtggcccttatccgtcaagtcgctaacaaagttttcaccagtatgggtaaaactattgggtacaagatcggaatgatgattgagattcccagggcagctctagcggccgacgagatcgacgccatcagaggctggctggacggagggaacaacgcctcccccgttatcagccagccgctcgcgcaccgggagcgggcaccgaatatcactgggattggatctaagaactcgccgccgcctgagctgttggatctaataagagacgtaagaaccctaaacgccctagttgagacagggagcaagaagaataccggtgagaagcagactccggaggagatcgacgccagcaggcgtgaggaatccggtctccgtgccaccgttgccacgcgcatgcggcgtgcccttcatgcctgttgccctaatccatgctggtcggtgagaagcgacctattgtctgcgtgcgtctgggatatttccccaccccgcagcgaccgggcctggttccaaggcctgggtgacgaggaaaggccgggaagtagcccatgtcgggcttaa

SEQ ID NO: 30913 - DNA, 396 bp, Zea mays
  Peptide Sequence Number=SeqID_74288
atgaccatagacgagcactatgaatcgcttcagcattgcaaaaatgctgacacgagtggacctgccaatgatgtctacgagttagttaggacctctgaactaaagcgcacaaagggcatctcgacatcggacatcatcactacgatcttgaaggactacaaccaatacattatgtggaatctgacttgtgggtacaatcataaagaccttggcatcagctatgttaaggagaatcaattgatggtcaacatggggattagcaagctaagggagaaggtgaaggagcaacaagagaagctttgtggtggggacattcatccacatcgaatgaacaataaacagacacaaattccagtaaccacacagtgtggaattgttgacccgttcaacccctga

SEQ ID NO: 30914 - DNA, 375 bp, Zea mays
  Peptide Sequence Number=SeqID_74289
atgtcggggtcccgcgcgcgattgcgtcgatctggtgcagaggagacaaccgttgtggcggcaccacagaggcgacacaaaattgagaaggcgagattcgtggccgcgggcgtggtcggcgaggacgacagaggcaaggatggaaaggtgcggcatgcgcggaggcgaaaatggtggaggtgcggcgcggaaatcttgggaggcggaggcgcaagcggagcggaggatgtcagggtgggaggcagaaccgtgggtgtggacgcctacactcttttcttaaggagtagtagagataataagagaacgatttttcaccattatcttatgtcttgtgtttgcattttaagggaaggaaatggcgaacatgtcgcctaa

SEQ ID NO: 30915 - DNA, 588 bp, Zea mays
  Peptide Sequence Number=SeqID_74290
atggcgctccacaagctctatgacgacggcggccccccggctctcttacggaagcaggacaacgtcagcagggactcgaccgctccaacagctgtccctccatcaggctccgccgcacctccgacagccacgacatcacgccagcaggcactctgctacacccccattgtacacctggatcctctccttacgactataaaaggaaggaccagggccttctcagagaaggttggccgcgcgggaccgaggacgggacaggcgctctcttggggccgctcgcttccctcacccgcgtggacgcttgtaacccccctactgcaagcgcacctgacctgggcgcgggacgaacacgaaggccgcgggacttacacctctctcacgctcgactccggccacctcgcctctccccccttcgcgctcgcccacgcgctcgacccatctgggctggggcacgcaacacactcactcgtcggcttagggacccccctgtctcgaaacgccgacaggccgaggcgcaccactgctactgctattgagccagcagtgagcaccgctgcacaggagcaggccaaggcacaatgcggctga

SEQ ID NO: 30916 - DNA, 279 bp, Zea mays
  Peptide Sequence Number=SeqID_74291
atggcgctcctctctgctgccacgcccatctccctgctcgccctctccatcgccgtgaccctccttgctcctcccaggtccaactgttgtcctccctattccacctcttcaagctcgcctccacctcggctctggtgcatgctcggccaccacgatgtcccagcgccgatgaagctccccctcgcacgtctcccaggagctaagtccgtccgccgtgctatgtgcctcggtctctggtcgaaggacatcggtgccctctgcccttgctcacctctctga

SEQ ID NO: 30917 - DNA, 414 bp, Zea mays
  Peptide Sequence Number=SeqID_74292
atggcatcgcccaatgaccttgctctccacaatggaagaatcctcagcctcctctttgcgcaggggctatctggccattctgattggttgctagggcaagaaggagaggtgtctgactattctacctttgatactgacttcctctcggttggttgtgctggtgatactactgccgctgctgagggaactacctttggaattgttgctgatgcagacactggttctggtgttgatgtccctgaggtcattattgctctatcaatcagatgttggaaggtagggaaggccttctggaacgtggtaccggtgaaagttgtctctgaactcctcctaagtgatggcttcagggtcggcgtgggtggtgagaacatctactccactcacattgggggtggtggtggaggcaacggctag

SEQ ID NO: 30918 - DNA, 243 bp, Zea mays
  Peptide Sequence Number=SeqID_74293
atggcccaagggcacatttccctttcacatgtgtctcaactaaaaaggtgtgtccgagtaccgaaagaagttctaatcaaaccagagatggaaatagagctcgacctatcatacaaagaacaccatgtcaaagtcttggactgcaaggatagatccattcataggaagacaatcaggaagacaaccaaggattatctgaataagaactacctcgagtttctacctaaaggtgttggtacgtag

SEQ ID NO: 30919 - DNA, 366 bp, Zea mays
  Peptide Sequence Number=SeqID_74294
atgtgcaccggtgaagccttcttctccgatgtggtcgattccactattctgatgaggtatagtttgggttcgagctcggggaggcttcacgggactctaggggagctcacggtggagctggattgggcagaacatgaccagagcaggcttaccatggcggccagtgctcggaggcaagggcagcgcgtgtggagcttgtcggagctgggcactggctcgggaaagtgtggcagctggttgagggtgcaacgaagcgcaggcacagacgatatggaggtggccgatcgtggatggggtgcgcgggcgcaggttgggtgcgatcccgtctgccagccgaggtctggcatgtggagacgctcggtgtag

SEQ ID NO: 30920 - DNA, 477 bp, Zea mays
  Peptide Sequence Number=SeqID_74295
atggcctcagggcggacgctgctacaacgagcccctcgcccacgtccccactcgaggggcgaggacaagctatcaaagccaaagagccggaggcccggagcgcggatggtggcggtgatcccgtcggcgacgaggacttcttcagccaccaccaccttagcgccgacgacggaagccatctgcccaccggcagatccccactcggatcctcccggacgggcgagcaccgacctccgcgtagaggcgtcgtaccggagcaaaggcaggacagcccaagaacacgaacgccgccctagcagcgcgcgacgtattgggcggtcctccggtgcgcgcggcgcgataacccgctcgtgcggtgggagggggcattcggagccgagcccagagccagctgagccagcgagccccaacgcgctgaagctgacgacgctcgcgaccgaccggccccgcgttgtcggagtctgcccctcccgctag

SEQ ID NO: 30921 - DNA, 879 bp, Zea mays
  Peptide Sequence Number=SeqID_74296
atggcggggtacggggaagagaaccagaacgccatgaacgggtacgaggaggaagaggaggaagaagaagttgaagaagtcgaggaggtgtacgaagaggaggaggagggggacggggagggggaaggagacgagggggcagccgccgaggcagcagcgatggcggccgagacgagaagtgtcgatggaggccggggcctagcggaggccgttgggaatgttgatgccggaggcgaggatgagagggatgcagattctagcggcggtgacgcttcggggaaggttttcgtagggggtgtagcctgggagacaactgaagaaacattcacaaagcattttcagaagtatggagctataactgattctgtgatcatgaaggacaagcatactaggatgcctcgtggatttggatttgttacattttccgatccgtctgtgcttgacagggttctagaggatgaacatgtcatagatggaaggacggttgaagtcaaaaggactgttccaaaagagctgtcgtcgaaagatggccctaagacaaaaaagatctttgtgggtggtatcccaccatctcttactgaagataaattaaaggagcacttctcatcgtacgggaaggtggttgagcatcagattatgcttgatcatagcactggacgttcacggggctttggatttgtcacatttgaaagcgaggatgctgttgaaagggttatgtcagaggggagaatgcatgatcttggagggaagcaggtcacttctttatctctcattgtgttctgtgttggtaaatatcattggcatccacagcttgcagctcagccagaaaagctgcagcaaggaagtgaaaagtttctacctttcactgatagcatctga

SEQ ID NO: 30922 - DNA, 246 bp, Zea mays
  Peptide Sequence Number=SeqID_74297
atggagaaccacccgggaaaacagtgctaccgcaagggtggaatgggacacccttggccaaatgggttttctcgaactagtggaactttggaaaggcctcgtagtgctaccctgcctcgtctcctcggtagagatcatatgggacttctagaccccttgagaaatggggtagcatggcttgtgggtaaagatgtgcaatctctgcagagtgtaaaactggtatatcagtcgtgctcacagtcatga

SEQ ID NO: 30923 - DNA, 1062 bp, Zea mays
  Peptide Sequence Number=SeqID_74298
atgaacaaagcaagtaaagaaaatcagatgactaccgagacagcgatggtgaacaagaaaatgaggcacttgatcgcagatgttgattctaactttgacagtgacgacgatatcatgggagaggcagtgtatgatgatgaatacctgagaagttgcaaacagaataagccgtcaagtgctttcgaagaggatgaagagttccacttggaagaagatgctgaagatgatgatgaagaagaggaatattcattgagtaccagtgaagatctagaggagctgcaacgacataagaagttggaaactcgtgaccggcgaagtaccaaactgagatcacttggtgaaatccaaaaaggtcttagacgcagcaagcgttctttttgtcctcgtattaactatcgccaatatgattttttggactcggatacggagcctcgaaaggtaaggaaacctaacgcatcagatcctgatgctggctcagatgccgagaatgatatgaagctctcgacatcgggtcaagagcaagaggaggaagaggatgatagtcatggtggacaaaatggcaataacgcgaatgataaaatggaggaaggccacactgcagcagaaaataaaaatagaaccagaagaagaggagaaggagcagacacaacagcagccgcccgcctcgaccagccctgcacccaggcgccgatcgacgccgctaggccgactgcccctgcgcgccccgaagctgcaggaccgcacccaaagcaccgagtcgtgaccccgatgccgcgccgctccacgaagccccagccgcgcaagcctcgcagacccgaccgcgcccagcttctcgccgcgacctcgctacccagcccgacgcgcacaccgcccctgcctgcgcgaccaacgccactcgccgagcaggaccgcgcagccgtcaggagccgagacgcacgccgcacgcccgagcccgacgcgttgcaaaccgaagaccgacgcgaccccgacactgaagactccacgacagagcagccccgtccgttcgtttcacgtgtaatggagatttactgcgtccgttaa

SEQ ID NO: 30924 - DNA, 768 bp, Zea mays
  Peptide Sequence Number=SeqID_74299
atgttgttcacacctatcacagagctagatcctcggaacataaatgttgtgataagagtccgtgtcattagaaaatgggaattccgaggtgcaacgaatgacggtcctctacgccatatcaatttgattttagctgatgagcagggaacagccatccacgctgagattccagcagccttagccactgaaaaggggtcactagtgcagatgatgcctctcttaaaatcacgctttggggcagatcaagcatcaggtttctctactgacaatgtctgcaatcaaggcaataacaaacctattgtcataatgttttttggatgcttagctaagcaattcaaaggccaatcatatctaagcggcactgcagcaactacatggtacttcaatccagacattcccgaggcacaggaatactacatcaaaaaaagaaaaaacgggtacccgaattccgggtacccgtatccgacccgaatatccggccacagggctttaagtgcaccgccactatatcacgactcatacaagatagcaaatggtggtttccatcttgcaccaaatgcaaaaagtcttcacctcaaacctccactggataccgctgttcgacgcgtcttagagtattacgatgcatccaagaattcagagaacgttgacgagtatacagaccggctaaccaacaatgaattgtcatcaccaaccaaaaggataaagcacacccaggttagcaaagccatgccagattctacatgttccaagaatgacaacatttag

SEQ ID NO: 30925 - DNA, 927 bp, Zea mays
  Peptide Sequence Number=SeqID_74300
atgtcgtgggggcacatcgcctgtcagaagggtggacaggcagcgtgtcctttccgcaataaatgtgcggcccagagcccttacgtcatgctccgcccgctggcctacgtcacggacaataagccatgtggcagcattagaccctcgaccgagtggggagcggaggcgctacggatagagcctggacacgcgtcaataccgaactcatgcctaggtcacggcacttcttctcacgggaccttgttatgggtggtccggagctcacttggtggggtccgaaccctatccaatggctccgggctgctttacttcgggggtccgggttgtgcgtacaggggtcctgtgccttctgggcccgatggcgttgtctccgagaacgccaccttaactgctcacgagatactcctggggctgttctccacgcggctaagggtagccgcacaggcatcgtgtcttcataccgtagcaaggggtacccctaatccagggtaccgacaaggcttggaagaacaagccttcgtgaatgacaatatggcatggatgataactaatgagcagtggagtagtggttgtcgaccgcggtggcatcggaggatcctcggcttcgcgggtgggctggacctctgcgacggccactacgacatgttgtgccactcgttgttctggacgcccgatgacgcgcaccacaacgacttccaccagcccaacttcacgattgctgtcatcgccaagggcgggctgaaggagccatgcatgcacgagatccactgcttcctcgaggtctccatggcattggatgtgctctacaacttcgagcaatggtggcacaagcagggtggcaaggacctgctcatccagggaggcacgaaattcgtgcggccatcttcagagtccagaagctactgctggtttaagtgtaggacctag

SEQ ID NO: 30926 - DNA, 486 bp, Zea mays
  Peptide Sequence Number=SeqID_74301
atggcgcaccggacagtgtccggtgcgccaaccacgtcaccaggccgttgggttccgaccattggagctctgactgctgggcccgcctggatgtccggtggcacaccggacatgtattgtagagtgtccggaaataggtgtaagcctaattccctttcagctacactgctccggaccattccatggaacgagctcccgttctttggaaccgcccccaggctgtcggacctccctgctttcgtaaaggaggtcctaaactctatagcaaagttggcatccctcgggttggcatatttccatcgccttgaggggttcctccctgctgggggagaggttgcggatcccctcttggttcagtactttgccgcaggattaggtcccgaccctgggttccctactgtgcacgaaccgtcggccatagtacttgggcgcctggttacgatgtgcatttcaggatgcaacttgacacctgagtccgctgcttga

SEQ ID NO: 30927 - DNA, 483 bp, Zea mays
  Peptide Sequence Number=SeqID_74302
atgtcgtgggggcacatcgcctgtcagaagggtggacaggcggtgtgtcctttccgcaataaatgcgcgacccagagcccttacgtcatgctccgcccgctagcctacgtcacggacaataagccatgtggaagcattagaccctcgaccgagtggggagcggaggcgctccggatagagcctggacacgcgtcaataccggacccatgcctaggtcacgtcacttcctctcccgggaccttgttatgggtggtccggagctcacttgatggggtccgaaccctatccaatggctctgggctgctttacttcggggggtccgggttgtgcgtacaggggtcctatgccttttgggcccgatggcattgtctccgagaacgccaccttaactgctcacgagatactcctggggctgttctccgtgcggctaagggtagccgcacaggcatcgtgccttcataccgtagcaaggggtacccctaa

SEQ ID NO: 30928 - DNA, 513 bp, Zea mays
  Peptide Sequence Number=SeqID_74303
atggcggccacctctgcaccggtggctcaccggcgacggtggctgcctcaccgcgtgcagaaaggtcctcgcccccttcctcctacgggggtgaggacaagaccatccaagaatgcggacgccacctccgcggcgtacgacgtcttgtacaaccccctgggcggcatcagagcagggcggccagttgcgcagggaacgccacggatgcggcagacctgcgcacggcgcgaccgtcgcccgtgcggtggacgaacacccgcaccccatttggcggcgggaggcggcgctggaggcggtgccgaagccatccaagctaaggagctagacacgcggcagctgacggcgcctgcagccggccggccccgcgtagccaaagttcgcctcctccgcaaggctggtgaacatccttctcctccaaatgctagaggaagaagcgggtcaccatcccttgcggaaggcaggaccccaactcggctcgccttccaccccagcgaggatgatgaacatccttga

SEQ ID NO: 30929 - DNA, 318 bp, Zea mays
  Peptide Sequence Number=SeqID_74304
atgaatccatgtttcctacttcaaaccccgaacaaactccatgagcaggaggcattcgcgttgtcgtcgctcatcgatgacgagaagaagcttgacgactgggggtactacctcgctgatgagcccggggtgcacttcgtttggcagcccaaccaagagtcatcggtactcgtcatgttgcgtgcgttcgacgactactatatcgaggattgtggcgtgatcttggcgccggaggtgacacagaggaggatcgacaacagtgaccagttcgtcatcctcgccaccgtcaaggtagcttttgtgccggcctgcctttaa

SEQ ID NO: 30930 - DNA, 960 bp, Zea mays
  Peptide Sequence Number=SeqID_74305
atgcccgcagtttcagctgccaccggcgcgtcgtcacctccggcggcggccaacgccgtcgtggaggacatctacggcttcctgcgcgtcctaggtgacggcaccgtcctccggtcaccggaggaacccgcgttctgcccggcctccttccccagcagccacccgtccgtgcaatggaaggaggccgtctacgacaagcccaacaacctccgcgtccgcatgtacaagccgtccgcggccggccggacgagggagaagctgccggtgctcgtgcacttccacggcggcggcttctgcctggggtcgtgcacgtgggcgaacgtgcacgccttctgcctccgcctcgccgcggaggccggcgccgtcgtgctctccgcgggtcgtccgccgccgccgacggatggctcgccgaggccgccgacttcggcccgcgtgttcgtcaccggcgactcggcgggcggcaacatagcgcaccacctggccgtgcgcgccgaggccgacgccgacgtcgacgtcctccgcccggtcacggtgcggggctacgtgctcctgatgccgttcttcggcggcgtccggcggacgcggtcggaggccaagtgccccgccgaggtgctcctgaacctggacctgttcgaccggttctggcggctggcgctgccgcccggcgccaccagggaccacccggccgcgaacccgttcgggccggacagccccgacctgggctcggtgcacttccgggcgccgctcctggtggtggtcggtggcctcgacatgatgcgcgaccgcaccgtcgactacgcgcagcgtctggcggccatgggcaagcccgtggagctcgtcgagttcgccggcaagccccacgggttctacctgcacgagccggggtccgaggccaccggcgagctgatcggcctcgtcagccgattcctgcgcagttgcgaggcgcgcgcgggtgcttga

SEQ ID NO: 30931 - DNA, 255 bp, Zea mays
  Peptide Sequence Number=SeqID_74306
atgggcggcctcctacttgagctgaagctgcttgattgttttggcaagttactaggacaggaaggcgaggtgcctagttgttctgacgcgggtaatgatttcctccctactcgttgttctgatggtactgctgctactactgagggaactgcctctggtactgctgctggtgctgatgctggtgaccttgaggtcattattgctctgtcaatcaaatgctggaaggtggggaaagtgtggttcatcagctggtag

SEQ ID NO: 30932 - DNA, 267 bp, Zea mays
  Peptide Sequence Number=SeqID_74307
atggccagcccctctcccgtcctcctccgtgcgatccaagccctcagagagcttcctgaattaaataagaaaaccactcaaaacccaatattaggaggaaaaataggaatattgtttgaccaggactgtaatcttgctgacggagagtacatcctcgtgccggagcaaggagctgctcaggaggtagccccagatccagcacccgagcctgcaccagaggacctgcctgccactgctttggaaggcaagccccggttttatgcataa

SEQ ID NO: 30933 - DNA, 447 bp, Zea mays
  Peptide Sequence Number=SeqID_74308
atggctgtgtggtcggggcgagcagcgcctagggagtggggggcaccatggagaggagggtcgagctgctgcaatccatggacatggagccaacttcactgcgtggaagaggaacagggagggcactctgccacgataatagcaggggagtggaggtcggtcgtcgacccagacacggccatggagctgtgctcggccatgggagaaaaactgcaggggagggttggcgcctggtcagccgagcgccatgggcaaactagagaggctgctggcttcttgctgccggagaacagggggacagagggaggcgacccatggctggcgtcgagtgagtctggcgacctgcagggagggagcgccatggggaagctcgggcttgagccatggagaagggaggaagaaagggcgccctgctgctgcgcgtgggagaaggaggaagaaggctaa

SEQ ID NO: 30934 - DNA, 657 bp, Zea mays
  Peptide Sequence Number=SeqID_74309
atgagggtggaatgggacacccttagatggttaattagaggaaccaaaggagtagttggcttcgccatggctcgtattagatgctttgcacgtaagtcagtgatcccctttttgccctctcgcctggtggagtgcccactgcgccgcactgtgacagaccagtgggagtctacttgcttggtgcgccatccgaacgatgatctccggggtgcagaggccttctcagagcactattctattactgagagggacactaccaaggcagccatgcaagatgctacacgacgtgcacttttgcagtattgctcgttgttcagtggtgttgttgacggccttgacatcaagtactaccatcatcgttcgaccgacagtgctagaggtgtgattgtctcgcccgttggtgagggcaatcccaggttgaacaacatggtcaacctggttacagtgctcaataacgagctggaccacgcccttgatgagttgggcaaggttcaggcagaggttgcggaattgcatgatgagcgcgcaacgtgccactatcagaatggtggttctcccgcccctgtcgggattctgcacccttaccgttcgccgccccgtggtcgctttgattatggcacccctgagtgcaggacccagatagatttagatccatag

SEQ ID NO: 30935 - DNA, 174 bp, Zea mays
  Peptide Sequence Number=SeqID_74310
atgaccaagatctctgtgacacagttgaagctgtttcagaagcaattcagtggtgaacagtggactgaagaagatcttacgttctctgaacctgccgccggtgatccctgcgccatgatccacgtcggctttatgattcatgcgcagggtgaagtgggtaacaccagagggtaa

SEQ ID NO: 30936 - DNA, 351 bp, Zea mays
  Peptide Sequence Number=SeqID_74311
atggcaataacatggaggagctgggagcacgtcgtgcaatgggatgtgccctgctattcatccacggatagaggcaccaaaaaagggctcggctgtgaggaagaggagtgcctgcacctagggagacgagtgaagggggtggaggtgagggccaacgatggagggaggcagcctagaagggagcaggaaggggtgttgccctgctggcttgaggaagggaggtgttggagtcttcttctcggtcgaaggtcctcaagacaaaaaaagctttggcaaagtgatacagaggtcatcttttcctttgccgaggatactcaagacaaagaccttgcgtacaagcaatattgctaa

SEQ ID NO: 30937 - DNA, 174 bp, Zea mays
  Peptide Sequence Number=SeqID_74312
atggagcatcgcgggttcgtggtgaatccgtccgtggtcttggcggggcgaatcaagagtcggtgcatgaggaattgctcatcggcgtgtcaccgacgacggaaatcgcaccgtcccgtgggcagcctcttcctcgcctctatacctgaaaattcatatgaactccaaatttaa

SEQ ID NO: 30938 - DNA, 852 bp, Zea mays
  Peptide Sequence Number=SeqID_74313
atgactgtcctcactgccgacgactcccttcaccgtgattcgtgctaccaacgtcccgattcgtgcccagggtggatggataacctcgtggggatgatgtggcaaaaagtgggtgggatgttttcgaaaataaaacttgatggtggatccatcacggccgtgatgggttcaacatcggaaaagatgtacctctgccaggtgaggaagcgacaaatttttgttgcttctgctctaaggtggtgccaaaggaagaacgcaaggaatgaagtgcgggaggaaaggatcctccatttaggacttttgtgtaaaaacttatcgggaggagtttttgcctcccttgaaagtagcagtggtagcaacgatcctatcggggatctggaagcacaagtcgaactgcttcaatcagaactccgtcacaggaatgatctatgggtcgcagatggtgaaagaataaacacattgagagcagccatccgctacttgcaagaccaacttgcgaaacgagatctagcgctcgattgggcggttaactctcgtccattcgcctgggctaaggaagccaaagctcgagcccgcgtggagaagcttagctcagccatggataacttgcaggtctcttataatacactacatgaagaagttcatgtgttgtattcacaactgcacccgaacgtccctgcggatcctgccgggatggaagccggaccttctcatgtagcgggagaagcacttgatggtgaactggaccttttcaggccccctccctctatgaagttggttgacgaatggtcttccccgcccgacagtaaagctaccaaaagtgaaaagaagtggcttatcaagtgcccgtaa

SEQ ID NO: 30939 - DNA, 309 bp, Zea mays
  Peptide Sequence Number=SeqID_74314
atgaagccccatcgccggtgcccagccgtctctgctctgtgccgaccaaagtcactcctgtttatgatattaatgttccaaatgggatgtcttatgttgggtgctggtcgtggtcgacaggaacgggggcatctggcaagctcttatagttccggctcaggcagattggatacgggcatagttcccaaagctttaccctgtagtctggactataagttggttacgcatttgcgtaatgaggactctagggagaagcctcgtagtgagaccctagccattcacctcggaagtgaatacgggtctagctaa

SEQ ID NO: 30940 - DNA, 630 bp, Zea mays
  Peptide Sequence Number=SeqID_74315
atggcctcccgtgtagtggagaccgacagtagaagtcgtgcacctcagtcacaggtggagcagttgcatcagagtctagatgtgtccttcaatgagcggtgtattgacgcagcccatattcttgagttgctggcagaaaataagcagcttcagaaggaattggtggagcagaaggaacgcctggcagcaaccatgcgatcccaggaggtagcttttgtccgtgaggaccacttgaggggccgtttccaggatttggttatagcttgtaacaatctagaggattactccaatgagctgcatgaggaatttcaccatctttactaccagctacaccccaatgacgcgtcaggagccgcgaaagcagaaggtggtgttgtgctagctgatgggggtgagcctgatgcagacttagaagaagcagctcctatgctcgtactaggtggtgagtctccaggatgtattgatgcttctgaggtagctagtgatacagatggctatgtcgattttggtattgtaatgaataaaactccatttacctgcctcatgtataaaagtctttatttgcggcacaacaacttcacgaaactgccagtacttggtggtccaactttgtcgccatacaacctctag

SEQ ID NO: 30941 - DNA, 702 bp, Zea mays
  Peptide Sequence Number=SeqID_74316
atggccgtgatggattcaacattggaaaagatgtacctctgccaggaccgtgccaatgtaggcttgctgaccgaggaccctttaactggtcccatgcctcgtcatggcgcggcccccgctccgggccgcggcgcggccgcgcccgcccttccccggcgttcgcccgccccagccccctccctgcgcggcgcgctcgacgcgtccgcccgccccggcgcgctcccccgccccctgcccctgtccagcgcgtggcccacggccacggcgctcgccgtcccggcgcgcggccccatcccctgcccgcggcgctgcgtccctgccccgcccggcgagctcccctgtccgcgaccccagcgccccgacctcggcggcctccgcagcgcgcccggcccgccctggcctcgctccgttccggccgcggtgtgcctgccacgcgcggcgcggcgccctgcgcgcgccctcggcctcggcccggccccggcgtctcgccccgcccctgcgcagcgcggccccggctcggcgcggcttcggctcgcgcggccgtgttgcccctgcgtagcatggcgcgtgcgcagctcggccccggtgtgtgcgcgacccgttcgcgacgcgtcagcgcggccttgcgcgcgcgtgctcgcgtggtgtgtgtggtgctttggcacatctcgccgtgccctcggcgcgctcatctacccctag

SEQ ID NO: 30942 - DNA, 84 bp, Zea mays
  Peptide Sequence Number=SeqID_74317
atggcgggtgtcctcgtggaggccttttgcgctgccattatcggagctagcagagcagggctaaataaatctattagcggctaa

SEQ ID NO: 30943 - DNA, 330 bp, Zea mays
  Peptide Sequence Number=SeqID_74318
atgatcggagcagcgaatgcggatttccctgattccccggcggcgcgattcgagctccccactgctccctctctctcgggcaacggcgatggcgacggactggatgagatgaagcacctgctccgtagtcccaccaatcagcggttcaatgagctgaggcaagcgcgtcgccagataggacccagccccgagcgattcctacgcagccgcggttccactggacagacgcctgggagcgacgcccgcgcgactcgagagagggaagaagaagcagtgcggcgcggccagattaaatattcaaaccaaatattccaatatgaaaagatgtga

SEQ ID NO: 30944 - DNA, 1269 bp, Zea mays
  Peptide Sequence Number=SeqID_74319
atggttgccttccaagggggtcaccctccttttaaaggcaactctccccacttgcgtcctcagccgtcgcggactgagtcttctccaacacgctccaaggtcttccacctacgacacaagggctgggtcccacgcgtcatgcaagctgacccaggacagaaggagccaaaaccgccgcgcacggtgcacgcgactgcccagcggttacaagcattcctccacttccgcccagaccagcgggtgaaagagcggaccgccatgcaggcggcatgcaaccgcaccaaggggcgcaccctttcgacttcgacgcgtccagcatggaggcccaggcccacacgtcatataaccgacgcgccggttactacgtgcaagaaactgcaccgccactcgcgccagtaccgcgccttctcgactgcggaaccggtgccacgactcgaggcgaccctgcgcatgacccaacagtgccaaccgagcacatcggtcacgagtcagtcagccgcgggagaaggcacgacggtcgatacggccagaaatgggccggcagcaatggcggtggcaggcgggcggaagcagcggtcaagtcgtcagcaagctcacgtcccctcctgggacagcgagagaaccctctcccacggcgtgaagacgacgcgcccgtgttccgttcctcgaacggctcgcgcacgcacaacggccgccccgcgagccactcaccccgtcgcattaattctgcggcaggacaggcggcacctttggcaggcgaagcaggcgacgcttcacctccgccataatgaccgcgtcaaaaaagggaccgggaaaggggatactccgaaagggatccttctccgtgaaggaagcgagccccgagcccccctactgatcagaggttcgaaggctggcccctcggaagggttcaacagccgcctcagagcactcgggctccgcgcccactactggtcagaggttcgaaggctggcccctcggaagggttcaatagccgtctcaggccactcgggctccgcgcccactactgatcaggggttcgtaggctggcccccgaagggttctgacagccgcctcagagcatgcagagcgagggatgaccctgggtacgttcgatacataaccaaggctcgggctacgctcccaagagtgaggctgacagcaaccaagtccagcctcaggcgccataggaagctccgcctcgcccgaccccagggctcgacccccgtctcagcctcggacgatggactccgcctcgcccgaccctag

SEQ ID NO: 30945 - DNA, 201 bp, Zea mays
  Peptide Sequence Number=SeqID_74320
atggacgccggatcagtcctccacctcgccgatcagattgacaaggacaatgggtcaagacgagaggcgggagaggacaagtcctacagggacgcactcggacccgagtttcactatctaggttcttgggaagcagagcacgtcagcgaaggggagggccaggtcgtggatgcagctattgacgaaattgacaaggactag

SEQ ID NO: 30946 - DNA, 603 bp, Zea mays
  Peptide Sequence Number=SeqID_74321
atggcggcacccaacgaccccaatctataccaccatgcatcgcagctctctccgtgggcacgtccgtaccatcctggccgcgtcatcctagtacaatggtcgccgccacctcgtggttggtacaagctcaactttgatggatccgtctaccatgatggctcagcgcgagccagtattggtggcgccatccgtgacagcgacggtcgtgtcgtgctcgcattcgctgagcccacggagcactccacggtgggcatagtggaggcgcgcgcgatggctcgaggcctttgcctggcgcttgggcttaacctgcagcgggtggtggtcgagggcgacgatctcgtgcttgtgcggctgctccgcagcgaggacacgcagacacggatccccgtggcgctgcaggaggagatccacgagctgcttcgctgttttgaaggatgcgatgtgaggcatgtgtaccgggaggggaaccaggtggcacacaccctttgccgtcaggcctaccactgccccggcgtgtgggtagggactgtaccgtttgtcgtgtttgacaaggccgaggaggaccgacgtggcgtgttgcatgagcgcgcggtggtccgatga

SEQ ID NO: 30947 - DNA, 738 bp, Zea mays
  Peptide Sequence Number=SeqID_74322
atggaagaaaaacacctccacgtgttcgacgcttcctacccgcgccagagcacgctcgcgcgcgcccccgcatgcccagtgccgcgcccgagccaagccagcgccatggcccgcgcccgcgcctataaaaccctcccagacttcgactgcactcttccgcgcaccctcaagcctcaccggagtccagctcgccgtcgtttgcccgtgcgcagcgtgtccgcggccgcccaatccctctgtcaccgtagaccggccagtagagccattcccaactccgtccagccctcggagaagactgtgcacacctccgtgaagctccccgagcgaggaatcggagtttgcttcgccggagaggccagtccacgctcgccggagctctcaaccccgccggagtacgtggaccgggtaaaccactccaccatccttcgattccttgtgcacacggtcgctacgttaccccgtgaagctcaccgtgccctcggattgaaccagttcgccgtggtttggccggtacactcgccgccgacgaggacacccgcctgcgcgcgtggaccgggcgattccggccatccccgacgtcaagtcgtacctcgacgtgaccgccggagcctccccgagccaaccccacccttcgccggacctccctcgccgccgatcgactatgaaccggacatccgatcgacaaaccagaagcgtggtgacgaagctcttgcagagccggtcactgcgacattctag

SEQ ID NO: 30948 - DNA, 963 bp, Zea mays
  Peptide Sequence Number=SeqID_74323
atggcagacacggtcacgggcagttcaaggaggtcacaagatgacactgcaacattaatcccacacagtggcaatttgggaggatcaagccggaagggcgtgaaggccgccaggttcaaagatgatgatgaggttgtggagatcaccatcgtacagcgcgattccatggcaatcgaagatgtcagggtagtcgatgatggcggctcagggcatggtggtgggtttgacggcctgtcacttgtgtcaccttcctcgtcaaggagcggcaagctagcatcaaagtttaggcaggtgaaaaatgggctaaagatgaataactcaagcaataaggcgccacagacacagttgggaaagaacgtgaggaagagattggacagaagcaagagcggtgctgctgttgcgctcaagggcttgcagtttgtgactgcgaaagttggtcatgatggctgggctgcagtggagaaacggttcaaccagctacaagttgatggcgtgctgctacgttcgagattcgggaaatgcattggtaatttcagtggtcctattgaattcgtatctgcatacagctatttgaacaacactaatacaagcattgctttggattgtgcagggatggatggatctgatgagtttgcaatgcaagtcttcgattcattagcaaggaagagagggataacgaagcaggtgctgactaaggatgagctgaaagatttctgggaccaactaagtgatcagggttttgacaaccgtctgcggacattctttgatatggttgacaagaatgctgatggaaggatcacagcagaggaggttaaggagatcattagcctcagtgcatcagcaaacaagctttccaaactcaaggaacgagctgatgagtacacagcactcattatggaagaacttgaccgtgacaacctgggatacattgaggtctatcaaatgccctattcttactcataa

SEQ ID NO: 30949 - DNA, 207 bp, Zea mays
  Peptide Sequence Number=SeqID_74324
atgcaggaatcccttgcaggaccgccatcgcagcaaaatcctcccgagggcctccctacactgaccactcccctactgcccttgcccctttcggattttataattctctggactgggcacatgataaccagagaacacaggggcaatggcgcaagtattcctaagacacagagttacagccgcatggatggcgggttgaatgtatga

SEQ ID NO: 30950 - DNA, 366 bp, Zea mays
  Peptide Sequence Number=SeqID_74325
atggcgagagtagcgtgtaccctatgtggcaagaggctggacggtggtgtatctgtgctgttggttggcgtgaacctggtctgggttgtccaaggtcctttggacaagaacaactgcagggaggagtcgaggaagtgcctggctcgcgtggtttttgttcctggttctgatggcttcgtagcacgcgatccggttcagttgcaatcggtagcaatgtcgggctcgtcggccgcagaggaggacatagtgcagcacctatcgtccaatttcaacccgtcttcgtcgatgctcgccaagctcgaggctcggatgaccggcaaggcagtctccgcgccatcgtcaccgccgcaggcaggattcgtttag

SEQ ID NO: 30951 - DNA, 564 bp, Zea mays
  Peptide Sequence Number=SeqID_74326
atgcagtacaatggatcaagcagtctcattagctgcgagaagcagacgattcgaatcgagttttatccttgcaagatcagggctcaccgccttggcgtacaatgcctcactgaccccgactgccgtcgtgcagtgaccgcacttgtacccaccataaccggaatgggagacctcgtctcaggtcgcgtgaggggatatgtctgcgggcagcttgctgcacgggtcggcggtggagctcgctgcgcgacgagtgagcgaggtagtggcagcggcggcgacgtccgacagcaatgcaagggaggagcacgctgccgggggctgctcgccatgggtgccgagcatagggggcggctgggaggcgctgaaacttgctgttttggggagggcgtcggcaaatgggcttcaacggtggagcgctcggcccagggagctagacggcgcggggaagaaaggttttgcgcacaaaggcgactgagcggagatggggcgctggctgggagagggcagaggtgggcgagctgctgctggtggccatggagcaaggagaacagcgagctcggctag

SEQ ID NO: 30952 - DNA, 546 bp, Zea mays
  Peptide Sequence Number=SeqID_74327
atggcaatagcatggcaggctcgggttaacgacgatcatcaatgcgacgacagcacggccacgtcgcggcgcaagtggatgggacgacagagcggccacacggaaataactaacggagaaaaccgagtaacatggcgaagcctggccacgctactcctcctggtcctctcctgcggaagcaataacccacttgaccgtctatcccggagggcgtggctcgctgcggcgattcgtcgagcactcaacgcgcgaggcgaaggagcatgctgctgcggcgtgcagcttgctgcgcgggtcggcggtggagctcgctgcgcaacgagtgagcgaggtagtggcagcggcggcgacgtccgacaacaatgcaagggaggagctcgctgccgggggctgctcgccatgggtgccgagcatagggggcggctgggaggcgctgaaacttgctgttttggggagggcgtcggcaaatgggcttcaacggtggagcgctcggccagggagctagacggcgcggggaagaaaggttttgcgcacaaaggcgactga

SEQ ID NO: 30953 - DNA, 498 bp, Zea mays
  Peptide Sequence Number=SeqID_74328
atgggtgtagcccccgaccttcaaatggattttttaaagacaatccattcgaaggtcttccttccgcttgtggaaactggcatgaagctactttgcattatgcttttgaggtattcactgcatgctctgcacggatgtgaccgtttgaaaaatatactgataattcctgggcgtcccccccaatgggtgtgggcaagggacggcttggggatagccgcggaggtctggacatacatccgggccgtcgagcgcgccgggctcgaaggctcggatgagtcggagtactcctcggatgaggaggactcggacggcggcgacgagggtgaagacgacgacgacgacgacgacgacgacgacgacgacgacggcagcggcaggggcggcggcgacggcagcagggacagcaccaagggcgacagcagcaggggcagcaccaagggcagcagcaggggcagcaccaagggcggcggcggcggcaggggcagggccagtggctaa

SEQ ID NO: 30954 - DNA, 453 bp, Zea mays
  Peptide Sequence Number=SeqID_74329
atgggggccagctgcacggctagctcagttcagctcatctcgctgattagtcatcagatttggaccgtacgcatgtgttggcgtcggcggtgccagcggctggctgcctctgcctgtgcctggccggcctccgtggctactttcctccttgtttgtttatgcatccccatgcatgcatggagccgagatccgtggccaagttcgaattcgaaaagcggcgctttcgttcgggcacgggcggcggctccgtcgccggcgagcggcatcaatgggcctcacgggctcctgcagggaaggcttggcctcggcggcgcgcgcgacacggcatggcatggccgcgctcgtgagtcgtctcgcatgctcgtcgcgttgccccagctcccaggtcgttcgtactgcacgaatggtcggatgaatcgctcgccaaagctccgcgtcgaggacctagcgtga

SEQ ID NO: 30955 - DNA, 441 bp, Zea mays
  Peptide Sequence Number=SeqID_74330
atgtcggccaatgagcctgaagatggatggactaagcggatgtcaaaacgaaagttgatcgtcaagtggccttcatctaacaacactaacatagtgtttatttcaggcaagccccggacttgtaatggtgagcgcatcatctgcagtgatgaattcatcattcaagtatggtacctctgtcagaatttatttccgctgcaaatgatggtgtgtgatttgtgtttacttaatcttgcgatcttggcgctgtctgaggtctttgagacaaggacaggtgcatgtgggcccgataacttgggaggttctgcgacagctggctgcgatgtggagtatttactttttgggattcagtaccccatggatgtgtatgggtatacagacatgagaatactgagaagtgtaatgtctttgcaacgacgcacctacgctcaggtacactaa

SEQ ID NO: 30956 - DNA, 60 bp, Zea mays
  Peptide Sequence Number=SeqID_74331
atgagaatactgagaagtgtaatgtctttgcaacgacgcacctacgctcaggtacactaa

SEQ ID NO: 30957 - DNA, 501 bp, Zea mays
  Peptide Sequence Number=SeqID_74332
atggcctccacctcggaggccaacatcactggagcgctggaggcccaggcaaagacgatggccgcgcggtccaagcttctgcaacagattagtgatcgactcgacgcccaggatcgtcaccgggaagcgttggagaggacggtgccggccaactcccattctatcagcgccttaccgacgaaggtagacaacgtcgacgcagcgaccgttcgcgcggacatgtccaggacgctgcaggcgcagctcgacgtgcacgtcgccgagttggcggcgaccacatgggagcgcatcgacgccgttgaatccacttccacgctctccacccgtgtggcagcgctggaaacatcaaccgcaacgttcgagatgtggaggccttccgtcgagcactctgtggggcgtgctctcttctgccgtggaagcactgcgcgcgatcggacgtgtcgcgcctgtcgcatacaaggaatcgtgagacgcagtacttctaccgtccaggcattctag

SEQ ID NO: 30958 - DNA, 153 bp, Zea mays
  Peptide Sequence Number=SeqID_74333
atggccgctgcaccagccgagtccctccccatgtcagctgcaagcacgccgtgcttccttcccatggccgtctgcagcttctcccatgattggaagagagttctagggaaaatcaatggagaagaaaccgtgtttcagttcgacgcgctctag

SEQ ID NO: 30959 - DNA, 303 bp, Zea mays
  Peptide Sequence Number=SeqID_74334
atggaaaggagaggaggaggatgtgagtactaccggcgagaagtggacaccgacggaatggcgccgtctggttgtgatgatgctcttaattcctgggaagatgaagtggctcttcaacgtcaatttcccaactctgccgcttgggggcaagcagccgctgaagagggagggaatgtcagcagaccgactattaaggatggcgggaacacaaaattagaagaggaagcaagaaacctgccagtgttgggccgacgtgtgccaaagcccaatgggtgttatcctgctagtgtgtggtccaagtag

SEQ ID NO: 30960 - DNA, 246 bp, Zea mays
  Peptide Sequence Number=SeqID_74335
atgccccgttccgttttagtgtttttaccaatggagttgaggagcgctcttatcagaagctcaagtgggcagttacgtcggctttttggcctgcttcatctatctgaactcaaggaagtctggctgaagggctcctacgaggaaacgctgaagcatgacctagaggtccagcttgcagcccacccaaacaatcctgtgctgaaactggggaaaaatacgctgtgtacgctatcttggatggcgtag

SEQ ID NO: 30961 - DNA, 339 bp, Zea mays
  Peptide Sequence Number=SeqID_74336
atgtttgcccctagtggagtcgcccatgggtatgtagacgccgtcagcgaagatgatgtgacaaactttggcgttgcctttagagatgggcacaccgacgtccaggatgtggtgataaaattggcaggcaatgctgcccatggagatggtgacgttggttgccaggatgatgtgacgaaggtggcatgcgacgcaacccatggagatggggacgctggttgccaggacggcgtgacaaaggtggcatgcggcgcatcccataggaacaccggttgccaggacgacatgacgaaggtggcatgcggtgcaacccatggagatggagacgtcggttgctag

SEQ ID NO: 30962 - DNA, 297 bp, Zea mays
  Peptide Sequence Number=SeqID_74337
atggggaagcatgtcccatcactcctcatgctcctcctcagccgagtgaccacacttgtacccaccataaccggaatgggagacctcgtctcaggtcgcgtgaggagggcaatctgctgccaggttcactcaggtcgtctaccaactgcatcttgtgggtggcaccacatcactggctcgatcatcatctctcggtcctatatgaggtgcaagatgcctatgtatgaatataatgaaagtagcacaaaaatagcacaagatatactaagacacagtggcgaactaaacattaattag

SEQ ID NO: 30963 - DNA, 609 bp, Zea mays
  Peptide Sequence Number=SeqID_74338
atggacaaagggaaatcggtggtggccgagctggtggcgtcgttcagcgatgtccgtgtcacgccgcgccagccgccagaaccccaagccaagagcttcctaccgtcgccctccttcttgacagctactgcaccccttgttaatttgaaacactcaaaaaggactgactggcctgcacgtcttctccagttctattttgctgccagttcagagtttggacactgcttggacttggagtggcatttcaagccagctaagggtccagatccaccatccatggctgtgcttccaacgcgtcaggatcccttattaaatatcccggcagcgccttctccactccctgctggccgtcttgagcatgagcatgatggacctactccttttctttttccagccaggagaatcaacaacttggcccttgcaagcacggtgcttccaaaacgtgtgccgctccatttattacagaaaataacaaatgatttctctaaggaccgtgaacttggttccggtgcatacggaaaagtttacaagggttacctggccctacatatattcatggacagagtaccattttctgctctgcagctacttgcattaacccatgcttaa

SEQ ID NO: 30964 - DNA, 291 bp, Zea mays
  Peptide Sequence Number=SeqID_74339
atgtcgctcttggtgtctaacgcgtcaaccgaggtgctcgtggaccccttggggttaactttgtctcagagtcgatcacacaacgtaggtgccctctctctggtgggcgcgggatggattgaggcctccctctcgaaacaagagggtcctgctggtgactcgaggtgtgatcccagagtcgagaggccgagctctcggtctgctggacagcggcgcattctaggagctccaaagttcgccgtggatgcgatgtccctcggtggtagagggctccagcaaggtgtagagtaa

SEQ ID NO: 30965 - DNA, 369 bp, Zea mays
  Peptide Sequence Number=SeqID_74340
atgagcaagaacacaagagacacaagatttatcccgaggttcggtcacacccacaaggtgccctacttcctcgttgaggcgcccacaaagagccgggtctctttcaaccctaatcctcccttgccgaccacaaagtaccaaagctcgaatcaagaagagcaagagggatttagagatgaagcaccaaaatcgcagctcttcaatctcactcaaagatttctctccaaagatttgaaatgggagaggcaagagcagactggcagaaaaagtgaacagcgcaaaaaccggttgaacctgtttccaccagacaaaaaccggttgagtgtccggttgagtgtccggctgaaccagtattttccaaaaaggtga

SEQ ID NO: 30966 - DNA, 555 bp, Zea mays
  Peptide Sequence Number=SeqID_74341
atgtccaaaccggacaaaactttccccctccttatcctcccggtgctccccagccttcataaccctggggttggaccgcatacgtatacgtatgagcatgaggaaagttatgaagaaaatatttgtagggacttgaaaaatgattctgaagatgtcagcgaactacagcgtggtggggacgctgagaacccgaacgtcactggcggtgacacgctcctggacgaagtgcaggtcgatctccacgtgcttcgtgcgctgatgctgcatgagattggtggagaggtagactgcgctgatgttgtcgcagtagatgagggtggcgcgctggaggggactgtggagctcgtggaggagctgtcacagccaggaggcctctgccacgccgttggccacggcgcggtactcggccttagcactagagtgagagacgacgggctgccgcttggcggcctaggagacgagcttggcacccaggaacacggcgtaaccgaaggtggatcgacgtgtgtctggacagccagcccagttggcgtcagtgtagaccacgagttatga

SEQ ID NO: 30967 - DNA, 213 bp, Zea mays
  Peptide Sequence Number=SeqID_74342
atggcccctccaggcgtggatcgcgggaatccggtaaaggcggtcgcgcttcgcccaccacaaggaaacgaaatcccgatcaggacggggaaggaggataaagctgtcaccagggacccatgcgtcggcgacagagttgacccgtgcgcggatgagaggagactgacaatgtgggcccacgcgtcattggtgcagtgtcatggcgcgggctga

SEQ ID NO: 30968 - DNA, 444 bp, Zea mays
  Peptide Sequence Number=SeqID_74343
atgggcaagggtcacaaacgcaaaagagaggcgactcctccgtcggaggatttcggcgactcggaatactcggaggaggagttctcctccgagtctgagggatctccagctcccgtctctcccccggcgtcgtctgatgattcagacgactcccaggggattgccgcggaggtctggacgtacatccgggccatcgagcgctccgggctcgagggctcggatgagtccgagttctcctcggacgaggaggactcggacggcggcgaggacgaagatgacgacgacgacgacgacggcgacgacgacgacggtggcgacggcgacggtgacggcggctacggcggcgggggcagcggcggcaagggcagcaccagaggcggcagcagcacgggcagcaccaggggcgacggcggcaagggcagcagcagcaaggccagtggctaa

SEQ ID NO: 30969 - DNA, 396 bp, Zea mays
  Peptide Sequence Number=SeqID_74344
atgccgccgccggccaagaggacgccgccgctgccagccaggaggatgccgccgcccccaagcgcttccgcccccagccctccgccccaaccgctgccgccccaacaagccgccgcccccaaccaaccgccaccgtccccaactcgccgccgtccccagcccgccgtcgtccgccgtccccaccactccgccgtccgccggtgccccgacgcgacggtcagccaccaccaccgaggcctcgccatccggtccgcgttcgagtcgtcgaggtataatcctatacctaaatgttctttggaggacatggttgctggagtgacttggtcgtccatcttgccaccgggttggactgtcgagtgggaccccgcctcggctgaggaggagcatgaggagtga

SEQ ID NO: 30970 - DNA, 945 bp, Zea mays
  Peptide Sequence Number=SeqID_74345
atgccccttgtgcggcggttcgccttcctgaccaccggttgccccgaaaatggaggggcgcataactgtggggctgttgcacgctccttcttcagaggagtgcaaccccatgggggttggcattcttccgctatcgctcggcttcaaggattttcatcacgcagcccggtcgcaacctccggtcggtggtcatccacaaggatgactaccagccttgtggtggagagaagcgagccgggctgcagcctcccccctaccctcagcttcaaggatgttcattatccgcgctggggaggagggcgagctgagtcggggctccgccttttcgcgtgggctagcggcccgcttcttcctccagcattcgggggagaatggcgttcgccagccttgcgaaggaggcaaacttcggctacgtggggtcgaccgtctgaggcgccgtcagctgccgcgtgcctggctcctcggcctgggtggccttggtgccgcctccggcgctgcctcctgccgcttggatggggcgtggctgttcgtccattgcacgggcgacggttgcgccatgcgcaggtcggccacatccacggcttctcccgcgccgccggccgcaccggggggtcgtacaagacgtcatacgccgcgggggcggcggcggcggcgttcttggatggtcttgtcctcactccagcagtgaggaagggagcgaggacctcttcgcgcgtgctagggcagccgccgcccatcggtgcagaggtggtcgctgccgctggtggggctgaggtggtcgctgccgctggtgaggctgcccactgcagaggtggttgcctctgctggcgataccgtcagtgccacctgctaccggacccctggctctttggctttaatggcctcgttgtcgccccccgtagggagacgggggcgaggacctttccacagcggcgtacatgttga

SEQ ID NO: 30971 - DNA, 885 bp, Zea mays
  Peptide Sequence Number=SeqID_74346
atggaggacgtggccaacgcacacatctacgcccacgcccaccggagcaagcgtccccagtcggccgcgatcaaagacggggacggggacgtcgacctgtccatgaaaggcgcgcggtaccgcggcgtgcggcgccggccgtggggccggttcgcggcagagatccgcgaccccatgtccaaggagcggcggtggctcggcaccttcgacaccgccgagcaggccgcctgcgcctacgacatcgcggcgcgcgccatgcgcggcaacaaggcgcgcaccaacttcccgggccacgccacggcgggctactggccgtggggcgcgccgcagccggcggcggtggcgcacccgatcaaccctttcctcctgcacaacctcatcatgagctcctccaaccacggctgccgcctgctcaaccacgcaggccacggacacgtccactccgcagcccccagacctccggcgccggcggcggacgccacgtccacgaccatcgcagcgcccttccctgtcgccgcacaccccgccgtagcgatggacgaggacgtggacgactgggacggcgtcctgcggagcgagcccgcggacgccgggctgctgcaggacgcgctgcacgacttctaccctttcacgcgtccgcgcgccggcgggggcaggcgcggcctgtccgcggccggaaccgacgccagggcggcagctgcgttggtggcgccggtaaagccggatgctttcgtcgttcccagccctttcgccggcgtcgagggggacggtgaatacccgatgatgccgcagggcctgctcgaggacgtgatccactccccggcgttcgtggaggttgtggccgcgccgccgtccgtccccacgcgccgcggccgccggggctga

SEQ ID NO: 30972 - DNA, 279 bp, Zea mays
  Peptide Sequence Number=SeqID_74347
atggtgagggcaccccatggtcgaaaagatactcctaatccaccacccgaacaaacaacactggccgaggctatcgctgccttggttaatgcgactgctgataatacccgcttcctacgtgaaatggcgggtaaccaattccagcagcaaggcggaagggctcctccccagggaccgcatgaaacctcatacctggacttctctgaaatgcgtcccccactctttgttaaagctgaaaatcctcttgaagctgatgagtggatcagggtaatggagtag

SEQ ID NO: 30973 - DNA, 408 bp, Zea mays
  Peptide Sequence Number=SeqID_74348
atggtgtttcctgaactgcttcggcctctagatggttcagcctcccatggttgtagcgtgtctgaacacgattgcctgctccctactgaggtgcattctgtcttgctggggcattgggggccggctgctgttgagccatcttcttcagacaatgcatcgcctaatggccctgctctccacagtggaagcatcctctacctcctccttgcactagggctggttgactgctctgattggttgctggggcaggaagtcgaggtgcctgattactctgtctctggaactgacttcttcctctctagttgttctagcggtactgttgctgatgctgagggtactacctttgtaaatgttgttgaggaggaccctggttctgctgctgatatccctaagggtgactctgcttga

SEQ ID NO: 30974 - DNA, 621 bp, Zea mays
  Peptide Sequence Number=SeqID_74349
atggctgaaaggtcctcccctacggcgcgggggctgggtcccacgcgtcatgcaagctggcccagggcagaagaagccaaaccgccgcgcgcggtgcatgcaaccgtccagcggttacaagcgtccctccaatttcgcccagaccagcgggtgaaagggcgagcatccaggcaggcggcatgcaaccgcgccaagtgggcgcacttctccgacttccaacacgcccacgtgtcatgcaagcaactgcaccgccactcgcaccactaccgcgcctcctcgactgcggaaccagtaccgcgactcgaggcgacccagcgcacgacccagcagcaccagcctggcgcgacggtcaatacggccaaaaatgggctggcagtaatggcggtggcaggcgggcaggagcagcggtcacgtcgtcagccaggcttgcgtcccatccgggggcagcgagagaaccctctctcacggcgtgaagacgacgcgcccatgttccgttcctctaacggctcgcgcacgcgcaacggccgccccgcgaaccgcacgccccgtcgcattaactccgcggcgggacaagcggcgcctctggcaggggaagcgagcgacgctttgccttcgccataa

SEQ ID NO: 30975 - DNA, 195 bp, Zea mays
  Peptide Sequence Number=SeqID_74350
atggcgatagtagcgtgtaccctctgtggcaagaggctagacgatgatgtatctgtgctctcggttggcgtaaacctggtgatgaaacaacagacttttgctgtttttgcactaaggtggtgcccaaggatgtggtgcccaaggacgaacctaaacagtaacgtggttgcggaaggacgtggtccttccttttga

SEQ ID NO: 30976 - DNA, 222 bp, Zea mays
  Peptide Sequence Number=SeqID_74351
atggcgccgaagaaggtccagggactagggctgcagctctgcaaccactggaccacaatcaggagacagtctccctgcgggaggcccgaagccagaaaaggaaggctgatgagcaacaccgaaggcctcagcatcaagaccttcatcaggagggttttcccaacgaagatgactggtatgacaatttctgttggggacttgttctcaaatgctaagagttaa

SEQ ID NO: 30977 - DNA, 141 bp, Zea mays
  Peptide Sequence Number=SeqID_74352
atggccatgatgggttcaacatcagaaaagatgtacctctgtcaggtgaagaagcaacaaattttagttgcttctattccaaggtggtgcccaaagaagaaaaccaagactgaagctgcgggaggaagtgtcctcctataa

SEQ ID NO: 30978 - DNA, 448 bp, Zea mays
  Peptide Sequence Number=SeqID_74353
gagcggtttaccagcggtttaccgcccgcttcgccgctgccccccatcgtcgccgcagatcccctcgccgacgggttccatcgcaaaaccggcggtaaaccgcccacggggagaggagacatgtcggatgaagatagagatagagaaagagatagagatagagtctggttgcacggagagaaggttggcgcaggtttcaaatgcaagcagcagctaacggcagatgagacagcacgaacccattttggggacgatgagtatgaggatgaacttaaagcggctctgcatcagtcacgtgtggagcacaaatttagtcagagggctggtgcaaggtatgataggggtggtggatcctccagccagagggtacctgaacgtgttagagactacaatcttgctcaagcctctgaactaaggcagcagaggatagatactggtccttggacaa

SEQ ID NO: 30979 - DNA, 399 bp, Zea mays
  Peptide Sequence Number=SeqID_74354
atggcggggtttggcggcggttccagggacgacgcgtgcgggttcggcggtggtttctgggaacggcgtgcgcgtcggattatgccgcgcccagtgccggcttgtgcggcggcgggtggccgggctctgggatggggcgtcggcgctcggggacggggatggggatggcgcggcggatttctgggctcagggacggcgtcggcgctcggggtggggacgtgctgcagggatggcgcggtcatggtcgggctcggggctcgtcggggctcggggatggggcgttggcgctcggggacggggatggaggtggcagggagggctgggggatcggcggggatggcgcatgggtcgacggggatggcgcgtgggtcggcggggatggagggggtgttgttgtga

SEQ ID NO: 30980 - DNA, 84 bp, Zea mays
  Peptide Sequence Number=SeqID_74355
atggccatcaacgggacggatggaacagcaggacgaagctggaacgattccgggtgcaatccgacacaaatgaacaaggcctaa

SEQ ID NO: 30981 - DNA, 291 bp, Zea mays
  Peptide Sequence Number=SeqID_74356
atgggggtgcgggataagaagatgttggagaagctggcgacgcatgatgtggagatcatcaccacgctcttcactctggccgacaagtgtgccagagctgctgagggccgtgcatggcactcggtgccgcaaaccggagttacttggacgggtggctcaggtgctaccacccagggcggcggcaagaagaagaagaagaaccgcggccatgataggccgcagtctggtgctctggtcgtcgtagctgcgactaggggccgggatgagtgcggcaagcgtcccaagcaatag

SEQ ID NO: 30982 - DNA, 225 bp, Zea mays
  Peptide Sequence Number=SeqID_74357
atggcacgcgtgttggtgggttccttcttcgtattcagatcacctgctttggttgtagaccatgaagtcgaagcttctagcttccacttcacctatgtcgtcgagatgaaggcctatctgcatggtgtcgtcagcggaggtggtggcggtccttgtggggacaggacgctcgccgagatcaggctcaaccacatcaccatccacgccaacccgctcgtcctctga

SEQ ID NO: 30983 - DNA, 597 bp, Zea mays
  Peptide Sequence Number=SeqID_74358
atgcattatttgtatgggagtgatgtcttcatcatgtgcgaccaactccccccatcggtcgaggtgcttctgcctgaccggctacgggcgctgcctaggcacgtggagcgtgtagtccttgaaggtgcatacctcgagagcaacatggtcctagggcaaatagtctcgcacttcgacgagatcgatgcctcggtgatcacggagggttatgccaccagacagagcgaggaggagctggacgccatcgaggaacaggtccacccttatgcccgatcactcgcaagcagagggtttggaaattgcttagggatagaacttcctcaggttttcgatgttccatgcaatgctcagaagattgtcgtcgacagccttgagtcggtgagccacagcggctcaatcgacgcagatgttgaagtcatcgcagaactgcaaaaacggctctcccgtgaactaggtcccattgtcagtgatgatagagttgggtaccccaaactgatagacgatgtctcaaaaggatgcggtggcttacgaagacctgattttggtgattggtttggccttgatccacttcgtgaatttgtccaccgccacgagtag

SEQ ID NO: 30984 - DNA, 1548 bp, Zea mays
  Peptide Sequence Number=SeqID_74359
atgctgcctgcccgccccctcctcgtggccgccgccgtcttcctcctcctcctccccgttcacgtcgccatcgtcgccgcacaggggtttcgcggcttctcttacctcctaaactgtggcgcggcgtcccccaccaccgacagccgcggcctccgctgggatcccgatggcgactatgtctctgccggtacccccggcgtggtctcgctctcgggcctcatcaaccccacgcttgccacccttcgcaccttcccgctccgctacggggccaagttctgctacgagctccccgtggatcggaaccgccgctacctcatccgccccacattcttctacggcgcgctcttcgcctcctcctctgcaccgccgccgcccgtcttcgacctgatcgtggacggtaccttctggaccgccgtcaacaccaccgatgacgcgctggccggcgccgcgtcgtcctacgagggcgtgttccctgcgagtggcaggaacatgagcttctgtctcggggtgaacccggactataccgacgccaggccattcatttccgcgctgcaggtgatccagctcgacgattccgtgtacaacgcaactgatttcccgaccagcgcgatgggcctcattgctcgcaccaagtttggctccactggcggcatcgagaggtaccctaatgacagttttgatcgctattggcagccatttccagacgacaagcatgctgtcagtagcacccaaaatgttacatcagccgacttctggaatcttccccctcctgatgtgtttaacacagctttcatagcagaacaagatgcaccgcttgtgttacaatggcctccagtgcctctccaaaatgatagctattatgtcgccctctactttgctgatacattgcctgataattcaaggacctttgacgtgtatataaatgattacctctttttcaaagatctaaatgtcacatcagctggtctttctgtctttgcaacacaatggattctctcaggcttgaccacaattatattgaaatctgcttctccttctgctcttcctccacttattaatgctggcgaggtttttgggctttttcctgttggaagattgacatatgcacgggatgtacttgccctggagagtataaagaaaagccttcaaaatatacctgaagattggaatggagatccatgcatgccttcaggatattcttggaccggagttacatgtgatgaaggatcaaaaatacgtgtcatctcattgaacttttcaagtatgagtctctctggatttctttcaccagatattgccaaactgactgctttgactgatatatctttggcacacaacatgctcagtgggcctattccgaatcttagcaacctaagaaatctccaacgactgcacttgcaagaaaatcagctatctggatcggtacctgagacattgggtacaatcaatacattgcgtgaaatatttttacaatacaataatttaactggaacagttccggagaacttactgaacaatacaggattgacatacacatttcagaggtag

SEQ ID NO: 30985 - DNA, 315 bp, Zea mays
  Peptide Sequence Number=SeqID_74360
atggcgggcggaattgagctcgccggagctaaggaaaagtggctggccggtgaggagatatggagccaggaaatctggtctgtctccctgcccaaacccgaggcaaatccaaggacgggatgggatgggacgatccctcaaattaggttgtttggttctgggtcaaagactgggacaggactatcccagtgttgtcccctgttgtccctcaaaattggagggacgagagaggacgtacctgtcctagctgtcccgcaacaaaacacacctttggtcgatggcatggagggaggtgttgttggccatgcagcatga

SEQ ID NO: 30986 - DNA, 384 bp, Zea mays
  Peptide Sequence Number=SeqID_74361
atggcctccaagctcctatcggctcgatcggtggctgtctcaacaaggtgccactcttcttcctccatctcctccccctcaacaccttcaaggatgaagggggaaggtcctcatggcatgcccctggaggaggaagcaactatggtaggcggcaaccgcactcgaagttcaggggtcgccaaaggtagtgacgcctccgcagacaagtctaccaccaccacaaggcccgacgacgagaacactgtcggcgacggtgtaggaacgacgtcgcttcagccttttgtctgccttaatagcggcatcctccggaagagggcgctggcggcagggaggaggaagaaccagtggcctgcggccttcccccgaggagctccttgggcgtag

SEQ ID NO: 30987 - DNA, 249 bp, Zea mays
  Peptide Sequence Number=SeqID_74362
atgggcatcggcctcgggaggaggtcttcgcctcagccgaccccagagctcggcctcagcctcgacctcgggaggaatcgcatcctcgctcgaccccggcctcggcctcaggagaagtctccgcctcgcccgaccttgggctcggaccgaccgcgccacaaggaatacatcattaccctacccctagctagctcaggctacgagggaacaagaccggcgtcccatctggctcgccccggtaatagctaa

SEQ ID NO: 30988 - DNA, 762 bp, Zea mays
  Peptide Sequence Number=SeqID_74363
atggccaaaagcggatcagcagtaattgcagcaacagacgggcagaagcagcggtccaatcacctacaggctcgcatcctctcccaaaacggcaggggagccctctcccgcggagtaaagacgacgcgcccgtgttccgttcgcgcacgcgcaacagacgccccgcgaatcgcccgtcccgtcgcgttaactccttggcagggcaagcgatacctctggcaggagaagcgggcgtcgtttcacctccgtcatgatggtcgcgtcaaaaaagggacctggaaaggggatattccgaaatggatccttcccagcgaaggaaacgggccccaatccctcctactgatcaggggttcgaaggttgcaccctccggggtccggcaaccgccccagagcactcgggctccgagccctttactgatcaggggttcgaaggctggcccctcagaagggttcgacagccgcccagagcatgcagagtcagggatgaccctggaaaaaggaatgaaaaataaaagaataaaacaaaacccaactaaatgggccttgcaccaccattttggcccactgaaggaaatccctgcgcaacccaacctcacccacgcgcgtgagtcactggatggcggggccctgtgtcagccacaaccttctctccgctcctccgcacaaccggacggatcagacatcgacgcatggaccccaacttgtcagcttcaacgtcccccttcggatcccaacagaaccacgacaaatccgccgccgtag

SEQ ID NO: 30989 - DNA, 999 bp, Zea mays
  Peptide Sequence Number=SeqID_74364
atgatgaccgtaggccttgtggtggggagaagcaagccgggctgcggcctctgccccgccctcagcttcaaggatgttcatcatcctcgctgtggtggagggcgagctgagccggggttccacctcccgcatgggccggcaagccgcttcttccttcagcattcaggggagagggcgctcaccggccttgcggagggggtgaacttcgacaacgctggaccgatcgaccgcaagcgtcgtcagctgcagcgtgcctggcttgctggctcagctggctctggcgcggcctccgacgccgcctcctgccgcttggtccgggcgttgctgtccgtccaccgcaccggcggctgtcgcgccatgcgcaccgggggaccgtacaagacgtcgtacgtcgcatgggcggcgttcgtgttcttggattgtcttgtcctcactccggcacgacgcctccgcgcggaggtcggcgccggcccgtctgggaggacccgcccgaggcagaggtcgttgtcgctgccggtggagcggtcgtcggcgagccacctggagtttgttatcccgcagaccctctgttttaggacctttggccgctcttgtgatgagctgaagccggaggcagtggtgtcggcgtggacagaggcggagtcggctcgaaaagaggcttcgtcggtcagggagcaggcgacttcccaggccgaggaagtgcagcagcgacggctggagcttggccaggtcatccgcgagcaggaccaaccccggagtcacgctgccgaggccatgagccgggctgagttcctcgggggacagttggctgaggctacggagcgggcagccgaggcgtccgctcgggctgagacccttgcggagagcctggccgacttgttcgtcggtagcagaaccacttatctgagtgagagttacttttcacggaaggtgatgagtgaggattctgttatcgatatagtcgagaaggcacgaaagtcatttctactcgagcgttag

SEQ ID NO: 30990 - DNA, 225 bp, Zea mays
  Peptide Sequence Number=SeqID_74365
atgggccactgctcgctgcagggtgagctagagatgcccccgcgtcgcacgcttctctatcaactctctcacatctccgttgtccgcatcattgtcgccgaccgcgagcctattaccatcctaattgtaacacgctacactcacagcacgtcagctgaatcaacaaggtcatcttccaggaccgccaagcaaaagctcgtgctggtggtggatcaaatccactga

SEQ ID NO: 30991 - DNA, 273 bp, Zea mays
  Peptide Sequence Number=SeqID_74366
atgcggaagctggtgaagggcctcgccaggcccgagcccaggtggctcagggccatggaagagaccctgagccctaccgagaaatttggaatagtgccattatcaaacttagactgtaagatcttcgctagttcaccattctcacacgctgtttacagacaaaatgccattcgatacatcaacagagaaaagatcacctgcttggtcttttttgccccttttcgaaatcagaacgtagctgacaccgttcgtggagatctcccattcacttga

SEQ ID NO: 30992 - DNA, 1245 bp, Zea mays
  Peptide Sequence Number=SeqID_74367
atggcggcggctctgcaagccacgccgctcaaaaccctatccatctcccgccggcgcgtcggcggcgcgggggcgcggccgcgtccgatggcggcgagcttccgatgctccgcggcggcgaggagctacaatatcacgctcctccccggagacggcatcggccctgaggtggtcgccgtcgccaaggacgtgctgtccctcgccggcgccctcgaaggcgtcgagatccggttccaggagaagcttgtgggtggctcggccctgggcgccaccggcgtgccgctccccgacgagacactcgacgcggccaagggttccgacgccgtcctcctcggcgccattggaggctataagtgggataacaatgagaagcacctcaagcctgagaccgggctgctgcagctccgtgccggacttggggtctttgccaatctgcgaccagctgcagtattgccgcagttggtagatgcatccactctgaagaaagaggtagctgaaggtgttgacatcatggttgtcagagagcttactggaggcatctacttcggcaaacccaggggttttggaacaaatgacaatggagatgacattgggttcaacacagaagtttattcagcttctgagattgatcgtatcgcacgagtcgcatttgaggttgctcgcaagagaagagggagactatgctcggttgacaaagcaaatgtcttggaggcatctatgctttggaggaaaagggtgactgcactagcttcggaattccctgatattgagctctcacacatgtatgttgataatgctgcgatgcagcttgttaggaatcctaagcagtttgacacaattgtcacaaacaatatttttggtgacatattatctgatgaagcatcaatgattacgggaagtattggaatgctcccatctgccagtgttggtgaatcgggacctggtctttttgaacctattcatggctctgcccctgatattgctggacaggacaaggccaatccattggctacaattcttagtgcagcgatgctattgagatatggcctaggagaagaaaatgctgcgaacagaattgaagctgcagttactgaaacactgaaccatgggttccgaactggggacatatattctcctggaacagcttatgttcccaattggcagacattggttggatgcaagcggatgggggaagaagtcctgaagacagtgaactcactgaaggaagtggctgctgtaaactga

SEQ ID NO: 30993 - DNA, 423 bp, Zea mays
  Peptide Sequence Number=SeqID_74368
atgggcaagagcaagaaaggcggaaactcgtcgcaccactctagcgacaagcggaagcgtgagccgacccctccctcggaggacttcggcgattccgagtactcgaaggaggagttttcctccgagtctgaggggtcaccagtctacacctctcccccggcatcgtccgatgactcggacgattccgaggggatcaccgccgaggtgtggacatacatccgggccatcgagcgctccgggctcgagggctcggatgagtcggaggtctcctcggacgaggagaactcctctaactcgtccgaggaggggagcggtggtgacggcgacagcgacagcgacgacggaggctacagtgatggtggcgacgacggcagcaagggcgacggcaagggcggcaacggcagtttcaaggccagtggctaa

SEQ ID NO: 30994 - DNA, 729 bp, Zea mays
  Peptide Sequence Number=SeqID_74369
atgacgttgacttctccgtcgacgcgtgggaatgccctgcctcctccccctcctgctgttgaggctgtcgaggttcttcgggtcctccttgaagtctctgcagttccggagggtgtggcgcatgtccttgtggtatgggcactgggcgtcgaggatgtcgtccaatgtatgtttgcctccgcgaggtgctcctcgagcgcgagaggtgggtggtccggcggcgtggacttcttcgtgaggcctcttctcccaacgcttgtcgggttgttggttcgtgtcacgtcgtggtgccgctggtgcaggcttcgctccttcgatgaggtcctaagctcgttcgtcgatggtgatgtagaggtccgatggctgcgccagtttgtcggagagagattggaagttggtgatgaagcgccgactgaagtcgctccagttgtcgatgtagtgtcgggtggctcgggcggcaatggtatagacagccagccagcttcccggatcctgctaaggctcgtacttgtcgacattggagactttgaagttagggggccactgaatggccctgagacgtggagtgagcgccgatactccacatgtgtcctcctgtcgatgatggtgatggatgtcgtggtcccgatcatactcttctcggcgctgaatctcgttctcgtgtcgtcgttcgcgcgaagcgttgatggagctccatgcgtcccgccgactgttgatggtgtgtcgtag

SEQ ID NO: 30995 - DNA, 387 bp, Zea mays
  Peptide Sequence Number=SeqID_74370
atggtggagaagggccacgggtcgtgcgacggaacgacggttacccggtcggccatcaccaagcgaaggggtggcggtggagcagacaagggcaggcgacacctttggcaggcgaagcgggcgacgcttcacctccgccataatgaccgcatcaaaaaaggaaccgggaaaggggatactccgaaagggatccttctctgcgtaggaagtgggccccgagccctcctactgatcagaggttcgaaggctgaaccctcagaagggttcgacacccgcctcagagcacgcgggctccgcgcccactactggtcagaggttcgaaggctggtccctcggaagggtttcgacagccgcctcaggccactcgggctccgcgcccactactga

SEQ ID NO: 30996 - DNA, 1794 bp, Zea mays
  Peptide Sequence Number=SeqID_74371
atggactcgaggcctgattcgcaatcttactcttacccactggtcgcagccgctggctctgcgatcgtcgttgtcttgttgcatgcactgaggctgaacgcgctgctgctactcctctgcctgtgcgcgttccccgccccggcgcggtcgcagaacacgaccatggccacgaccgcgcaggcgtccgtcgaggggttcaactgcaccgccaaccgcacgtacccatgccaggtgtacgcgctctaccgcaccggcttcgcgggcgtgccgctcgatctcgcggccatcggtgacctctttgccgtcagctgcttcatggtcgcgcacgccaacaacctctccacgacggccgcgctggccaacggacagccgctgctcgtgccgctctacatcgtaggcgaaactgacaccctgtcccccgccttccccgacctcctcttcttctcctcgccggcccccgctatggtctcatccgtgtgttccccacctaaccccaccccccaatccgccatgcccggcggctcctgccccgacccggccgcggaagcgcagctcccgccgccgatccaccacctgccgccggacgcgctccacaacgtgctgctccggctgcagctgcgcgacgccgtcgtgtgccgcctcgtctcgcgcctcttccacgagaccctctcgccgcagctcctcgcgctgctgcccaccctgcgcctcctcctcctccgccacccgcgccccgacggcggcggctgcctccacgccttcgaccccgcgcgccgcacctggctccgcctccccttcgctcacttcctcccctaccagtccttctcccccgtcgcctcatccacgtccctcctctacctctgggtcgagacctcctcctccacctcgcccctagccctccagtccaccactacgtcttcctccgccgcctcgcccgcgcacccgctcaaatcgctcgccgtctgcaaccccttcgccggaacgtaccgcctcctgccccagctcggatccgcctgggcgcgccacggcaccgtcctcgccggccccggcggcatggtgctcgtcctcaccgagctcgcagcgctgtcctacacaccctccgaatccggcaagtggatgaagcacccgctctcgctgccgtccaagccgcggagccccatactggcctccgccgccgtcttcgccctctgcgacgtcggcacgccgtggcgcagccagtggaagctcttctcctgcccgctggacaggctcaccgggggctgggcgcccgtggagcgagcagcgtggggagacgtcttcgaggttctcaagcgtcctcggctccttgccggtgccggcggccgccgggttcttatggtcggcgggctcagatcctcgttcgccatggacgcgccgtgctccaccgttctcatactccgtctagatctagccaccatggagtgggacgaagctgggcgcatgccgcccaatatgtaccgctgcttcactggcctctgcgaggctgcttcacagggcaacgccatgcctgccaccgctggcgggggtaacaataaggtcaaggttttcggaggcgatggaaaggtgtggttcgctggtaagcgagtgcgcgggaagcttgcaatgtgggaggaagatgagacggggagcagtggcaagtgggactgggtggatggtgttcctggttatgatgatggccagcaaggccaagactctgcagctgctgctgttcctgttggttctgtcgcggtggccagcgcagagcttactctggtcattcacggcacggccgatctgtaa

SEQ ID NO: 30997 - DNA, 99 bp, Zea mays
  Peptide Sequence Number=SeqID_74372
atggcttcctgtggcgcgagacgcaagcgacggacgtctctcatgtggcttcggttttttaagatatttatgcttaccacaatcaatatttatgattaa

SEQ ID NO: 30998 - DNA, 2760 bp, Zea mays
  Peptide Sequence Number=SeqID_74373
atggtatcgatggtggcactcggctgtggcgtggcattgttgccggaagtggtgctggaaaacagccccgaaccggtgcgtaaccgcgtgatgattttagagcgcagcgatgagaaaacgccgtatgagctgggcgtgtgtgcgcagaaaaagcggctacatgagccgctaattgaggcattctggaagattttgccgaacaacaaaagacgttgtcgcgcgggtaggcctgataagcgaagcgctatcaggcatttttccctaacccgccaaaaagaacctgaacgccgggttataggtttcgtcgtggcaatcgtagcccagctcattcagccgggtttcgaaatccggttcatggtcgccaagttcgaacgccgccagtacgcgcccgtagtcggtgccatggctgcgatagtggaacaaagaaatgttccagtacgtacccagcgtgttgaggaagcgcagcagcgcagtctgattttcaggtggggcgtccacacccacggcgcggtgcacgttctgcctcccaccacccgccccgcccgcggccgcatccctcccgcggcagcaccatcaacgcgcaacggtcgcatccagtccctcccgcatcaacagtgtcgcagttcgcgcaatccatggtccacagttcacatcccagttcgcgcaatccatagtccacagttttcgcttaatccccggccgcatcccagttccatcccgcggcgcaatccattgactccctgccgcatcccagttccatcccggcagcatcccaggaacgcgcccgtgttctccaggagcaacagcacgagtaatggcaccgcggaggaggcggcaggggctggggaggagctgcccagtcccgtgaacggcggcgcggcgccgttctttcctcgtcaggccggagacgcgctcttggacgacttgcagctgcaggagcagctcgcgttcctcaacgagggcggcgggaacccggcccaccagctccaggggttcgacggcgtggagtgtcggagccccggccccggtgatgccgatgggatgttcgcgttcggcctcgggtggcacaacgggggcccagcgcaccgcaggagctcgtcagtcaacgagctctgccttggcggcggcggcggcgatggtttcggttggaagccctgcctctactacgcgagcgggttctgcaagaacggcggcagctgcaggttcgtccacggcggcctctccgacgacgctgttgcgctcgctggcaccaagatggaggcagcggccgatcagcagcagcagtgccaggacttcctcatccgctccaagggccagcgcctcggccccgccgtcttcccctactcccccaccggctccctcccaggctcgccctccgccgctagcaagtgcctcagcttcctgctgcagcaacggcagcagcacgacagagccgcggcggccgcgtctctgatgctgggcggcggcgacgaggcgcacaagttcatggcccggccgcgcctggaccgtgccgacttcgccagcctgatgaatcccagctcgcgccagatttatctgaccttcccggccgacagcacgttccgcgaggaggacgtctccaactatttcagcatctacggtccagttcacgacgtgcgcatcccctaccagcagaagcgcatgttcgggttcgtcaccttcgtctatccagagaccgtgaagctcatcctggccaagggcaacccgcacttcatctgcgacacacgcgtgctcgtcaagccgtacaaggagaagggcaaggtccccgataagtacaggcatgcattgcgaattcatccttggcttccagcaacggcaatggcgtccgtgcatgcacatatgcagttgctcgggttaattgatctgctgttctcggctcgcaggaatgtaacaccccgtccaatccctggaccggcggtacttactcctggcagctctctaggatcatatattgtccccacagaccaacacgagtcttttgtgcgcactttgtcctcactcatgggcacccgagaaaacttcccgccttgggccaggacatcccatcccagggggcaggatatcacaaggaagcagcagcaaggggacttctccggctacacgacgcccactggcgggctggacgcccgagatccctttgatctgcaccaactcggcgcgaggatgctgcagcattcgaacagcgccaacgagctgctcttgcgccggaagctggaggagcagcagcaggctgccgaacttcagcacgccattgagctccagagccgccgcctcatgggtctccagctgctcgacctcaaggctcgcgcagctgcgacagcagcagcggcatcggcactgccaacaccagttgtcaatgccttcgcgtccatccatcctttgagcaccatggcagtcgagtcgccactagagtctggagagcagctcaagctgagcagtgggtttgctctagaggggaagctcaacggtggagatcacaacttgccggacagcccatttgcgtcccctaccaagtctgacgtgctcgtgcacgacagtttcgccgccacggagcctgagaacaccgcgtcccttgttgggagcaagatcgacggcggcagtaaccatctccgcccccctgcgctggaaatcccttcgcccagctcctacttcttccccatgcgcaggtgcgttggaaaggcctctactctacttttccgtggcgccgattatgtccgtgaacattctgtcatccacgagtga

SEQ ID NO: 30999 - DNA, 279 bp, Zea mays
  Peptide Sequence Number=SeqID_74374
atggcgatggcgtgcccagcttgctggtgccgtcgtcgtctcggtcgtccggccacctgccgttctacgccaacgtcaccacctctggttgtagaagatttagccatattagacttggttctggtgttctctagaatagcacgaatcaagaaaaaaactcaccataccacgaagatcaatatgtccatttcagtgtcaacatccccgagagaaggacgtggtgaccatggagtacctttcactgaaagagtcgaacgagcaactaaactagaaggttga

SEQ ID NO: 31000 - DNA, 1053 bp, Zea mays
  Peptide Sequence Number=SeqID_74375
atggcggcgcgaagggcaggaagggcggttctctcttctctggctagatctctcgggttgcgaaaacctaaggggcaggcaggaagcggagcaaagaaccgtcaccggaccctctccggggagcagcgggcgacgcttcgccttcaccgaaacaaccgcgccaaaaaaaaggctccgagcctccttactgatcaggggttcgaaggctggccccccgaagggttcaacagccgcctcagatcgcgtgggccctacacccactactggtcagaggttcgaaggccggccccccgaagggttccacggccgcctcaggctactcgggctccgtgcccattactgatcaggggttcgaaggctggcccccgaagggttcacagccgcctcagacgccgagcgagggatgaccaggggtacgttcgatacataaccaaggctcgggctgcgctcccgagctcaccggagacaccatgttcggtgcccatcgagggtaacatggcgctctccccccactcctccttgcggaaaggcgacgtaggggcggctcggactcgggctaagacccggaagacggcgaactccgctccgcccgacccagggcccggactcgggctaggccccggaagacgacgaactccgcttcgcccgacccagggctcggactcgggctcagccccagaagacgacgaactccgcttcgcccgaccccagggctcggactccaccctggcctctgccgacgacctccgcctcgccccgacccaggggctcggactcggcctcggccatggaagacagactcgaccccgacttcggaggagcctccacgccgcccaacctagggcacaggccagccacgtcaacaggaagcgccatcatcaccctaccccgagccgactcgggccgcagagaacaagaccgggggacgtcagcaaggacccaaccgctccgacagctgtccctccgccaggctccgttgctcctccgacagccacgacaccacaccagctgggtgccaagatctctccggctgccacattggcatgtacttag

SEQ ID NO: 31001 - DNA, 2573 bp, Zea mays
  Peptide Sequence Number=SeqID_74376
atgtgctcccattattatgtagcgtacccacagtttgaggtagaggaggatgatgcagacgaaggagcccttcggtgcgctacccgcatgagtagcgggcgcgatttggttgaggaatttgttgggtatggggtatggcccttggcgcatggctgggcgctaggcgaagtatgccctcgcgagatgccctcccagggcgggcagttggtgcgaagtcctgccttcgcgctggatttgcgtggtcgagatcccaccgcattcgtgcgtgaaaaggaaaacggtgcagcgaggatcgtggggcactacgtgccgaggacagagggcctgcagagttgggaaatccgtgggtccaacgacaggttgaatcgggtcttcgaactgaaccgcttgccgtacggtggttatcccggggaagacgccgccgaccgccgcgggaagaaactgatgggcgggaccaaggaagggccttcgcaggacgctgccccggccgctaagaggaggaaattaggtactatggtggggggaatgggggtgtatgataattttgctgtggagttgatggggacatgtgcggcccctgggggaaggatgtcttcgcccgagctccgggagtcttcggcgcgaatgctggaggttaccgggggtcgatggccaaagaatctttcgatcccctggacggagggcgaagacatgtctacatcttgtatagctcgtggcttgaggattttcccttacggacgaaatattgttgatgttgtgtcggcagcgatgaacaaggaccgtcaagacgctgcgcagaagcgccgggcggctatcaggatcgcagatcctaggcgtgaggcgaagagagcgcgggggagcgcgaaggctacagcccccggcagcagccagccgatgccggctccaaaaccggccgcgcccggacccggcaagttgtcggcgatcgcgaagacagccgccgctggcgggaccaagcctgccccggtcgaggctgcgaaaggacgggagctgccctcgccggggaaacgtgttgccgacttcggcacgaacatcagcatggaggaatattttgttgggtcgggcgagggacaaatggttgttgtcccaccttcggtggcgaccacttctccatcggcggtggtgagggcgaggggaaccgtgcaggacccgtgggccgccttctgcgcaagcggcgagattctgacagccgctaccgctaaggacgtggcgggtaccatgtcccagcggctgagggaggcatcgcagcggctgtcgcagcagctaggtcagcacgcggatgtcgtccgggaaaagtcggctgcggagagcaaaaaccacaggctggcggagaaagtggccactctggaggccgagaagacggacctccggcgccaactggctgcgcaggcggaggccaaagtggcgcgggcggagggaagtctcgccagccaacgcgcggaggagtgggaggcgaggttcaatgccctatgcggccgcgtggacaaggccgaggcctctatgtgctcggaggttgagcggacactcgcacagttcgtggactcatacaacgagctgggtgcgcggactgctgacttcgaggtgcccgaccgggaggcgggccttcgcttcctcgaatggttgcatgaggagttgctggtgctcccgaccatcgtcgagggtttcatgtcctttgcctccctcgtcacctgcgagggggccatgaatgcgctgttctgcgagggctgcagacactatgaggtcttcgaccaatcagacgagagctttgaacacgagatcttcaaggccgaagaccctgttgtgaagcagtcagcgggggcactttttgataggatgtggggggcgcatggtcgggaggctgtcagggagcgatccgaccgggcgagagagcaggtgaagatggagcgtgctgaggacgtcgaggaccttggaggcctggtcggcgcgccgcccgaacctgcggaggtcaatccggtgcagccctcggatgccggtgaaggcccctcggccgtgcccatgcctgctatggccggcgaagaccctatgtcggcccctgcgccgacggtcgaaggtgccctgaaggttcacggttttgggcctgcgcacgcaaccgctactgacaatgctaattttgtggcggcttcgaccgtggttgctgaagctgtttcggatgattctgtgtctaagttttttgagtctgatgattctgggggctcagttgtgtggacggaagagtcttcggatgaggactcggattattttgcggcactggatgtggctgcggcggaagcttctccacgtgtgataggtgctgaagttctgcctggtgtgagtgttgggcgtaggcggcgaagggcggtggcgaagcggagggtgagtgaggtggagggtggtcgtcttcgtgtagacggggctagcaaacgggaattgttgtcttcgccggctggggcgagtgtaggtgagggggagttgcgaagtatttttgagggtgaggagctgaggataatgctgttcaactacagggagatgggtatcgtcccgaaggttgagccaat

SEQ ID NO: 31002 - DNA, 263 bp, Zea mays
  Peptide Sequence Number=SeqID_74377
gtgataatgaggatgatggttttgattatgattatggtttctgggataactctgacgtctctcccaacaatatcatagagctgacttgggaaaccttgctggctgatgaacaactccagttcgaggagcacaaggagcagctgatccaagaagcaaaggtgaagttcctgaccaacctcaaggtggacaggaacaacaaggtcgttcagcaacgggcgacagatctggcttcgctccgacctactgatagtcgcctagagggg

SEQ ID NO: 31003 - DNA, 1275 bp, Zea mays
  Peptide Sequence Number=SeqID_74378
atggaggacttgagtacaatgaccccgaccattgtgattgggaaaatcgtggcttttgaaatgtcgcgaaaaatgtgtcggggagaggagccaacttcgtcaaggccatatgcttttgcatgtgatgaaaggaagggtaaaaggaaggctcccactccgagtttctcaagtgatgaaaaggaagaagtaaaaagtgatgatgatgaagataatcaaccatcaacatcatcctctgaggacgaagaaacaatccgacgcgtcggaaaggtagaagatcttctctttaacattgataggaaaaagcaaagaaagagaggatgtttcgcatgtggggagaagggccacttcagggacaactgtccaactatggcagaacccaaaaaggggaggagcaaaggcaaggcgctaacaagtgtcaaaacttgggacgatttttcaagtgaagatgaacctccaaggacgcgcagccaccgatcctcatcacggtcatcacacaagtgccttatggcaagaggtaaaatgagtataccatcctctagtgatgatagcagtagtgatgatgaaggtgagggaaagccctccatagatgagcttgcggaagccgtaaaaaattttcaggatgtttgcactaaacaaaaggctcaacttaaaactttgaaaaataagttgattagctctaaaaatgattacaaaggtttgctagaaaaatttgaagcctttgcaaatatgaattgtgagctatcaactaaaattgagcaattagagtctagtgctacatccacagctaccgatgatggccttattaaaaggaatgaaaaacttaaggctaagttagctagcactcaagaagctattgaaaatttgctagggaaaatggaaattattagcatacacaataatgagctaactactaagctagaaaacattggtagcaccccaggggcatctttaattgaaattcctgaaattattaaaaaagatgcttcttcttcttgctttgatttaattgatgattctaactcctgcaaccaagttcttattgagaatattgttgtagacacatgttcggatgaggttgcaagtgaaaatgagcaattaaggcaagaagtggatcgccttggcaaggctttgtatgacaagaaaggcaaagccaaacaaatccgacctccacaggataacaccaatgcgggagtgaacaagcctatggagggagaaaccgtgatttgtaggctatgccacatggaggccataagtctttccaatgcaaggcgatga

SEQ ID NO: 31004 - DNA, 279 bp, Zea mays
  Peptide Sequence Number=SeqID_74379
atgagagttcaaaggcactcaataagaagcataatagaaaactgtaatctcgctgactgggagtacatcctcgttccggagcaaggagttgctcaggaggtagcccaggagccagcaccagagcctgccatcgaggatctgcctgccccagctttggaggttttatgctcaggaggttctctcgaggatatggttgttgcagtgacttggccgtccatcttgccaccgagctggacagtcgagtgggaccctacctcaacagaggaacatgaggagtga

SEQ ID NO: 31005 - DNA, 444 bp, Zea mays
  Peptide Sequence Number=SeqID_74380
atgggcaagaacaacaagcgcaagcgtgagccgactcctccatcagaggacttcggtgattcggagtactcagaggaggaggtctcctctgagtctgaggggtctccggctcccatccctctgcgtgagtcgtctgatgattcagacgactcccaggggcttgcggcggaggtctggacttacatccgggccgtcgagcgctccgggctcgagggctccgatgagtcggagtactcctcggacgaggaggactcgtccgagggcggtggcggcgatggcgacgacgacgacggaggcggtggcggcaatgacggtgacggcggcgatgacgatgacggcggcggcaggggcggcggtggcggcagcaaggatggcgacgccggcagcggcaagggtagcagcaggggcggcagcagcagaggcagcaacagggccagtggctag

SEQ ID NO: 31006 - DNA, 543 bp, Zea mays
  Peptide Sequence Number=SeqID_74381
atgtcttcgcgctcccttatgcaccgtgtctttccaccttccgagcccccagatggggaacgcccgcgatccttccgccttgtcgttggaggaacgcaacttcgtggaagttggtacctttcaaccatcgttcggcttcaaggattttcatcagtcagcccggctgcatctcttcgccggtggtcacccaagacggtgaccaccagcccctgggtggggagaagcaagccgggctacgatcttggtcccgccctcagcttcaaggatgttcatcatcctcgctggggcggaggtcgggctgaaccggagctctacctcccgcgcgggttcgtgggtcagcctctccttcagcattcgagggagagggcgctcactggccctgcgagaggggcggacttcgacaacgcggggctggccgacggcgggcgtcgtcagcttcagcattgtgctcgccggcttggctcccggtgccccctcctgccgcaagggcggttgtcgcgccgcgcgcacgggaggaccgcccaagacgtcgcgcgctgctag

SEQ ID NO: 31007 - DNA, 129 bp, Zea mays
  Peptide Sequence Number=SeqID_74382
atggcgggcggaataaagctcgccggagctaaggaaaggtggatggccggtgaggagatatggagccaggaaatctggtttgtctccctgcccaaacccgaggcaaatcccaggttttgtcgtgtctag

SEQ ID NO: 31008 - DNA, 1455 bp, Zea mays
  Peptide Sequence Number=SeqID_74383
atgaactcacgggcgctccagcttcagctccaggccgctgaggcggcggctccagtacatgccggagaagacggcgagccggaggccaccccgaaggctccgctgctgaagatccaaggccaaggcagtggccttgctcggtcgatggggacaacgaccggcaacgctaccaagtgccccgagtgccccaagtggttcccgtcgttgaaggccatgtgcgggcaccttaggcaacacccggatagggactacaggggggccacccgtccgacgccggcgacgatcagcgccgccgcggccgtggccgtggctgtggctggagacaacgagccgaccaataaggttccgcggaaggagtctgttgtagtggccatcaacatggtggccgctgctgcgtcggcagtgcagaagcagccgtgggaggaggccgagaccaagtggccagccaaggcgaagcgcgggcgcacgtccgtggcaccgatgcaagcgagcagcatcagcgaggaggaggaggctgcgatggaggaggaggctgcgatgatcctattggagatgagccgcacgtcgtccgaaacccagcagcggcagcagcctgtggaaccggtgcgttccccctacgccgtctctggccaccagatccagacgacgtcggttgtcgaggagcttatgcagcagcagactccggagaatgccctggagctcagcgctgagtcccagacgtcggtagccaaacatgtcacggacctggtggaagctgttcttatcatggttccggcgaacaaggccatcttccccagcctcaactctggcgccggcgacaagaagcccaagaagcgctgggtcaggaatcccgggcgtaccgctgcatcgacgacgtcgccgccacctccggaaggcgccgtccgaacgccaccggcgaggcgcataccatctccggcgtcgggcaagatgcacacgtgcccgacgtgccacaagtcgttctccacccatcaagccctaggcggccacatggccagccacgtcaagaacaagaccaccagcgcgcggcacgacgaccacgccgcggcccacgctatgatcaagcccgacgtcttggcgcatagcgaccagagcgccggcaacggcgacgtcgacatcatccccgccagcgatgatggcgcgggcaagggcggcgcgttgcaggagcggcaggacgcccagccgccaccaccggcgcgagcgccgacgccgccgcagacctcggctccgcacaagtgcgacgagtgcacaaagaccttctcctccggccaggcgctaggcggccacaagcggaagcactggtccctggagaagcaacaggccagagcggcgctgcctgcgcctgcgccagtgattgagcctgagcctgagttgcgggacttcgacctgaatgagctgcccaaggaggagcaattccaggacaacaatcagccctag

SEQ ID NO: 31009 - DNA, 471 bp, Zea mays
  Peptide Sequence Number=SeqID_74384
atggataatgaaaaaacttactctcaggcaaggcaatttgagttggaaagagacattaccttcgataatactaagtctgctaattcatcgaagagtatgaccaaggaagcaacttctaattccttaaacgaagaagcatctaagcaacaggtaaaactgaaagagcaatctacaactaccttcgataaaaccaagtgtgctaccacatcaaagactggagcacaagtgttcttaaaaagctggagatgtccaaccaagactgttgccttaggcacagtacttggtcgagacccaaatcataaagttggaggtgttaagttaggcagagaattttggatgattgaagacaacaaaaacttatatatgatcatttcaacatcacgacgcttcaactcagttcaggatgatatcatgatttcaatgttgcgtatgagctatatttcatttcaagctactgaaacttcttcatga

SEQ ID NO: 31010 - DNA, 357 bp, Zea mays
  Peptide Sequence Number=SeqID_74385
atgatggtcctcgccttagttgccgccacctcgttcgccatattgtttcttttctctctcccctcatgcctctgccttcgcgccaccccattctcgggctctcggcagagggtgtgggagcaggcgcctcctccccgtattcgtccaacactagccccaacaccgacccgcgcagtggctattgcacgtccacgaggacgtttcatagtcttcgtcgtttcattctccgacaaagaacaggatttggagatccatgcgggcactaccacagggtgctcatctcttgtgttcttggctcttgcaagcattaggtcgtttctgagaccacattggtgcaatagactccatggtgtttga

SEQ ID NO: 31011 - DNA, 195 bp, Zea mays
  Peptide Sequence Number=SeqID_74386
atgggtcggcgcgagacggagcgcgaagggggaaaactggagggagataggcgtaaaagggtcgaggtcgagtccgagcctttgggtcgggcgagacggagaccgtcggctgaggccgaggccgagtccgagccctggggtcgggcgaggtggagttcattgtcttccggggccgaggccgagtccgagccctag

SEQ ID NO: 31012 - DNA, 243 bp, Zea mays
  Peptide Sequence Number=SeqID_74387
atgtgctggctaaataggtatgtggcactatttggtgaatttagtcatgaaatggaagtaacagagcataatttaaagacacagcttgaaaatgctctgaaggagctagaggctgctcaacataaagcatcaacaacaacctctggaacagctgaaaatgctctacttgaagctaagtcagtgactgatcttaaatctaaagatttggaggagaaggcttttgcgaatcacttgaagcgttag

SEQ ID NO: 31013 - DNA, 384 bp, Zea mays
  Peptide Sequence Number=SeqID_74388
atggctcttaatgcaatatttcactttactattttacagtggggatggaaggagcagcaaactggagtggtgggcagcgacggcgggccgggtgcctgcagcgcggggaacgacagtggcaggctgtgggcggtgatggcgcatgagccggtcgggacgggagagagcgaaggcggcgaggcgaggcagctgaggatgggaaggaaggaggtgatgctgatgcctcactcgcggacccgtaccgatggccgcgccataacagacagagacagggacacaggggagagggctcagccggcgaggaaaagggggacgaaccagagcgacggccgcgggctgccccagctgcggccgtgggggcggcccgacagcgataagagctga

SEQ ID NO: 31014 - DNA, 4014 bp, Zea mays
  Peptide Sequence Number=SeqID_74389
atggtcaacaatatggaggaagattcgtccgaatgggcaaaatatgcctacgtgagcgagtacctgcttggaagaaatagacaagccatcggtggcattcttggagtattcgttaaggaggggaccaaagatttggtgcctgatgagatagtggacggacaaggaagtgaagtttcttgttctatccacctgttgaacttaccaacttgcagccgcagatctggagggagcagcgaaggcgttcatcagatgttatccagtgagcacccttcaggcccctcatgttcctccaagtctggtggcccgggtgtgagcgctgatccggcgacgtccgcggcggagcagccagcgtgccaggatcccagagatctgatccaatcgtatcccaagttctccataagagattatgtttttgcttcaaggagcaaaggcatcaagagaagctggcctttccatccacactcgttgcagctttgcctggagcatggtgtgaaggatccattgcctccatttgagcctcccgatttgatccggtctcagccattaaatatttccacagacattaagcaatctgctgcgtgctcagaacccatcattagtgttggtctggtgaagaccaaagatgccggttcgtcaaacgagtatacaggcgatatcaacttccagtcatgccagccagtagatgagtcacctggaccttcgccatacacatcaccggaggatgggaaatccggtatcgaccaagtgggaagtacaaatgaatcagatcatactgacgaggctataccaatagatctgcaagataatagctgtacaagagcaagtcggcgaactgaggttgctgtgcccttgcggcggttgagaaatcttgactcatcgtgcgagccatctgaaaagaagtgcaaatttgttgtcaagttaggtgcctcggcagatattcggcggccagaggatatagcatctaactctagctcagtttcagatccgatggcttcaaagacttgtcctgtgtgcaaagtatttgcttccacttcgaacaccacattgaatgcccacatagatcagtgcctttctgttgagtctaatactgagcttgttgaaactgtccttgtaaagcctaaagtgaagccaaggaagaagcgattaatggtggacatatacaagactgctcttccatacacccttgaggatcttgatcggaggaattgcactaattgggcagttgagttggctatgtctccagtgagcaaagaggtttgcactgagaacggaagcccagaagtggtatcatttgacagaagagatgatgaaagagaaggagatgtttatgttgattctaatggcataaaaattagaattttgtccaagtgtaatgatgtacctttggtgttgaaagatgaccttggttctagcaaagttgcgaagcatggaactggaaaaggtatactgatgagcaaaaagatgctgaagtcaaagcttttgaagaataagaagctgaagatgcatggaaagaagtacaacaaaacaagccatttgaactcccagatgtcaagcttagattatgttacctttgtaacttgtttctctgtgaaggttcaagcagacccgcatgacgatattaatgaggaaacctccgaggaggagaggaatgcatggaatccttctgaaagcaccagcaattgtggttccaggactatgcagcagtgggtatgctccaaacgatcagatatcaacaagaaattaagcaaaaaccatagtggtaaaacatttgacaaagtggcacctggagcacagaaatcggataggagcagcatgtttggctttaatgattctcaagttccagaaagtcctgttggggtgttttcttctgagtcattatacatggccacaacttcagaagccactggtgttgagcagagtaatggtccttcaaaagtgcttagatcgattcctacatggtcttcaaaaactcatcttcagagcagtgtcataccaaaagtacctagatcagctgctgctcttgcaaagagaaaaattaaggagattgggaggagagaagctaccaaactagataattatgatgtagtgaggaatcccacttcagtgaaaagatttgaagctaggactctttccttctccactgcagggccaagcaatggaccaaacaggtcagcatctacatcaaagaagatccggaagcaccgatctccgttgaggactggcaagcgtgcattttcaccttctagtactagattagttcatggctttggtgacgagcatgaacctgagaccagacatgtaaataagaaattcaggattactagtaatgaggctcccaagaagtttttgaagcatactgaagaggatactgcagataatgacttctcttttgcaagtgacatgccagtatcgggacaacagaatgatcaatatgatgttgcacaggaaacagagggtacacaaatggattgtgaaggtgaagatgctgaaactgatgtgccatatgattcagtatccagaagtgatcctgctgagtgttgcaaccaaataagtgatgtttctctgagtcctgaaaactacagaacagcagacgatgatgttttggttgaaggctgtagtgtagctgtggaggatccaaactccagtgagcaattagcacatggccatgaatccaacagtgctgccaataatgaaatggatgaatggcagatggatcctacttcaacaaaggaatctagtccctgcttaactagtaacagggacatgggccctggaggtcatcaagataactcatcaataacatcaaatggagaagaagactttaatgaagagcatggtctgccactcggaaggggctcactagattctcccatttcgactgcctcaactatggcccttccagctgctttgaaggattcaaggactaatgaggaagaacctggcccatctactggtaggactgttgaagagcaaaccaccgggtgcttgaatcaagaaaccaattcaatacctatggccagagaaggtgaactgcccagtgagaagccttttcgttgttcttgccaggaaaacattgccagagagtctcgtcaaagtcctgttgccagaccaatgctgaattctactgggaagcaggttccgcaattgcacattggttcgagggcatcatcatctttcagcacgtaccaaagaaccagcgcaaagcccaacccttgctttgatccacatgatcatcttttagcggctaaggtcccagcagaatctgctatcagcttcccttactccacagactgtataagcccctcattccaaactcagcttccttcaccatcaaatcctgtcttgaggctgatgggtaaggatttgatggtgatgaacagtgaagagagtgtgcatcctcaagcaccaagttcagactacatcttgagagggaattatccagcacctgttggtttcatgcctccaaactaccaacatctcagtaattctgcatttatcaacatgccgccgaccacagccagccaccagatccctctaccaagtgttcaagctagcggcttcgttgctcctccattgcgtggtggttctgtgatgcaatctgaccatcactcccagcagaagccctacagaaacatcatgcctgccatgcatcgcccaacctacatgatgaaagaagtgatcgtgatcaacgactctcctgagcgcagaagtgagccacaaggtagcatgctgttcccccctgctccgcctccaccacttccggtagtaccaaacaacatgccaccccgtccgttctactgctttccaccgcagagcccagttttgccaagggagaggggggctgttgggtccatgctcgtgtacgcaaacgttggctcaatggtcggcgtcaattcgtcgagtcaaggaagccaaacggaagtcgccagtccttacatgccaaacccgttcttcgtgcagtctcgagccggttacatgaacccgccagtgtactactcgcagaatctggggtga

SEQ ID NO: 31015 - DNA, 465 bp, Zea mays
  Peptide Sequence Number=SeqID_74390
atgatggtcctcgcctcagttgccaccacctcgttcgacattctacttcttttctctctcccctcatgcctccaccttcgtgccaccccattctcggcagaggacgtaggagcaggcacctcctcgtattcgtcggacaccaacccagacatcgactcacgcagtggctattgtacgtccacgaggatgtttcacatcatgcgtgcaccatcgttttcgttgtcggacgaaccgttcgtcttctcggccttcgccatgttcttcgtccccaacctgttgcctccacccacggtcgcagctgcgagccgaccgacgctcgtcgacgcgggtatagggcgagtcagtcatgcttctggcctttctctgtgcgtgccgtcgaggaggacatggtggcgcctgccactcttaggttatcttggcgatgaggactccaggtctgagatattggacaaccaaggctcgtag

SEQ ID NO: 31016 - DNA, 345 bp, Zea mays
  Peptide Sequence Number=SeqID_74391
atgaacgaaaatggagatttgcaggatagaattgggattcagatgggtcaagttaagacggtagaaatcaaggaggccgcggaaaaagggagaaataggaagaccgaggccgtggagaaggaaaggagcataaatcacggactcatgggtatcctcaattgggacagtaaccccatggcaaatccgctaagaacagagttccctcggaggaagaaccccgatggacacgaggtggagaagttcgggctcagagatgacggacatgtgaacaccagcgcgccacatcatcactcggctattatcaaagtggcccacgcagcccgctatcactcggcgtacctctaa

SEQ ID NO: 31017 - DNA, 192 bp, Zea mays
  Peptide Sequence Number=SeqID_74392
atggcccccaacggacccgttcacccttttgacccggagtttcccggcacccccgttcccgggggtggtgatgaagatgatggttatgattatgcttatggtaatggttgtccacattgcaaccactgctcaggagaggatgaagccgtggaggaggactgccaggagttccaagagtacgatgagttctag

SEQ ID NO: 31018 - DNA, 303 bp, Zea mays
  Peptide Sequence Number=SeqID_74393
atggacgccaggaaggagagagaaccaagagcagggtgtgctgccaggatcgccctcgtccgcgcctggtggtcgggggtctgtgacgttcctggaagcttcgtgcggttgcggggtggggatctccggtgttgctcggactcctgttcggcggacgtcgctgcgggatgggagcggcccggggtactcaggaatccctcgccgtgcacccagttctgccgcagtgctcgcgccggcgtgctcatcttggcggctgcacggtactgctattctcagagcctggggaagaagacgatctcgtga

SEQ ID NO: 31019 - DNA, 810 bp, Zea mays
  Peptide Sequence Number=SeqID_74394
atgggggagcgggagcggcagggctatataggggcagacgcagttaccgtcaatcctgatcatggcggaggtcgtcgcgcccagaaattcggcaaaggttgttgcgcgaacaacgagaatcgcggcggactggagcttccggcaaaacggtcccacccatcattgagcgaacagagagggtatgggggtcaaggcacggctgggggtgcgagtcccacggaggattcagttgatgggcagcacgggatttgttacgatgttttatcgcacgcgcgagccaacctcgagaagaactggcggaggattttagggtgttacacatggtccccgttcttcttgtccggtttgttgcaactggaatccttcaactggtctaaatcatttatgttttcagatatttcgtctgctttgcttgagcctgaaatggattcgttatcctttgctataccaaacacctgccctaaggataagtttatggataaagtgtttttggacgataaccctcacaagatctcagattctactgatgaggctccttcgatagaaattaataagcacctctcctctccgcctattttagtggattctgatttgaggagaagtaagagactaaaggactctagggctggcttcaagcttggatcatgttcaaaaaggaagtgtctgatgtgtcaacataagtttgatggtccacccactctatcgtcagaggaaaccgaaagggaattctttgatggggcctatttgaaaattttctgcccgaattgccttgatacttttgcttacgtaccttccattaggaattcttga

SEQ ID NO: 31020 - DNA, 96 bp, Zea mays
  Peptide Sequence Number=SeqID_74395
atggggctcggtgtatgcggctcgctctgccaaggtaaagaaggtgtcgaggcggatctccaggagttccaggacttcgacgagttcgtggattag

SEQ ID NO: 31021 - DNA, 507 bp, Zea mays
  Peptide Sequence Number=SeqID_74396
atggacggactgagagtaattgctcgccggagttggaaccgccctgaacttccgcgagcaataccgagagctaggccgaagctttcccgcctggtgatagcttcgacatttgctcttatcttctttggatctatcttcatcttgtgtatccttcatcgtagcaaagaggcctatctcctgaaggcccgtaacagacggcggccacgcagggcccgttacaatgggccggatcgcacgcgggcctctgagctggacgaggccgcactgtgggatgacttcgtcgcaggtcttcgtctggtgccgaatcagcgaagggtgtccctgcctgttttgtctctttcagaccggcggctgcagcgaagacttcgggcgaagggtggcgtctttgccttcgccccaatatttgccctccgagggaccagatcgacaaagtcacctggtgccgaagacgtcgctagatggcggagacgctgccctcgttcgaagtggttccgcgggggtttttga

SEQ ID NO: 31022 - DNA, 880 bp, Zea mays
  Peptide Sequence Number=SeqID_74397
cctccacggcctggctccacttccgcgcactggttcggccactgctgcgtgggggccagcagtcggaatcgtcccttccccctcgtgttcgcatgaactgaaccccgggatccgcgtggatgtcgctggccgttccaacaaacccagccgtagtcaccggagaaaccccctcggccgccccctttctttcggatctggactctcctgccctcctataaagcttggcggtgctgcccctttgccgaactaccatggagccatagcggatacctcgtggagcagagagcctcgacggatgagagagatagagaaaacggatcgggtgccgctgcgtttggctcagtcgtggtggttgttaggactgagttcggactccgcgtcccggtgcataaaaccagctcgtgaccaccagatctcgcctagccatcccgtgccctcggccatgctccttgatgactcttttggtctcgccggcgctcgcggtgctcagggccgtgccaagtcaggaggatggctggttgaagtagatttcctcgccggagttactgggcaccgctatggaccaccttgtgtcgttggcggtcctcctgtgctggcgaatctcggtgaggaccccgcagctagtctctcccttatctctatatcgtgtagtagttcctacttgaagcttgattactgcgtggatcgggccgaatcgcggttatggcgctccgccgtggggaggtaccgccgccgtcgctgtctggggggaatccgggcatggcgccaccgcgcccgtacgcgcgccgccgcgggaggggtgtgcgcgtccgagcttgactgctgggaggttggtggtgatctcctggccgttggttcggatgtgatcggccgagattaa

SEQ ID NO: 31023 - DNA, 391 bp, Zea mays
  Peptide Sequence Number=SeqID_74398
atgtcgacggcgagctcccccaaatgcggccacaaacaccagactgagggccccaggaagcccaaggtcacctcctcggtgcgcctgacgacggagacccgaagcttgcgtgcggcggcgaagcatcggccgatcttcacggcgatggatttggcggcgctcggttggaaggggattgagcagacatacggggcccgcaacgatgcaaaaggaaccgcagagccccagggtaatcccttgcggtcgcacgggggtcagttcgatgcgtcgtcaaccgattccgaggatcgcgcaaggatggagctcgcccgggtcgcgcgggcgaaggaagggggcgagtctgacgtaaagggcccaccagccagtgaaatgggcgcgtgcgcggaggctg

SEQ ID NO: 31024 - DNA, 237 bp, Zea mays
  Peptide Sequence Number=SeqID_74399
atggcggagaagagaaacagcgaacaagctcaccgaggagatagcggctgcgtcgggggccccacacgtcagccgatcacgcgcgtggtggaggaaaaatgggctgcgcagaggttatcctccacaaattacaagttgggtattacagtaaggctgatcaatgaagtaaaggatgaagctgagcattgcttttataagttggtcaaaattttattagcagttactaagtgtaagtaa

SEQ ID NO: 31025 - DNA, 462 bp, Zea mays
  Peptide Sequence Number=SeqID_74400
atgccgtgccgccccggcgtccccgtgccgccccggcgagcccctcccctccccgcgcccttccccggcctcggccccgcccggcgagccgcccccgtcccgcgcgccggcgagcccggccacgccctccccgcgcccgcccggcgagccgcaccctcccccgcgcgcgctcggccccggcgagtccggtcgcgccctccccgcgcccgcccccggcgagccacccccgtcccacgcgccggcgagcctagccgcgccctccccgcgccccggcagccgcgcccgccccggccgagcccctgccccggcgtgccccgcgccccacgccctggccgcgcgccggcggccacgtcgcgtgccccgtgccctggctgcgccctcggccgcgcccctgtccacgcccgtgccccggcgactcgcgtccctcgtgcctcacagttcgcgtgccttcggcacgcttaa

SEQ ID NO: 31026 - DNA, 558 bp, Zea mays
  Peptide Sequence Number=SeqID_74401
atggagtctgttctccattactcaaatgtttatccagagctgaagcccacttggccattgcaaaggtggggccttgatttgctaggcccacttccaccagcacaagagaatttaaggaataatgaagttaatcttcaaccagcccagagggaagtggccagacgaattactcaaagtggtgtggagccacaacacaacaatgtcaaggtcaacaggttgaaggatatggacggcaacgacattcctagatcttggaatgcgaatgagcttcgacgctctacaagagcaatatcccccaaagatgtaaatgtaaaaaccgagcgtgcaccatcgagtgcaaagagaaaaggaaaaacaaggagaagctcgaaagacgtccctaaggggatgcagagcacgacgaagctacaaaaagccgttcctaagggagcacagcgtaagttttctgctcaaaagtcgttcctaagggaatgcagagcttacagcgaaaagtcaacgctgattccaccgaagtataaggcgaagcgcgaaaagtcaacgcgataccgccgaaagtaa

SEQ ID NO: 31027 - DNA, 481 bp, Zea mays
  Peptide Sequence Number=SeqID_74402
ggccgcccagctcccgcgccgccagccgcgcggagcacccacgccgctgctccccggccaccccgcgccgcccagcgcccccagcgtcgcccgcctgccctcgcccagcgtaggccgcccgtgccgccacgagccgccaccgtcgtccgccgccgttctaagcttccgtcgaccagccgtggccaagccctcttcgtgcaaccactccgccgtcgtcgccaagctcttccccatcgaaagatattctatgtctaccggtgtgatcgattcgacggaattgcgttctcgtggcggctcttcatcgcagggatccggggtcatgggccacaacacgccaccaccggtgataccagcaccaggaggagcttatgcaggggagggagctactacaggagagaatccaaacccgttacacgacttcgtcaacgagttttttgcttatggaggtagtggtcacaactccaacaaccccgatatgtga

SEQ ID NO: 31028 - DNA, 438 bp, Zea mays
  Peptide Sequence Number=SeqID_74403
atgcaggaatccattgcaggaccgccatcgcagcaaaatcctcccgagggcctccctacactgaccactcccctactgcccttgcccctttcggttttaatcccttctggactgggcctcgatttcccgaaaagatcagggggctgcgcgcataaaatcctagactcagcgcacagtgaaggtggatggcggatcaacggccctgcgcccttcttcaaccccaggtcagggacggcggcgcacagagtttccccacggcagaagtcacaggagttcgacgggacggtgaccccccttgctcccccacccatctacaacgagattcgcaacaagaagaaacactgggacacaccggaggtacttaccgacgttgaagggttacgaagagagctagccatggccgagcgcagcgcagtggcggagcaagaagtgtggtga

SEQ ID NO: 31029 - DNA, 453 bp, Zea mays
  Peptide Sequence Number=SeqID_74404
atgcggctgcgcgccgccgccggggacgcgcccgcaggggccgtgcgcgcaccggccgggggcagggcgccgcaccgccaggcaggggaacaaggtggtacactcccaaaccctagaaatcgaagaaatcagagaagaagaatggaggagctcaccggggaagaagaccatcaccggagacaaggggaaatccttcgattgactgagattcagaggttcgatcgacgaaccggactcgtcccggcgaagccctcgatgatacgaacccagcggtaccctcagatttcacagacgatgcatggattgggagtaattgctcaccgtagttggaaccgcttcgaacttcggcgagcaataccgggagctagggatcgaatttggagaaatcgtttcgtgctctggaatgggctcgacgagaagccggacatgcatatatatctagggttcgaatga

SEQ ID NO: 31030 - DNA, 516 bp, Zea mays
  Peptide Sequence Number=SeqID_74405
atggccatgatgggttcaacatcgaaaaagatgtacctctgccaggaagctagcagtagcggaagcaatgatcccattggagatctggaagctcaggtggagcagcttcgaacagaattgcgtcataggaataatgtgtgggtcgaggatggtcagcgcataaatgatttaagaactgacatccggtattgcaagacgagcttgccgaacgagatttggcactcgactggaccgtcaactcgtgttccattgcttgggaccgagaagccaaagctcgtgctcgtgtggccgagcttagcacgaccatcgacaacttacaggtatactgcaatacattacatgaggaagttcatgtactatattcgcaactacacccggacgtacccgccgaccccattggaatgggagcatgaccttctggaacagcaggagaagcacttggtggggagttatgccgtccaagactcgtggacaggatggtgcaggaacctcccgtgggagggagactactcctaa

SEQ ID NO: 31031 - DNA, 189 bp, Zea mays
  Peptide Sequence Number=SeqID_74406
atgggacaaagccctgagtacgaagtgtactttcgcaagtcttacccgtcaaaagaaaagactgtcaaggatatgctggctttaagggagtcaagtattagtctgcccgaggcgaagcttacccatgatgaggcatgtgaccagttaaagggtcctcggttagcaggcctacatcgagacggtccttaa

SEQ ID NO: 31032 - DNA, 459 bp, Zea mays
  Peptide Sequence Number=SeqID_74407
atggctgcggcgacactttcttggtcccctatgagcagtaccccctgcctcaatcacgctaacggaggatctcttggattagcgcaagatggacgaggagcatccggcgaccgcatatatacctatggccaagatctgaaccctaaggacaccaagacagattccacaaccaaatccctagattcgcgcgtgcacgagctcgccttgttctgttgcaaggtcgatgagctgacccgtcgggtccacacgattttgggtgttagagtgcagcacagggacgatggtcaacggcgaagtggtgtggtccgggcaggaatcagacgttacatgcagcgtcatcatgatgggtgcattgaggcgaagcaacttcgtgaacaacatgtggccattagatgtgatgagtacatggatatcaactatatggtgaagacccaatcaatcatagagtcccaagtttaa

SEQ ID NO: 31033 - DNA, 252 bp, Zea mays
  Peptide Sequence Number=SeqID_74408
atgtgtccagaagaagtgatatactccaaggcatcaacagtgggtacggacccccatgggaaagtgccggacccgtggatacacagttcggacctccaagttggtctaggacccccacatgcggcatgctcagtccacgatacatgggccacgcagttactcacacgttaccatatcaagggcaatgactcaccattactcgtgcagatttcccaagttgtcaggaaaaagaaaaagaaaaatgatgaatag

SEQ ID NO: 31034 - DNA, 822 bp, Zea mays
  Peptide Sequence Number=SeqID_74409
atgcctcacggcagcgttccaaccgatttgggggaaatccaaaattcgcgagctatggtggatgatttgaggcgaggagtggtgctctatgcgtgtaacaagaaggcggagcagggagggcactcaatttatagcgaatttgggatgagaatgttcacggtggggctcggatttctcccacgacggtcaggcgtcgtggcaaacaatggtgcgatgacacgactggatatctatgatcatgaaagcacgaatctcccaggcgagcgcgaatcgtggcagaagatcgtcggcgccgggttcaaagttgatcagaaaccactgtcagtttatgttcagtgtaccttggagaggaccagaaaggacttgaaaaaggccaaggtgttgaggaggagcagcaagggcgtccacaacaggaaggagatcaagtccgagtcggctgcgactccatctcgggttctaggaccagtctacactaaaatggacgcccaagatgcatccggactccaattgcgacggactggatatggttggaaagataacgagattatggataagccttcgtggcgaggtcactcgtgtgtcacgggtgataaccaactgagccgtggtgtagtgattgcgaggaatcgttcgctcgaagccttggatcatcaacgtcaagatctccactcaatcaagttatcgtatctcatggaagatcgggccgcgtcttctatcaattggtatcagatttctaggttgcccgtgagaactgtcatttctactagatacttgtacctcctttcttgtgctttggtccaactgttctattacattttctag

SEQ ID NO: 31035 - DNA, 1725 bp, Zea mays
  Peptide Sequence Number=SeqID_74410
atgggaaagcatgcaaagtgcagatcagcagatgcaactgcagaccgcgagacagtagaacgcgtgactgctggttctctgattaacacaactctgctactccatcccatagtccacgctcgaggcacgtataggcttgcctggaactggaacggacggggaacaattgggacggtttcatttagggatgaaaacgggacggatacagccggatacagggtcatcccgtatcctaccctaatgtatttttctcggatatgggaccggatacgggtagttaagattcgggacggatacaggacgggatcgggtaataatctggacggaaaaagaaaaaacgggtacccgaattccgggtacccgtatccgacccgggattttcgggaaccgctcgacgccgaggtgcggcaggaggaggctgaggccgagtccgtcctgctgcggcggctgcaggttggcctcgtcggcgccggtgacgcgctgcaccatggcgcggaaggtggcggcgtcggtgctgatgcacgtataggcttgcctggaactggaacggacggggaacaattgggacggtttcattggccagtcagggctgagaccacctcggtcttcttcctgtacatcacgttccacaagtccagcggtcgggaaccgctcgacgccgaggtgcggcaggaggaggctgaggccgagtccgtcctgctgcggcggctgcaggttggcctcgtcggcgccggtgacgcgctgcaccatggcgcggaaggtggcggcgtcggtgctgatgtacatggtgggcgcgcgcttggacggccgcggccggcgccgcttccccgcgtgcccgcccgccgggcccagccggcaccgcgtggacgaggacagcgacgctacgcccgtcgaggtacagtccatcactgccacgacgccttgcatcagcatcgccgctgtcgccgtggtgacgaggccagaggtaaggcacgtataggcttgcctggaactggaacggacggggaacaattgggacggtttcattggccagtcagggctgagaccacctcggtcttcttcccgtacatcacgttccacaagtccagtggtcgggaaccgctcgacgccgaggtgcggcaggaggaggctgaggccgagtccgtcctgctgcggcggctgcaggttggcctcgtcggcgccggtgacgcgctgcaccatggcgcggaaggtggcggcgtcggtgctgatgccggcgtggcagcatctgctgtgaggaaatggcatggggtttcaatcggatggctgaccttttctggacgacgtggctgctgtgaggcactgagaatcctcgtagctattaagactttagatttcgatgttaagggagttgccttgaagcttataattgaaagtaacacgatcgctatagctttctttgtcgtcgaggccatgactctcctcagcctcgggcgactactctgggccagcaacaacaccagaccccaccacatgggtgggtctggtgccgccacgtgtccagagaaagtggcatactctgaggcatcaccagtgagtccggaccccatgggaaggtgccggacccctgtatatactgttcgggcctccaagtttggtccaggacctccacgtgtgcaaaccggacccctggaatgggatccggacccccagtatggggtccgggccgcccacagtggggtcccagggttccaggacagaacatag

SEQ ID NO: 31036 - DNA, 246 bp, Zea mays
  Peptide Sequence Number=SeqID_74411
atggctgctggccggagctggagctcaatctgcaatagaggggggctcggccatgggaagaagggggagcgggctgccctgcgtggaagaggaacagggagggcgccgggcagaggagacgagagcagagagctcggcggccaccatggctgggctgtggagcagaggacgcgcccaggaggaaagggtggcgccggctgctgctgcgcgagggagaagacagggaggaaaggttgtggcggctga

SEQ ID NO: 31037 - DNA, 390 bp, Zea mays
  Peptide Sequence Number=SeqID_74412
atggccatgatgggttcagcatctgaaaagatgtacctctgtcagaaaattgcggaacgagatacatccattgactgggccataaattcacgctctttcacctgggattgtgaggccaaggctctagcccgcgtagtggaactaagcgcatccctggaaaatctgcaagaatattataacaccctgcatgaagaggtgcacgtgttatatgaccggctgcatacaaatgtgccaccagaagttgcatcgatgggagccggaccatctggaatagctaatggagaacctgatggggagttggacctttttggagcccctccttccatgaacctcgcaaatgaacgttcccccgatgctggcagtggagcggccaatgacgaagataattag

SEQ ID NO: 31038 - DNA, 195 bp, Zea mays
  Peptide Sequence Number=SeqID_74413
atgtccgcctcgcccgaacccatctcaggcgataaggataaggcgtgcctgaaggccaatgggggcagccgcattcaatgcgcatacctacccaacccagagctacatgtgtacagtggcaacaagactgcgggacttggggccttcccctctcccactcagcttgtaacccctactataggtactcaggtgtga

SEQ ID NO: 31039 - DNA, 345 bp, Zea mays
  Peptide Sequence Number=SeqID_74414
atggcccaacccctcggccttgctcttccgaacgcctcacaccctcaccgatgcctgaacgccggtgatcaccaagaaaccaagcgcgacggtgctcgcaagctcgccgagcctcagccactgcaggccgaccaccccagcccctctccacctagtttagcttcaacgatagcttccctagaggctagtgaagctgcccaaaccctcagactgaacactacttcactggagacgccaaatcacttcgtcggacttccttcacccagggcatccgtggtccaggcaccgatgagctccaccgcctcagcccatggccagaccgactccggccacctccgacactaa

SEQ ID NO: 31040 - DNA, 144 bp, Zea mays
  Peptide Sequence Number=SeqID_74415
atgccgcgatgtccagccaagaagaggaaaacgctggcgatggccccacgcgtcagggagaaccagcgccaatgcgtgccacgagaggccagaagcccgggcccgcctggcggcgctgaggctcacgattgtgaattaggttaa

SEQ ID NO: 31041 - DNA, 204 bp, Zea mays
  Peptide Sequence Number=SeqID_74416
atgtgtcattggtttagggagttcattgagctggcggccccacctgatagtgtagcgcccgcgcgagcgtgggatatgctgacctgcgggccccggatgtcggcgccaccagagcagaagcgagatcagggctgcgcaaaggaaatggctagatgggccaaatggagcggtggccggcccatgcgcagatgcaacaacacataa

SEQ ID NO: 31042 - DNA, 807 bp, Zea mays
  Peptide Sequence Number=SeqID_74417
atggaggtgacgttcgcgacgccggggggacgggagttcaccctcgaggtgtggtacttcgcaacggtgcgggagatgaaggaggcagtccacgtgcgcgaaggcatccccgttgcttcgcagcgattcttcctggccgggcaggaggacgacggcctggagctggacgacgcgcgcgacaccgcgcactacggcatcgtccagggctcccgcgttctcctcctcctccgcgacgacgcgcctccctcggcctcgcccgcccctgccaccgccgtccacgtcaccgtctcggcccctgagatcgggctgtgcagcgtagccctcgacgacgtccccacctccgacaccgttgcccgcctcaaggagctcctccaggaccgcaccgacggcgcgctgtccatcgcgaggacggtccttttcctcggcaagacggagatggaggacggcaagacgctggcggaatacgaccctccggccgatggcatggacttgagcgccgttgtgcgccagcagcccctcgtggcgtcgggtggcggcgccgaggccaggagccagcaaagaatcgaggtgagcgtcatgtttggcgagacggtggtggcgttggaggtgggcgccacggacgttgtccgggacctgcggaaggaggtggagaggctgcatctccccgtccgcgacagcagcggcaacgaatacttcttcgtgtacaagcagaatgttatggatgaggaccgtacactgcggtggcatgaggttaagaacggcgacaccatcgagatattcaacggcaccgtcaccggcggtgcctga

SEQ ID NO: 31043 - DNA, 1110 bp, Zea mays
  Peptide Sequence Number=SeqID_74418
atgcaggcggcatgcaaccacgccaagtgggcgcacttctccaacttccaacacgcccagcatggaggcccaggcccacgtgtcgtgcaaccggcgcgccggatgctgcgtgcgagcaactgcaccgccacccgcgccattgccgcgcctcctcgactgcggaaccagtaccgcggctcgaggcaaccctacgcacgacccagcagcgccagcctggcgcgatggggaagcgagcggcgcttccccttcgccataatgacccgcgtcataaaaggagccaggctccgagccttcctactgatcagaggttcgaaggctggcccctcggaagggttcaacggccgcctcagagcgcgtgggctccacacccactactggtcagaggttcgaaggccggcccctcggaagggttcaacggccgcctcaggctactcgggctccgcgcccactactgatcagggcgggaacgatcttgtaacggaatcccatcagagggaggcatcgagccctcagaccccgtcgacaggggaccgggtccggcagatcacccgcagctcaccagagacaccatgttcggcgcccaccgagggcaacatggcgctttccccctcctccttgtggaaaggcgacgcaggggccgtcaacataccagcccgagaacttgggacccgaccgtacacccgggctacggccagctcgcatgagggaacgaccagaccagccgaagcattacgcgaggcattaagacctcggaggagtcaaaccactcctccgaggcctcgggggctacacccggcgggtgcgctcgcgcgcacccaccggaacaaaatgcaaccgagaaagactggtccccttgcaaaaaagtgcgacgaaagcctccaagcgagtgctaacactcccttcgaggctcgggggctactgtcggggaccataattaggggtaccctcaaggctcctaattctcagctgagtgaggctgacaggcagtcaggcctggccgcagacaccatagcgaactccgctccgcccaacctagggctcggactcaggctaagccctggaagacggcgaactctgctccgcccgacccagggctcggactcgggctaa

SEQ ID NO: 31044 - DNA, 366 bp, Zea mays
  Peptide Sequence Number=SeqID_74419
atgcagtggctttttggggcaacatcatatggcaagattgtagagggcatgttgctttacaactttgctgcagatcttggttggagttgttatgggaaatcgagaggaaactcagcttcaactttggttgtcaggcgactgatgaagcccttgccatggtacagtagttccaaactgaagaagatcgcagaacgtgaagaagagatagaagtcactgaagagcaagtacaaccacctttggacactcaggccgggaatcatttctactttgacatctgtggacctgagcctgattcacctgtgaacgaaggcaagccccggtgcatttgccacctcccttgctattttaaaatctttctcacttga

SEQ ID NO: 31045 - DNA, 432 bp, Zea mays
  Peptide Sequence Number=SeqID_74420
atgcagtggctttttggggcaacatcatatggcaagattgtagagggcatgttgctttacaactttgctgcagatcttggttggagttgttatgggaaatcgagaggaaactcagcttcaactttggttgtcaggcgactgatgaagcccttgccatggtacagtagttccaaactgaagaagatcgcagaacgtgaagaagagatagaagtcactgaagagcaagtacaaccacctttggacactcaggccgggaatcatttctactttgacatctgtggacctgagcctgattcacctgtgaacgaaggcaagccccggatccactttagtaagcatttctgcaaaacagagtctctgaatattgaaaagccttaccttgactcccacataaccagcatacccttgagagtcttttctttagtcgggtaa

SEQ ID NO: 31046 - DNA, 555 bp, Zea mays
  Peptide Sequence Number=SeqID_74421
atggattggagctgggacggctggcgaagggagcgagctggaagaggagaccggccaggaactcgcgagcaggatccaagccagccatggcgagaacagaggagtggacgcggtggctacctgggtgttcaatgccggcaaggcgagccagagccgcgtccaagcgcgagtagagcatgggcgatggccagaggcgagcgcacggctacagagagactcaaccggctggaaggagcagagggcgcggtaaccatgggaaggagacccgagcagggcaagcgcatggccatggagacgagggaggagctcagcgaactcgaagccgcgcgccggccagggagcagcagccggccatggaagaggaagctaggggaccgcggcgcgcaggggctccacggcgcacagatgccagggcgcgcggcgagcttgagagaggctggagagcgagctggggctgggatcgagcacggccaggaactgaggcacgcgttccacggtagaagcttcggctgggcgctcgacagtgggaagagaggatgggaatggctgatgtga

SEQ ID NO: 31047 - DNA, 204 bp, Zea mays
  Peptide Sequence Number=SeqID_74422
atgtgtcattggtttagcgagttcattgagctggcggtcccacctgacaatgtagcgcccgcgcgagcgtgggatatgctgaccgactggccccggatgtcggcgccaccacagcagaagcgagatcagtgctgcgcaaaggaaatggctagatgggccaaatggagcggtggtcggcccatgcgcagatgcaacaacacataa

SEQ ID NO: 31048 - DNA, 484 bp, Zea mays
  Peptide Sequence Number=SeqID_74423
atgacagacaatacttatcagcccgcgaaagtctggacgtgggataaatccgctggcggcgcgttcgccaaatatcaatcgcccgagtacgacgcctggctgattcgtattggcgatggcgatcaattctccagcggctttgtcgaagtgaacccaaactcgaagatcccggcgctgcgcgatcatacgcataatccgccgatccgcgtgtttgaatctggaataaatgatgattcatatcaaaagctcaaagaagagaatgagaggctaaaaatgagcttgacacaactaaaaggaaagtgcattgctcaaccttctcaagataaccgtgatcacatggtgaaaaagcttgagacgggaacaaccgtggcatgcactacatcccttgaagaaaatgtcaaggaattgaggattgccaagaggaagaaacaaaagatgaatttcagcacctcctacaaaagcctcaaccacgcctctacaaaag

SEQ ID NO: 31049 - DNA, 429 bp, Zea mays
  Peptide Sequence Number=SeqID_74424
atgggcaagaacaacaagcgcaagcgtgagccgactcctcaatcagaggacttcggtgattcggagtactcagaggaggagttctcctctgagtccgaggggtctccggctcccatccctctgcgtgagtcgtctgacgattcagacgactcccaggggcttgcggcggaggtctggacttacatccgggccatcgagcgctccgggctcgagggctcggatgagtcggagtactcctcggacgaggaggactcgtccgagggcggtggcggcgatggcgacgacgatgacgacgaggacgacgaaggcagtggcggcaatgacggtgacgacggcggcaggggcggcagcaaggatggcgacgacgacagcagtaggggcagcaacaggggcggcagcggcagaggcagcaacagggccagtggctag

SEQ ID NO: 31050 - DNA, 762 bp, Zea mays
  Peptide Sequence Number=SeqID_74425
atgtccacgttctctagtcctagaatgataagaatcaaagagaataatggcaggatgattaaaaatggaaaagactgtgttgaggcgttcccagagcttggtgctaagacccatcctgaatctctccctcttcttttcatttgtatctgcatggtagccagcatactcacacatatcattgaatgcttgagcatactgcaacactgtgtgattcctttaagtcaaggccagaaactcattgagtttacggtccataatgtctgctggtatatgatgccctctaaaggccgtcttgaattcctctcaggtaacaacatgatcaactggctgcatagcgaggatatgatcccaccatgtcctggtaggtccgcgaagctgctgtgtggcaaatctagtcttggcggaatcggaacatgcccctcaagtagtggtattttggattccaccactcggagccatatgtctgcatcaaggggatcctctgccctagtaaatagtggtggctgggtgctgaggaattcctggtggttgtggccagtgggcgctgatactgctcgccacccccaaagtgctgaggttgttgctgatgctgtgcaagctgccgcagaatcttcttctgttgagccattagctcctgcatcatgggaggctggggcggtggtaggggaatctgctggttctgcccacgacaagctcttcctgccatctgaaattaaggagttcctattgttactcatgatctatatttctggtaagcaatga

SEQ ID NO: 31051 - DNA, 550 bp, Zea mays
  Peptide Sequence Number=SeqID_74426
atggcgcctcctgttgacgtggccggcccgcgccctaggttgggcgatgtggaggatcctccgaggtcgaggtcgagtctgtcttccgaggccgaggtcgagtccgagcccctgggtcgggcgaggcggagaccgtcggctgaggccagggctgagtccgagccctggggtcgggcgaagcagagttcgtcgtcttctagggctgagcccaagtccgagccctgggtcgggcggagcggagttcgccgtcttctggggcttagcccgagtccgagccctgggtcaggcggagcggagttcgccgtcttccggggcttagcccgagtccgagccctgggtcgggcggagcagagggctgagcccgagtccgagccctgggtcgggcgaagcggagcttcgtatgggttgcttcttggcgaagacagggcctcgggcgagccggaaatatgttcgtcgctggagggggccctcgggcgagacagagatcctccagggcctttgcagctttatgctgatgagggttaccagctgagaattaggagacttgagg

SEQ ID NO: 31052 - DNA, 1182 bp, Zea mays
  Peptide Sequence Number=SeqID_74427
atgaacaaaaacactggcattcaaagtgccatacaaacggaactccggttccacctccgcagcaacgacaacgacccccgctccgggtggccgaactgcagcagcgaaggcctcggggcagacgctgctgcaaccttgccctcgcccacgccgacgctcgaggggcgaggacaagggccgtcagccctccggcagatccccactcagatcctctcggacgagtggggcaccgacctccgcgtggaggcgtcgtaccggtgcaaaggtaggaccgccccagaacacgaatgccgccctggcagcacgcgatatattgggcggtcccccccgcgcgcacggcgcggcaaccgccttccggcaggagggggcaccgggagccaaggtgacgagcccgacgcgctgaggctgacgacgcccgccgtcgaccagccccgcattgtcgaagtccgacccgcccgcagggccagtgagcgccctctccctcaaacgccgaaggagaggccgacccatgaacccgcgcgggaggtagagctccggctcagcccggcctccaccccagcgaggatgatgaacatccttgaagctgagggtgggaccaagatcgcagcccggcttgcttctccccacccaggggctgatgagaagaagaagccaaaccgccacgcgcggtgcatgcaaccgcccagcagttacaagtggccctccacttttgcccagaccaacgggcgaaagggcggggcagccatgcaagcggcatgcaaaccgcgccaagtgggcgcacttctccgacttccaacacgcccagcatggaggcccaggcccacgcgtcatgcaaccggcgcgccggatgctgcgtgcgaacgactgcaccaccacccgcgccactaccatgcctcctcgactgcggaaccaatgccgcgactcgaggcgacccagcagcaccagcctggcgcgacggttaatgcggccaaaaatgggccagcagtaatagcggtggcaggcgggcaggagcagcggtcacgtcgtcagccaggcttacgtcctatccaggggcagcgagagaaccctctctcacggcgtgaagacgacgcgcccgtgttccgttcctcgaacggcccgcgcacgcgcaacggccgccccgtgaaccactcgccccgtcacattaactccgcggcgggatag

SEQ ID NO: 31053 - DNA, 591 bp, Zea mays
  Peptide Sequence Number=SeqID_74428
atgaaggggtacgcgctcgtggccatcggatctgagatccacagtctgaaagctgccatgattacggatatccgtggcccttcgatggctgatcaaagcacacactttaatctaccaaagcggtggcggcgatgctcaccggtgggcggcatccagacgtccaagtgcctcgaacccaagacttactggtgctataaaatgagtaggacgaggcgaatgatgtcgaaggcatcacacctcagattgaagcgacaagagttccacccatgtgacaccacggctccaaggtgtatcgtcaacaccgacaagcaattcggctggagatgctgctgctgcaagcctgcaggactgagtcaatctacacctagcacctacacgttttttgttgttggctccgttgcattggtggtcgggtgggccggcccacaggactgcattacgactgggacccaacctattgatcctcaggctgtctatgcaagtggtggaaaagtttatggaagaggggagggtcatcaaggtatgctgctcgtagctctcggctctccatctcagatgcaacggaagttgagggactatgagctgaactaa

SEQ ID NO: 31054 - DNA, 664 bp, Zea mays
  Peptide Sequence Number=SeqID_74429
atggcccagcatataatacacgagatgggggccctagaaaatggggtccctgtgcagtcggaccagatgcgttgggccatgtcgggtcaaggtcgagtccaagccccaggtcgggcgaggcggagaccatcgtctgaggccaaggctgagtccgagccccggggtcgggcgaggcggagttcgtcgtctgaggccaaggctgagtccgagccccggggtcgggcgaggcggagttcgtcgtcttccgaagccgaagccgagtccgagccctggggtcgggcgagacggagttcgtcgtcttccggagccgaggccgagtccgacccctgggttcgggcgaggcggagcttcctatggcgcccgagggcggacttggctactgtcagcctcactctgtcgagtggcacagcagtcggagcgacgcaggcggcgctgtcttcttgtcaggccggtcagtggagcggcgaagccatccttgcattaaatgcttctgcgatacggtcggtcggtgtggcgatctggccaaggttgcttctcggcgaagactgggccttgggcgagccgaagctttgtgctgatgggggttaccagctgagattaggagtcttgggggattatattgccaaactgtctgactttgacctcgcaaacgttggccctgaag

SEQ ID NO: 31055 - DNA, 486 bp, Zea mays
  Peptide Sequence Number=SeqID_74430
atgggcgcgattcaggtcaaggctccgtccactcaagggacgcgatctcgcctcgctcgagcccagcctcgggcaaaggcagccgacccaggaggattcacgtctcgcccgagggtcccctcaagcaacggacgcaccttcggctcgcccgaggcccaggcttcgcggagaagcaaccttggccagatcgccacgccaaccgaccatatcgaaaacagcgccgcctgccctgctccgactgctgtgccactcgatagagtgaggctgacagcagctaagtccagcctcgggcgccataggaagctccgcctcgctcgaccccagagctcggactcagcctcgacgccggacgacggactctgcctcgcccgactccagggctcggactcaacctcaacgccggacgacggaccccacctcgcccgaccccagggctcggactcaacctcgacgccggacgacggactccgcctcgcccgaccctag

SEQ ID NO: 31056 - DNA, 1035 bp, Zea mays
  Peptide Sequence Number=SeqID_74431
atgcagccgggctgcctgatgaaaatccttgaagccgagcgatggctgaaagataccaacttccgcgaagttgcgttcctccaacgacgacaaaacgaaagcaacgcgggcgctccccatccgggggctcggaaggtggaagggcgcgatgcatggggagagtgtgaagacatggttgccatccaagggggtcgccctccttttaaaggcaactctccccacttgcgtcctcagccgtcactgacggagtcttcaccaacaagctccaaggtcttccccctacgacacgggagctgggtcccacgcgtcatgcaagctggccctgggcagaagaagccaaaccgccgcgcgcagagcacgacatgcggcacctttggcaggcgaagcaggcgacgcttcaccttcgccttaatgaccgcgtcaaaaaagggatcgggaaagggggatactccgaaagggatccttctccgcgaaggaagtgggccccaagccctcctactgatcagaggttcgaaggctggcccctcagaagggttcgacagccgcctcagagcactcgggccacgagccctcctactgatcagaggttcgaaggctggcccctcggaagggttcgacagccgcctcagagcactcaggctccgcgcccactactggtcagaggttcgaaggctagcccctcgaaggggttcgacagccgcctcagaccactcgggctccgcgcccactactgatcaggggttcgtaggctggcccccgaagggttcgacagccgcctcagagcatgcagagcgagggatgactctgggtcaaggctccgtcccactcaagggacgcgatctcgcctcgcccggagcccaggctcgggcaaaggcagccgacccaggaggattcacgtctcgcccgagggtcccctcaagcaacggacgcaccttcggctcgcccgaggccgaggcttcgcggagaagcaaccttggccagatcgccacgccaaccgaccgtatcgcaggagcatttaatgcaaggatcgactga

SEQ ID NO: 31057 - DNA, 843 bp, Zea mays
  Peptide Sequence Number=SeqID_74432
atgccgcatcgccgccccgaccagagggccatcctaggagaagccaccacccccatggtcgtccttgtggggacaatgacctccgtcggcagtgggagccagacgaggaaccccaggcgcggggcggtgggagggcaagcaggagcccctatcgacggtgagctctgtgaggagaagctcattgcggacgacatggaaagtggggaaaggcactgtctgcttgatgagagccttcaggtggccgtaggggggctgaggtcacgcagaaggttcaacaccaggacgaaaggacgtgttgaggtggagcagccaagcctctcggttcccaaggaactggtcctcaagggcgtttcaagcctagcgagcggtgccctcctgctcatagtgacgcccatagcgctccagcgcagttacccggaaggtggtcaggccctgttgaagctcgacgaagagttaatcggtgggagattggttgaagctgtgggaattgctcgctggacttcggcttccgccgtgcgccgtggagagctcgggttgccacttcaaaccgcgattccacagcaatttgctccccttccacgcacaggtcaagaaccgctccccagaaaagatcgtatttttcatcgattcaaccggtttctgtacgggaaatcgctgctggagatctcagagaaccggaagctcggagcttttgctccgtttgcgtcgaatctgccttgggagcggataaaggagcggcctttcgagctcgtcggagccgcccctgaggaggcgaaaggggacgcggcggcggcgccatcagctgtagggcgctcgtggaagtcggtgaagccggtggtttga

SEQ ID NO: 31058 - DNA, 681 bp, Zea mays
  Peptide Sequence Number=SeqID_74433
atggggagcgcccgcgttgctttcgttttgtcgtcgttggaggaacgcaacttcgcggaagttggtatctttcagccatcgctcggcttcaaggattttcatcaggcagcccggctgcatcccctcgccagtggccgggctgagccggagctctacctccctcgcgggttcgtgggtcaccttctccctcaccactcaggggagagggtgctcaccggcttagcggaaggggcggacttcgacaacgtggggccgaatggccgcaagcgtcgtcagctcccgcgtgcccggttcgctggctcagctagctctggcgcagcttccggtgccaccttccatcgttgggcggatcacggctatctgcccgacgtgcgggcggctgtcgcgccgcgcgcaccgggggaccgcccaagatgtcgcgcgctgctagggcggcgttcgtgttcttgggctatcctgcctttgctccggtacgacgcccctgcgtggaggtcggtgttcgcccgtctgggaggacccgggtggggatctgccggtgggcagacggctgccgtcgttggtgccgaggtggtggcggctgaagaagtcctcgtcgccgacgagatcgccgccaccatccacgctccgggcctctggctctttggctttgatagcttgtcctcgcccctcgagtggggatga

SEQ ID NO: 31059 - DNA, 243 bp, Zea mays
  Peptide Sequence Number=SeqID_74434
atgtcgccgtccgaggctgggtcggactccgccgaaggtggagtcgatgccgagggtgctgctgctcccccactgatgtctgatcctgcaggaatcagtttatctgtagtaattgcttatccgagcaagagttacttttcacggaaggtgatgagtgagaaggtgatgagtgagtcgtcgtacgccctcgtcctcggggatccgtattccaagtccgtgggcaggatagcttcggccccatag

SEQ ID NO: 31060 - DNA, 2370 bp, Zea mays
  Peptide Sequence Number=SeqID_74435
atggaggtcgttgagttggttccttgcgcccgcaataaatggggcaactggtatgagttttggttctacgttgcagagggcacagtcgaggaccatccggggctccccgtggccgagatgtgctcgcattattactcagcatacccgcagtttgaagtggcgaaggaggatgccgatgaaggggccctgcggggcgcggccagcctgagtagcgggcgcgatttggttgaggagtttgtggcgtatggggtgtggcctttggcgcatggctgggcgctgggcgaagtatgccctcgccagatgccttcccgtggtgggatgctggtgcgaagtcccgccttcgcactggatctgcgtaaccgcgatcctgctgcatttgtgcgtgaggcggaggatagggcggtgcggattgttggtcggtacgtgccgaagacggagcgcagctgggatatacgcgggtccaacgaccgcttgaacagggtcttcgagttgaaccgtctgccgtatggtggttatcccgggcaagacgatgtggatcatcgcgggaagaagccggcggcagagactggagacgaccccgcaccggcggccgccccatcctctaagaagaggaagctaggtactgctacgggaggactgggggtttccgatggttttgctagggagttgatgaggacatgcgcggcccccggggggaggatgtcttcgcccgagctccgggagtcttcggcgcggatgctgaaggttaccaggggttggtggcctaagaatgttcctatcccccgcgcggccggcgaagacttttttacatctcgcatggttcatgactggagagtgtttccttatggacggaatattgctgctgttgtgtcggcagtgatggacaaggatcgtcagggagctgcacagaagcgccaggcggtcgtcaggctgcctgaggctaggccgaagaggtcgtgggggactgcgaaggctgctgcccccggcggcagccagccgacgctggcggcgaagtctgccgcccctgggtccagcagggtgccggaggccgtgaaggcggccagcgccggcggaaccaagccttccccggccggagctgcgaaggcccgagaattgcctccaccgggcaagcgcgttgccgacctcgccaccgagattagcgtggacgattatctcgctgggtcgggcgaagggcaacttgttgttgttccgcctgcggtggcgaccgcggcggctgccgtggtgcctagggcgaggggtagcgctcccagcgccggcggtgagattccggcgctcactgccgtcaaggacgaggcgggcgctgtgtcccaccggctgaaggaggtattgagtcaggcggctgacttcgctgaccgcgtggcgtcgggggcccttatggcagttgtgtctgccgaagtcgagagacttcgggcgcaacatgctgacgccgtccgggaaaagtcggccgccgacagcaagtgccgcaagctagcggagaaggtggccgcgctggagggcgagagggctgacctccggcgccaactggcggaggagagaagggaggctaatgagtctctcgccaaggcgcagtctgcgcatgcggaggccaatttggcgcgggtggagggtagccttgccagacagcgcgccgaggaatgggaggagcggttcaacgctctgcagacccgtgtggagagggccgagggttcgatgcgctcggaggctgagaggacacgcaaacagcttatggactcataccacaagctgggcgcgcggaccgctgacttcgaagtgccagaccaagagcctggacttcgctgcctcgagtggctgcaggaggagttgctggcgctccccgccattgtggaggggtttatgtcctatgcctccctggtcacctgcgaaggggcgatgaacatgctgtcccgcgaagggtgccggcactatgaggtcttcgaccaagctaatgaggatttcgagcgcgagatttacaaggttgaggaccctgtggtgaaggaatccgcgggagccctcttcgaccggatgtggggtccccacggtcgggaggtggtcagggagcggtccgacacggcgagggttcaggcggcgcgtaacgagaaagtggaggacttcggggctttgaacagcgcgcagcctgattcggagtcgaacccggtggcggctgtgtccgaggtcgccccggcgccgcccccagaaaccgtcgaaggcgcccctgatgcccccgcagccactgcgggcggcggtggctcgtcgccaactgctgcgccgagggctgaagatcgtgtgaagatggcggcggagccggcagcggagggtcctgcgacgactgggtcttcgcaggtggcttag

SEQ ID NO: 31061 - DNA, 237 bp, Zea mays
  Peptide Sequence Number=SeqID_74436
atggagacccgtgcactcttgttttgcttaggaaccagggagaagaccgaaagggaaaaggatttgaacatgctggattcggactgcagaagaacaccaacttgtgatggtcaccacgatctggacgagtgccctagtggccagggtgtcacgctccacaagatcgtgacagccataggaggtggtgtatcggttgctaaggcgcagcgtcttgggaaggctgtagtcgggccgtga

SEQ ID NO: 31062 - DNA, 414 bp, Zea mays
  Peptide Sequence Number=SeqID_74437
atggaatgctgttatcaagttcttatacgttcttaccaagccacagtggtgaactgcaatcaacaggtggaaccggtgaaagattggatgagcgattgcgtggagaaacagaaacctgctcgtcgtagaaatatgtggagttctgggtgcaaaggacggatggaactagcagaatggcagtaccgtaaatattgtactagtgatgccaaaaaggcactagtaggaatcacagaaaacgaagaagaagtgactgttgaagaagaggagactactccatcaacagaaaatccacctgccgggaactgtttctattttgatatttgtggaacagagcctgactctcctacaactcaaggcaagccccagtgcatttgtcacatccttgctgttttaaactctttatcacttgaatga

SEQ ID NO: 31063 - DNA, 309 bp, Zea mays
  Peptide Sequence Number=SeqID_74438
atggcgagagtagcgtgtaccctccgtggcaagaggctaaacggttgtgtatctgtgctctcggttggcgtgaacccgaccatggagatcagtgcaatcttgttttgcttaggaactagggagaagaccgaaagggaaaaggatttgaacatgctagattcggactgcagaagaacaccaacttgtgacggtcaccacggtcacatgcgggctccgattggaatgttcaagcacaacatggaaaacttatcaagtctactttcatatggatctggaattatagtcatatctgttctgaggccgccgtaa

SEQ ID NO: 31064 - DNA, 183 bp, Zea mays
  Peptide Sequence Number=SeqID_74439
atgacagtcggggtcattgaggcattgtacgccaaggtggtgagcccctttctgttgccagggaatcgatggggacagttgatgtactctggaggatatggttgctggagtgacttggccatccaccctgccaccgggctggacagtcgagtgggaccctaccccagcagaagaggagcatga

SEQ ID NO: 31065 - DNA, 384 bp, Zea mays
  Peptide Sequence Number=SeqID_74440
atggaagcgcaccagtatcggcgctacgccgagaagcgattcgcgcacgacgcgctcgaccaccgcgacgccgcggtccgatcgctcgtcgccaggcttcgggcgtgccagggacatacacttaagcttctgtcagcttctgattggattgaaatgttccttactttgagcattaagggcataaatgtggcttcgtccatgccatcgtttaatatgtatcttgaggacgtgcaattcatcgtaaggggtgcatggcctagggggaggatggcgactaggttcatcgatggcggcaagcacctcgtgttcgaccacgcgacacagttcttcaccgcgagcatccgcaccgctgcagggccagggtattaccccatgacctggtga

SEQ ID NO: 31066 - DNA, 408 bp, Zea mays
  Peptide Sequence Number=SeqID_74441
atggtggccggagtagggtcggccgcgtgcgcaggcgatcgggctcatcggcggcgcgtgctccggcctgctcacggcggtagagctcaatcaaaacgctcggggagcttcacgggaggtcaaaagtgttgtaggcgcaaggaatcgaagggtggctcaccgtgcagctcggtctacgtgcgacagcgatcggatgaagtctggcgctgtcaatccggcacctccggcgaagtagtgctcggtctgagggctcagggagcttcacagagctccaaggaggcttgccgaggggttggattgtttggaggtgggccggagtggccggtccacggtggtcggggctccggcggccgctggcacgccgtgagcagagagaactccagcgatcttgcgcttgggcggggctga

SEQ ID NO: 31067 - DNA, 294 bp, Zea mays
  Peptide Sequence Number=SeqID_74442
atggagcccgagctgctgggcgccggccatggagcaggggcttgcctagaggacgttcgccatgggaggagcaaagagctcgcagggagaaatgacgaccggaaggggagctcggctggcgtccagcttggaggaaggagctcgccgcaggggaaggctggcggccatgggactcctgcgcgctggtggctgttgccgtggagcagggaggaagaagggcgcctgctgctgcgcgtgggaggaagcagccagggagaaatgaaagtggcggctaggggtgggagtgaaaaatag

SEQ ID NO: 31068 - DNA, 60 bp, Zea mays
  Peptide Sequence Number=SeqID_74443
atggcggtatcttcggattcggatcatgagaatacagagcatggtcaggacgaagcctga

SEQ ID NO: 31069 - DNA, 204 bp, Zea mays
  Peptide Sequence Number=SeqID_74444
atggcagtcggggtcagtgaggcattgtacgccaaggcgactcagctagtgcttttggcaaaccaaacccgtcagccaaactgctgcatgtctagaggttctctggaggatatggttgctggagtgacttggtcgtctaccttgccactaggttggacagtcgagtgggaccctacctcagcaggagaggagcaggaggagtga

SEQ ID NO: 31070 - DNA, 843 bp, Zea mays
  Peptide Sequence Number=SeqID_74445
atgaagattttcccttacggaaggaatgttggtgctattgtatcggaagtgatggagaaggattgccaagatgcgcagcggaagaagcgtcgggctcacatcaggttggcggacccgaggcaggaggtgaagatggcgcgaccgagcgcgaagccctccgcccccgacgctggggcggagtttggacagctggctgttgttccagcggcgctatctgccggcccggtgaccgggacgaagggtgacacgggggcctcgaaggaccggtggtctaaattctatgccggtggggagatcaccttcgctgccgctacgaagggcgtggccgccttagttgcgcagcagctgaaatatgtggccgccttcgcgggacgcattccttcgggggcgctgaccttggattttgccaccgagaggcgacggcttgaggggagaatcgagcgcttccggacgcaacatacggaggcggtcagggacaatcttgccctcaagcgcgccaccaacacggagttcgggctgaagagcctgcacagctactccgagaagacggaggcctccacctacgctggggttgaacgggcgcacacgctattcgtggatgcgtaccgcgagctcggcgcgcagaccgccccttttgacagatctagcaaggaggtgggtctttgctttctcgggtggctgaaggaggagctagaatcactcccgtctatcgcgacaggcctcatgtcctacacctcgcttgttacctgcgaggggtcagcgaatgccttgtcctgcgagggatgcaggcatttcgaaatcttcgaccaggcaaccgaggacttcaaccgtggaatcttctag

SEQ ID NO: 31071 - DNA, 342 bp, Zea mays
  Peptide Sequence Number=SeqID_74446
atggcacagaggcgggagctgaagggcactcagcgcctcaagctggctctggtgaagaccctgcggcgacgtctgctctggcacaggttggttgctgcacaggttccgacgtccgggcctgcgcaagcaacccccgatgatgttgatactgatattttgatggctgcgaatgcaacaccttttaatggaaatgtggctgagggttctgaacctgggtcgtggtcctcggacggggatgattttgggagtcctttttcgtggattgaggagtattttgaggaggatttagactactttgctacgttggatttggccacgttggagtctccgccgcaaacctga

SEQ ID NO: 31072 - DNA, 141 bp, Zea mays
  Peptide Sequence Number=SeqID_74447
atggccgtgatgggttcaacatctgaaaagatgtacctctgccaggtgaggaagcagcaattttttgttgcttttgttccaaggtggtgcctaaggaagaaaatcaagactgaagcctcgggaggaagtgtcctcctttaa

SEQ ID NO: 31073 - DNA, 381 bp, Zea mays
  Peptide Sequence Number=SeqID_74448
atggctgcctgccgatcagatgccacgtgccttgaagcttcacacgtcgcagtaaaccgctccatattgctggctcgtcgccgggtgatgtggagctccaatccagcaattaagcgtggggaaatgtttgttaaggattcaatttggtgtctaccgcacgggagcaccgaaaacgaagaagagatagaagttgaagaagcaaggactacaccaccaccacctgaagaaccccaggccgggaactgcttttattttgacatctgtggagcagagcctgactcacctataacacaaggcaagccctggtgtatttctcacttgcttgatgcattaggtgataggagttgcgtgctaaacaaattgatgcatttccttccttga

SEQ ID NO: 31074 - DNA, 1005 bp, Zea mays
  Peptide Sequence Number=SeqID_74449
atggaggactccgtgtcgggcgctggcgctggcgccgggcgtaagaagctgaagcaccggctcgcggcgatgctctcggtgttctcccggcgcgcggggggcggcagcaggaagcgccgcgacggcgaggacgaggcgaagccgccgccgccgctggcattcccgtcgtactccagcctcggcagcggcaagaagcccggaggtggtggtggggtcgccgaccgccgcctgtccctgtccgcgccgctggttcacatcaccatcgactgcgcgggccgccgctccgtcgacgcggcggacccgtccctcctcctctccctcgacgccgccggcaggagggcggaccggcggtccacggccgcggggcccgggctgttgccgcacgagtccggcggcgagtgggagggccgcaagtgcccgccgtcctcgccgtccgtggcgcgcctgccgccgctgccgccgctggcgaggtggaagcaggggcggggctcctcgcgccggccgtcgtcgcgccgcctggccagcagctcgtcgtccgacgacgagtacgacgaggactcgaggaacctcttctcgtcgcggagcttgtcctccgactcgtccgacttctacagctgcccgcgccggaacgccagcgccagcagggggcgcgcgtccgtctcgggcccgtgccgcgcgctggcgctggcgccggcgccggcgcccccgcgccgcggcgcgtcgcagagctgccggtacagcttcgagctcccgcgcggctcgtcggcgacggacggcgggttcgcggtggtcaagcggtcggccgacccgtacgaggacttccgcaagtccatgcaggagatgatcgcagagtggcccgctggcggggccggaggcggcggcgacgacgaaggcgagcacagcgcggagcggctgctggagacgtacctcgtgctcaactcgccgcggcactacccggcgatcctcgcggctttcgccgacgtgcgggagacgctctttccgtga

SEQ ID NO: 31075 - DNA, 771 bp, Zea mays
  Peptide Sequence Number=SeqID_74450
atgcttctccaccaccgcctcctccctcgcctacttcttgttccttccacacatacctccacactcctctgcccctcccgtttgccgcgccgcctctccctctcgccacgcttctacgcgctgccccacctcgcggcaccccagaccgtcgaccactccgacgatgagggggcaccccagggggaggggcagatcaagctcccgctcgaccatctcttcgtgccgcccggggcaacaatggatgcgggggaccaggaggccgtgagcgcacgggtgcttaagggctccaacatcgtgctgggcccatacgcgcgcggcgacgcacaggtggtcaacgcagattttgtaaagagcagcgtgcgtcccgatgactgccctcgggacggccttccggagtttgcactcgttggccggtccaacgtcggcaaatcgtcgctgctcaactcgcttgtccgccgcaagcgccttgcccttacctccaagaagcctgatgcaagtatacctgccaagaagattgatcttgactatgctagttggcttggccaaaacaaggttcccatgacccttgtgttcacaaaatgtgacaagcgcaagaagaagaagaacggcggcaggaaacctgaagaaaacgtggaaactttccagggcctaatccgcgaatacttcgaggccgcgcctccttggatcatgacgagcagcgtgaccaaccagggccgcgacgagatactcctgcacatgtctcagcttaggaattattggctcaagcattga

SEQ ID NO: 31076 - DNA, 261 bp, Zea mays
  Peptide Sequence Number=SeqID_74451
atggaaaatggtaaaaagaagaagaccatgtcggcagatgataaatcttgcaaaagccatgagcacagcaagctagagtttgcaactttgttcacctatggctgggtaatcctccatgtcttgaatattcagtggagggccgaggtcgagacaggatcacaggagatcggcgacgagtcgaggagatgcaggcctcgaggcagaagggttgagaagagccgaagtcagcataccgaggcatgccaccacaccgacagctga

SEQ ID NO: 31077 - DNA, 147 bp, Zea mays
  Peptide Sequence Number=SeqID_74452
atgaccactggttatggtggtttagcttttgaagatggcaaggaccatgacaccatcgccatgggtgggaactgggacgcccttctatatgatgacatcgattgggaggccgccgctgcagataagttagtcattagtgttagatag

SEQ ID NO: 31078 - DNA, 922 bp, Zea mays
  Peptide Sequence Number=SeqID_74453
gcgcaacaggaggtctccgcctcgcccgacccaggggctcggcccccgcctcggtctcagaagacggtctccgcctcgcccgaccccagggctcggcccccgcctcggcctgggaaggtggactccgcctcgctcgaccccagggcccggcctcgacctcgacctcgggcggaatcgagtcctcgcccgaccccggcctcggcctcaggaggagtctccgcctcgcccgaccttggggctcggaccgaccacgccacaggggggatcatcattaccctacccctagctagctcaggctacggggaacaagaacggcgtcccatctggctcgctccgggctcaagcgctcatccgacggccacgacatcacatgcacatggctctagcacctctccgacagctacgttggcatggccctcatacgagagggtggtcgcgcgggaggacgggctgacgaacaggctctctctctccctcgcgaacgcttgtaaccccctactgcaagtgcatccgccctgggcgcaggataacacgagccgcgaggcgctccgctataattcaccggactgtctggtgtacaccggacagtgtctggtgctccaaggaagagtggctctggaactcgccagcttcgggaattcgcaacggctagtccgctataattcaccggacatgtccggtgtacaccggactgtccggtgtgacaacgaagcaacggatacttcggcaccaacggctacctgcagcgcattaaatgcgcgccagcacgcgcagaagtcaggcacgtccatgttggcgcaccggacactctacagtacatgtccggtgcgccaccggacatccaggcgagcccagaagacagagctccaacggtcggaacccaacgactttggtgacgtggctggcgcaccagacatgtccg

SEQ ID NO: 31079 - DNA, 264 bp, Zea mays
  Peptide Sequence Number=SeqID_74454
atggccggtttcaagtaccattccgatgtttcccccaacaatatcatggagtcgactatggagactctttcggctaaagaacaacaaaaaatcgaggactatatggagcagctgattaaggagtccaaggcaaagtacctggccaatttcaaggtggacaaaaatgttgaaactaaagaaaaccaacaagatccatcgactgcaaatgggcatgcccaatcccaaccactttctgggaagctgatgaactcttataccgaatag

SEQ ID NO: 31080 - DNA, 924 bp, Zea mays
  Peptide Sequence Number=SeqID_74455
atggctcgtcttagacacactgcacggaagttagtcattcctttcttgcctactcgtctcgcggagcatccgcttcgccgtccagtgactggtcagtctagccacttgcagaggctgcaccaccgcctacacgaggagcaggagcgtcgacgacaggagctagagcagcaggactcttctttctcgcttcagcgggagatagagtctgtgaggagctgctcccctgtgctcccactggaggcgccccctgcaccaccactgagcaccccagccgctggagtagctgctggaggagacccagacgacggaggtggcgacagtagctcgagccacaacaccgacctttcagaggagcaagagctggaaggatgggttgcccgacccatcactcgtgacgctgctcgcggtcgtgaggtttacccgaaccgctgggaggcgacctgcttggtgcgcggtccggagaatagtcttcggggtgcggaggtctgctcagagcactattctatctctgagcgggactcagctgaggcggccatgcgagatgccgcacggcgtgcgctttcgcactacttctcagtgctcggtggggtagccgatggtctcaacctaaagtattacccccgccatccatctggcagcataggaggcgtggttgtctcacctgttggtgaggacaatcctaggttgagcagcacagtcaacctagccgtcgtgctaaacatggagttggaccatgcattagacgagctgattagggctcgtgctgagatcgcccagctacgggcagagcgcgcggagcatcgtcacctggaggatggtttccccgctcccatcggaactcagcacccgtaccgctcaccttggcgtggacaccatgcttatggtaaccccgactgcaggaccaagataaatttagaaccatag

SEQ ID NO: 31081 - DNA, 201 bp, Zea mays
  Peptide Sequence Number=SeqID_74456
atggccggaatcgctcggtccacgcgcgcaggcgggtgttctcgtcggcggcgagtataccagccaaaccacggcgatctggttcaatccaagggcacgagggttggacagggttggaaagggctgggctggccggtctacggtggtagtggctcgggtggccgcgggcacgtcgcgcacgggcaaacggtggtgaactga

SEQ ID NO: 31082 - DNA, 270 bp, Zea mays
  Peptide Sequence Number=SeqID_74457
atgctggtagactacacaacggtactcaatggaccaagtgtgttggtcgaaggcccgacgcagcagggtatcgagagcatcgtgaaagtgacacccgcgagcggcgtcacgagtgatgggtctagcgatccatccctccggctccggctcctccgagagctccgtgccgtggctcgaactgccaccggcgtcgtcgtcgtctccgtctccgttagggtctcctccagtagccgggatgccctgaggtggtgcaggggcatctctggctga

SEQ ID NO: 31083 - DNA, 432 bp, Zea mays
  Peptide Sequence Number=SeqID_74458
atggagcagaggattacccggtctacgctcaccggcggtcgggcgaagtctggcgaccgtggactggcttctccggcgaagcaaactccgattccttgctcggggagcttcaccgaggtgtgcacagtcttctccgagggttgggaagggttctgttggccggtctacggtggcaggggctcgggtggtcgcggggcacgccgtgcatggggcaaacgccggtggattcgggctccggtgaagtcgagcgtgcgcgggaggggtacggccgaagtccctaggggctttataggcgcgggcgcgggcaacggcaccggctgggctttggcgcgacgcggagcacgcgaggtcgggcgtgggcatgctctggcgcgcgcagaacgcgtcgaacacgtggaggtgttcatctgcccgtgttcaaaagcatgctga

SEQ ID NO: 31084 - DNA, 1266 bp, Zea mays
  Peptide Sequence Number=SeqID_74459
atggcaacccactgtaatttttacagaatttttggaaaagactgcaacctcgctgacagagagtacgtcctcgtgccggagcaaggagctgctcaggaggtagccccagatccagcaccagagcctgcaccagaggatctgcctgccactgctttggaaggcaagccccgtgcgcatcaggcgctggaccgggtggtcgtggaggccgggcggcacggggtgcggctgatcctgagcctggcgaacagcctcagcctagcgaacaacctggaggcgtacggtggcaagacgcagtacgtgcgatgggcgtgggaagagggcgtcggcatgtccgcctccaacgattccttcttctacgatccagccatccgcgactacttcaaagtctacctcaagagtcagcttgcctggaagcgacttgtagcactaggttctcatgcaccaaaagcatctccaatttttagtaaggttgcttgtgccattggcttggctgtgagtaggtctaatatagctccttaccttgtcgcttttattgcgggagagataaatatatttggcattgctgttcactccaagtatactgatggccccatttgcagagactcttggcactgcacacaaaagcaccagctcacagctttacctatgctaagaaaactgttgagaaagcttttggtcgaaagctatcagacatttttgaagagaaccctgttgcatctggaagtgttgctcaagtgcatcggactgttctacgattccgttgaccttgcaagggaagctgctcatctgagccggtttatctacaacttccgaaggtggaaggatgtatctttcccaagacctctctatccacatgttcatcctgctattttagttgagacttacgagcatggggagagtgtttcacgctatgttgatgaccttgaaggacatgatcgaattaaaagtgctctggcccatattggtactcacgcgctcttgaaaatgctactgatggagagggtttgtgagaacacggtgtctgttgagctcaagcaaactaagtcgaacaacttcgtcccgttcatccggtcaggggagtggtctaatattggaggtcgcgattacatggaacatgcccatgtttgcatctctgatctggcgaagaattttggctctaactcagcggttgatgaagtcatctccttctacggggtaattacctgttcactcttgaatatccaatccattcttcgacaaggaaatcatgtcctttggttcttctga

SEQ ID NO: 31085 - DNA, 495 bp, Zea mays
  Peptide Sequence Number=SeqID_74460
atgccctcactcaaaataacagtattccatcttggttttgatgtttttgcttgggtgattcatatgttgactattgagtcactcgtaagtagaagaggaactgaaaggggcgagctgaaggctgacaaagacaaaattatgagagagtatagagctcaactggatgctgaaagagctcaaaagctagcaaacggaagaaatcactcaaggttaaactcaaaatcatcatcttccaagaaagagaggaaggataaggacgcaaagaaaagaagtaaaaagaggagaaagcacaaaagttcatcagagtcaagttccagctcatcttcagaatcttcaagcagcgacgatgaggataggggtttaaggaagtctagatcacagtcgagatcaaagagaacaaggaaggaaaagaagagccggtcaaggtccaagcgcagaggcagtgaaagcgaggaggaaggcccgatacgcctctctaaattcttcgggaagtaa

SEQ ID NO: 31086 - DNA, 135 bp, Zea mays
  Peptide Sequence Number=SeqID_74461
atgcaccggcacgagtgtcgtgggatagcagcaccacaacagcaggtatcttcggaatcaggaatcaggttgcgggtatacagaagcatggtcaagacgaagcttggctgggacagcgatcatgacgaaggttaa

SEQ ID NO: 31087 - DNA, 543 bp, Zea mays
  Peptide Sequence Number=SeqID_74462
atgccggagctggagatcgagcgcgtgcacagggagttcaagaagagagagacgcagggagatgggagggcgccgagttgggtccgagccagggacgcactcgcgcggaaccagggagagggagagctcgacgagctgagcgcaggggagagagaaacagggcgcggtggccatggcgagcagggacgagctggaggaagagagggcgagccgcagggaggagcgcgcagggaagaagcgtgcgtagggagctggagcatcgccggccatgggagagagaggcagctgggcgcgcggcgagcaccagggagggctccacggcgaggaggagaacggaggggtggctgggcacgcgccatgggagcgtcaaggccgagcgaacgcagggagatcaacgccgtggggaagagccgctcggctgggcgtgctcctgcggaagaaatagaggccgaacgcctaggagagagaaaggagataaggacgctgcgcggggctgaaacaaaaatcccagagggcggcgtaggatttttcctcctgtcttga

SEQ ID NO: 31088 - DNA, 303 bp, Zea mays
  Peptide Sequence Number=SeqID_74463
atggcgagaagacttacctgggccgcggacagactatttcggcccacggctcttctcgctgtggtgcgaccgacctgtgggtcccacacttcagccgctacccattcgcgcgcgacactcaggggcaagatcaaatcgtgcatgcattcaactgtggcccttgatcgcagatccgaggggccagaatgcgtaccgggtctctgtttttgcatgaaaacgacgagcaaagtcaatgaggatcctggtgagcagcaaacagaagtagctgagcaggagctcattgaaggcaagttgtgcccttga

SEQ ID NO: 31089 - DNA, 405 bp, Zea mays
  Peptide Sequence Number=SeqID_74464
atgaacgtatatgagatcactcttgctgtctcacaccccccccccacaggtcaagaacaggtaccacaaggtgaggcgcatggaggatgctgcgatgagttctatccacaccgttcgaccggcagaggtgtgattgcctcgccagttggtgagggcaatccgaggttgaacagcatggtcaacttggatgtcgtgctcaacacagagttggaccacgccctcgacgagttcggcaaggatcgggcggaggttgcagaattcagtgctgagtgcgcagcacgccactatctggatggtggttctcccgcccctgtcgggattcagcacccttaccgttcaccgccccgtggtcgcttcgactatggtaccccagactgcaggacccggatagatttggatccctag

SEQ ID NO: 31090 - DNA, 213 bp, Zea mays
  Peptide Sequence Number=SeqID_74465
atgcacgactttctccttgagctggcgctacttgattcttctggttggttgctggggcaggaagacgggctgcctggttgctctgatgctggtattgatttcctccttgctggttgttctaacggtactgctgatgctgaggaaactgcctctggtactgctgctggttctgacgctaatgctggtgctgggaaggtgtggttcatcagctga

SEQ ID NO: 31091 - DNA, 369 bp, Zea mays
  Peptide Sequence Number=SeqID_74466
atggtcaagacgaagcttggctgggacagcgatcatgacgaagtatttgagaacaagtccccaacggtaacggagctagagaccgagcgcgcgcacagggtgttcaagaagagagagacgcagggagatgggagggcgccgagttgggtccgagccagggacgcacttgcatggaaccagggagagggagagctcggtgagctgagcgcaggggaaagagaaacaaggcgcggtggccatggcgagcaggatgagctggaggaagagagggcgagccgcagagaggagcgagcggggaagaagcgcgcgccgcgatggagagctcttggacgagcggccaggcgagcaggaagccgcgcgaggaaatag

SEQ ID NO: 31092 - DNA, 369 bp, Zea mays
  Peptide Sequence Number=SeqID_74467
atggcgctggcagcgaggaagcaaggggaggtgccggggctgcaggaacagcggcgtttcgccgtggtggaactgcacaacattggggaaaaggagaagctcgctgcaggggggctgctcagccatggagatgtggtcggggaaggcgctggcttgagggagaaggggtgggacagcaagggggcagaggtggtcggcagccatgggagggccgaggttcctgatgaggacatcactatgagtacgactacaccagcagcacctccacatcaagcgccacttccttcattagctgggccaatcactcgggcccgtgccagagatcttaacttcgtcatgctactgaagaatgcgggcccaaaagaatag

SEQ ID NO: 31093 - DNA, 375 bp, Zea mays
  Peptide Sequence Number=SeqID_74468
atgacagaggaagctaacctcaaaggccacaacacagctcccaatcttcagggcaacaacaaagctctttcaggccaccagtcccaaggggcagaggcggcaggggcttcggaggaagatacagggatcaaccctaggaggctatattgtttattctatggtgaagataagggccacacccacaagaacatgccaagttacatacagaagcaaaaggagattgccgaagctgaggcgtggcagaatcagccgaagcagtcttacatactgcttcatgctactctccctatgtaccagacgagtcaaatacgtcttaaacagacttctgaagctacaaaactcgttcctaagggagcgaggacaaatgttacatag

SEQ ID NO: 31094 - DNA, 372 bp, Zea mays
  Peptide Sequence Number=SeqID_74469
atggcaggagcacatgtcacggtggatgcccagttgcaggaagtaaggggacaagttgatggacttgctgctgacattaggacgatgcatgaacggcttgattcaacggtcacttcgacgaccgcgcgtttcaaccagcttgaccttgctgaaacggcgactcgcaccacactcgacaccatcctggcacgccttgatgcgttgaccacaaggatggagcaggactacggcagttacactgagcaggaagatgcagatcgctgtggttcacaatctgttgaggaatattaccagttgttacaaaagggtatgcttcgttgtggtttggttgagtcggatgacgctgctaggcgcgttttcgtggtggtttga

SEQ ID NO: 31095 - DNA, 327 bp, Zea mays
  Peptide Sequence Number=SeqID_74470
atggggaagcctgtcccatcactcctcatgctcctcctcagccgaggcaggtacaatggatcaagcagtctcattagctgcgagaagcagacgattcgaatcgagtgtttatccttgcaagtgaccgcacttgtacccaccataaccggaatgggagaccacgtctcaggtcgcgtgaggggatatgtctgcgggcaggttcactcaggatttaataacattatgctaaaggaagaaaaaactaagttaatgagtaacttagggtttcttggtcatacgtggcttttagtggtttatgagtatcactctaggtttaggttttattaa

SEQ ID NO: 31096 - DNA, 90 bp, Zea mays
  Peptide Sequence Number=SeqID_74471
atgtcgaaggatggggcggcgttgggcttggtcatgatggcggggggtgacgccagtgggagtgacccggaggtgcacgcgaatatgcag

SEQ ID NO: 31097 - DNA, 1119 bp, Zea mays
  Peptide Sequence Number=SeqID_74472
atgaagctcatgaagaagctgacagagccagaaagcctcagccacgccatttgccacagcacaatactcggcctcagcgctggagcgagagacgacgggttgctgcttcaaggaccaggagacgaggttggcggtgagaaaaacggcgtacccggatgtggatcggcgcatgtcagggcggtcaacccaatcagcgtcgatgtagaccgccagctcaaaagtcgaagagggccaaaggaggccaaaagtcgagggggcgcaaagatagagaagggtccgcttgagagtggtgaggtggggctcctgcaccgcagcgacagtggcggagagctttgcttgagtgccgataagcgtggagcagggcttgcaatcgtacatgcctgcccgctccaggatgtcaaagacgtatttgcgttggtgaaggaaaaggccctgggggcgccgctccacgatgacctcgaggaaatggtggagcagacccaagtccttcatcgcgaactcgcgctgaagggcgacgatctcccaagagagggcaagggagagcacggtccgaacaatggcgaacttgacggggctgaaggtctcgttgtagtccactccaaagagggcaaagaaaggaatgggatgattgaccgccttggaggggaggcggttcaggaggtaagtggcgtgtggattatggagggcctcaatccagtaagaaacagaaagggaggcttgaaactggagggtgcgaatgagattggtgatggtgcaaatcatgtgttcggccttgccgttctgaggagaggtgtagggctaggacatccgcagttgcacgtcgcgcgagaggaagaaggcataagacatggagttgtcgaactcccacctgttgtcacactgaacagctcgaatggtgcaaccgaaacgagtcaacacccaagcaaagatgtgagagagggtggggaatgtgtcagacttatgagggatgggaaaagtccagaggtaatgagagaagtcaaccaggatcacaaaatagtactggttaccggagaggctcgatatcaaggaggcccaaaggtcacaatggatgagatcaaaggggacagctgtgcaggacatggaagaggtgtaagataa

SEQ ID NO: 31098 - DNA, 252 bp, Zea mays
  Peptide Sequence Number=SeqID_74473
atgtgcaagtacatgcaggggaggatctacaacatgggccacccaagccgtggcccgaagcatggctcatatgttgagactggaccagaacttggtgaaaatggtggaaggaagctccttggtaaagatgtcgacaaactgcgaagtgatcgcgacgaggacactgacatcaacgacagcgacacgctcgtggacgaagtggaggtcgatctccacgtgcttggtgcgctaatactgcacgggattggttga

SEQ ID NO: 31099 - DNA, 216 bp, Zea mays
  Peptide Sequence Number=SeqID_74474
atgtcgaaggatggggcggcgttgggcttggtcatgatggcggggggtgacgccagtgggagtgacccggaggtgcacgcgaatatgcagcgtgtcaaagtatatcgtttaaccaatgacgggcagtgggatgatcagggaacgggccacataacaattgactatattgagcttccactgtcatttgatgatgtaaacattgcttcacatatctaa

SEQ ID NO: 31100 - DNA, 162 bp, Zea mays
  Peptide Sequence Number=SeqID_74475
atgtcgccgaagcagcagatggtggagagtgggcggcggatggtggagagtgggcgacggctggtggtggcgaggaggtgcgagcggaggaggatcaccgggatcgcgataccaggttgtcaagggcgtcgacccctaggacttatccaaaccgactcctaa

SEQ ID NO: 31101 - DNA, 252 bp, Zea mays
  Peptide Sequence Number=SeqID_74476
atgaaacttgatgacttagttttaatgaagaagcttggttatttcggaaagaacaatgatgacttgataaggttaccgagtgacaaaatagttccagaaccaaaggatgatgaggtggtgaaggacagcgccgcctgcgccacaccgactgcagtgccacttgacagagtgagactgacaggcagtcaggtcctgcagaaggcaccacaggaaacttcgctccgcccgacccagggctcggactcggtctaa

SEQ ID NO: 31102 - DNA, 165 bp, Zea mays
  Peptide Sequence Number=SeqID_74477
atgcccggtggcgctcgctggaggtgtccatcgctcaattgtcgttccgtctcccacaacaccaaggtcacctgttcatcgcgagagctgagcaagagtcatggcatcttcgacaagtctgtgatggtggtggctgcgcagcgagtatcctacttatgccactaa

SEQ ID NO: 31103 - DNA, 189 bp, Zea mays
  Peptide Sequence Number=SeqID_74478
atggcggaccatcttcgggccgtcctcacggtgcagcagcagcacctcctcttcgccaagcgctccaaatgcgtgttcggctactaccgcaagttcgtccacgactacgtcacgattgcagccccactgactgcgctattgaagaaggacgacttcacgtggaacgacgacgacgccgtgactttctag

SEQ ID NO: 31104 - DNA, 354 bp, Zea mays
  Peptide Sequence Number=SeqID_74479
atgggggacttgtggactaacataagggctgatctcgcaaagatgcaagccacgctccagagggttgagcaagggctgctgcaaatcaaggcagcagtacaacatgagcagcaacaactggcgttgtccgtacggctccagacgtcggcggctgcgggcatacaagctgctgctcgtggcttccttgcacgacggagagtgcgggatatgcgccgacaaatgctcgaggcagccttggtgacggttgatctcggcacacaggggcacgacctcgccctgtcggacggccatcagcagcggcaccgggccgctatctccaactgcgagcatggtgtctggttttgggtcaaatag

SEQ ID NO: 31105 - DNA, 429 bp, Zea mays
  Peptide Sequence Number=SeqID_74480
atggagcagctccgtgtgacggccgcccattctgtggcgaagcaacgcaagctagccgagcatcttgagagcgaggaaggccaactccgctctgagggcgagggtgcccagaccgaagccgatcgcctctggggagaggagacccaacttcgggcgaccctctgcgaggtgagcctccgggtcgtcgaggtcgagtcttccctcggtgaggccaacgcccacctggagaggacgaatgtggagctcttgcgagagcatggcaccactgagggtttcgcggtcgatcgaaacgatgaggagctggacgtaattgaagaccaagttcgcccccacgccagagcgcttgccgaaagggtggacgtgaagaccctacttaccggcccctggagtctggcgtcgcctgctggtggctcgccccacgacgcctag

SEQ ID NO: 31106 - DNA, 1506 bp, Zea mays
  Peptide Sequence Number=SeqID_74481
atggacgggggaagtggcctcaacatcatgtacattgagaccttcgacggactagggatcacacgctccacgctgcgagctaacacgccgaagtcgaggtggtcgcggtcggaagacgcgcagcaaaagcctgatcttcgacagggtcgacgttcgagcgtcaacgatcggcagggcgacacaacaaaagagcaccggcaggccgaccttcctgcttcttcgatcgtccaggcgtcaaggagccccgccagggaggccgacggcagcgcacgcgtctgcgccggtcagggtgtccgtgcccgctgcagagtagaaggggtatcggtggatccggccgggaaggccacggcagcgacggatccagccgggaagacacgatccagccaaagggacggcggatcgagccgggatggtcgcagcaacgtggatccggccgggaaggccgcggcagcgacggatccaacgaaggcgaagaagggggtgggcggcggggcgtgtccaaccgggcaggggcctgcgccggacctggcaaagggtgttgacggcaccggcgacgggagaagctcgaagggggagacgctgctgagacgtcagcgcgagcaagggagggcagcggctgggaggaggccgccagctgagaagtccgcgcccgcgccttgggcggagctggggaagggggacccggccacggctggcagtgcgggtggaggtcccgtcgaggacgcgacggtgtcagcccacgcaggatccgagaagcccgacggcgtgcgacgaatgggctgctgcgcagagatagcagtggtggcctgcgtggaagtgaggccaagccaggtggggaggctgggcagggaggtggcaggagcggcgccgaggaccggcgaggggggcatagggctggtgcccacgccggcgaggtggcggggcaggaagccggcggagaggcctggcagggaaccggctagagcaacgccggtgatctgtgtggcgacggcggcggcctgtgggccaggtagggagctggcgctcacgccggcgagggggggcgacggtcgcgcggcctgcttccgcgtggggggccgagcccgtgcctgtggaggcggcggccgcaaaggccgcacccacgccggtgacggagacgagcaggggaggcacgccggtgcctgtgctgacggcggtggtggctgcggcccctgcaggggacgcgagaggctccatggaggggagggaggggagggaagactgggccggcaggggggaagaaccggcgtccggaggtggccggcggctggcaggggaaggggagctcacgtgggacaccactcccttggccggatctcgccctgcccgcccctgttcggacgcccaggcctctgcgcggctggtggagggtgggaggccgcccccgggagggaaggcggagcctcccgggggcagcggcgcaggaggcggctgctgtgggagagagccgccggcggctgcagtgggaagagaggaaagaaaccctaa

SEQ ID NO: 31107 - DNA, 285 bp, Zea mays
  Peptide Sequence Number=SeqID_74482
atgtgggtgaaactcgatgcagtcacggagaacagggctcatggcgtgatcgaaggccacgaaggtgccccggacaagttggtcgacatggaggaggacgtgcacaacgagggcagtaaagctggcgggcgaggcaagagccatcgagacgaagggatggagagcagcaaagggcgcgccgagggaggggcagcgaaggagctcaccgtggtgaacgagcgaccgaaggatgtcggggcaggggcggcgaaggagctcgccgtggtggggcgtgtcggccagtga

SEQ ID NO: 31108 - DNA, 513 bp, Zea mays
  Peptide Sequence Number=SeqID_74483
atgcaatgtcgtctctgccggtcggcctgcggggcgcgccgtcgggcttgtgcctggctaccgctgggtctccgccgcattgtccccggcccgctgcgccgctccaccgtgtcgcacgcagatccggaggctgtgggccatgccgcagccgatctaggggccacgggccttgccaccgcagatccggtagcgacatgccacaccgccatcgatccggagccgccgggggctgaaggtcgtgctgccgctgagatcgggtttgtgtctccatcacacccactgctcgtcgactcgcgcgtcatcgacatcaacttcgacaacaccaacttcttcatcttctttgaccgtgcagcgggcgtggcatgcggcgtaactagaacgcctgcctgtgccgcacctcatcgtctgcacgtccacctacgtcggcttggcgtcgccaccaccgatcgagaggctccaccttcgacatcacctttgccatcgtcatctccacctcgcacgccatcggcctga

SEQ ID NO: 31109 - DNA, 237 bp, Zea mays
  Peptide Sequence Number=SeqID_74484
atggcggcacggcaccggtcggaggaggcgcgctcgccagcggtggtcgacgccgacagggggaggcaggctcagtggcggtggcgtgatgtcggcaaagggagggacgtccggcggcggtggtgtgacgccggcagagagcacggctccgaaggacgtgagggcggacggtggggcggcgccagagggggaaagagtgtcagggacacagtgccggccaccacagccaaccactag

SEQ ID NO: 31110 - DNA, 423 bp, Zea mays
  Peptide Sequence Number=SeqID_74485
atgtcgtggtttcgaaaaccagaggcagtaagatttatgttcggtgggggtgctagtgcagactcactccgaatggtgaagacatggggtttatactggttcggatctttggctcgccgggttgctcgacggtgggttggtcagccggagctgattggtggagagttggtcattggagttggtcatcgaggagttggtcagccgacttggtcgacagagttggttatcggagagttggtcagccggcccgcctcgcagagttggtcgacagagttggttatcggagagttggtcagccggtccgcctcgcagggttggtcggcggacttggttatcggagagttggtcagtcggtccgcctcacagagttggtcggcggagttggtcgtcggagagttggtcggcggagttggtcatttttaa

SEQ ID NO: 31111 - DNA, 1935 bp, Zea mays
  Peptide Sequence Number=SeqID_74486
atggaaccggcctggtcgatatcgtttctggctcggtactacattgatccagtcagtggatatgaattccgctctttgaaggatgtgcacaactatcttgaaactggagatattagccaatgcgctgtgacaccaaagaagagcaccatctgcgaagatataacagaaagtcaaactcatactagtacatcaccgcagcacatgaggcctggtactgcgaataagggtattcagtgtgaaatattaacttcggatggtatcatggcgccatgggaggataatggaaatgatactgaacataccatgttaccagagcctgagagcttgaaagcaactcaagggtatggcaacaagcttgaaacttcagaacccacgagggttcaaccggtttctccacataatggttcaagacaaaccaaatctgttaaaaggaaagaatcaaatgcagaggtcaaatccaagaagcgtaaaaccagttctgctgtgactcgtgttcgagcgtcgccccgcttagctgcattaaatgctcatcttgatgtaagcatcgaacatgaagatgacatggttagcacaaatcatgtggactgggtacagactattgaagagagagccatcgatcaggcacagaaaagccaatcaggctcttttgatcagatacatgggcaaaacactaccattcattcacaaccaagccaattggatactctgagtcctacacagaaaaaacaggaaaacagttccaaacagttacaatctgtggtcacagattcttcgattccaaaacgaaccacacagaaatgcactatagatcagccaagccagccagacataaatcatatacgcacagatcaggaattcactgggaatcagttcccctcgagcctaccagttgacactgttatttcattaggggatactgaagaattcacagcgggtcactcacagccaagaaatagtgacactgcaggacaaattcaggccaatgaggaaaatactgccgatcaagtacagttgagcctggcagagacagtcattctggtaccggctattcaagaatatgctgctggttattcactgctgagcaaagctgacactactgatcaaacacaggccaatcaggaatacattgctgatcaagtacaatcgtgcctaacagacgcactcattccagtaaaagctattgaggaatacacaactgattattcacatattagtaaagctgacattacaaatcaaatacaggtcaatcaggaaagcactgatgatcacttatatttacgtcaagtagactgtctcgctgaaatgcagataattgagcaaaatttgtccaagcaacctcagctgagccaaccagacactggggatcaaatacgaattgatctggaaagcactaccaatcacttgcaaccaaactacgatgaaaattctatgctgcaatctggtttctcttgggctcctgaacagaacagaggagcccctactacagatttctggaaaaatgttgaaagtcaggcgtcatcggtttccatgccaataaatggagcgcctctttcaagctttccagcaaatgtcagattccaaaatgcagcagcagcagcagcagcagcagaacctgctttgccaccacaggttgctccaaccgaaacaggttccgatcagtctgggttggccttccaatcccttttcggaaacatctggtcagatccttgcatcgagtttgctttcaagacccttacaggcgacattcctgttctcgacgacacaacggctgtcacagactacttcccagagcaacaagacttgaataaagacccagcgccaaactgtgcaggctctgtgtttgacagttcaagaaaccacacacaagtcgacgtcaaccttccaccgcctgctccggatggtttctacgatggcagctggttccctccccaatga

SEQ ID NO: 31112 - DNA, 642 bp, Zea mays
  Peptide Sequence Number=SeqID_74487
atggactcgctcatggtgcatgacatgccaccgcaggaaagggtctgccccttattgcaccaacctccaagcaatccacgcagatcactcggggctgaaggactacatctagcacatgcgctcacgtgcacggagccacaaatatgggttcatgcccggtgcgtgacgaaccatcacaggaaaggggtacccaaagaaggccccaagacctcccaaaaatggtccgcctaccaagaagttcggtgggaaggcccaaaaggccacatggggatagcccaccaagttgattggcccatcgaacaactgtctgccgagcaacctagtgaggcgaggttgccgaccaacccgcccgctgagccacctaacgaagcgagactaccgaccaacctggtcgccgagcaacacagcgaggcgatgctgccaaccaacttgcccaccgagcaacccagcgaggtaagactaccgaccaaccagtcatccgagcaacccagcaagatgacaaccgactcccagaaagagtcgacctggtactatcaagccacattgacacgatgggacatcaccaagccatgctcgaactatggaagcagtgtcgatgggtctctgtcaggcacgatgccggacacggaggacaaagattaa

SEQ ID NO: 31113 - DNA, 441 bp, Zea mays
  Peptide Sequence Number=SeqID_74488
atgaccgtcaagacctcccctacaccctcgaccacctcaccagagacgatccgcacatcggcaatctcgccaccggtccaaacccaacttaggcactgtttaaaaatgttaagcaccctagtataccagattagcacagagttatctattaaacactacatctgcccaaaacttaggaaattaggaaaggaaataaaaactaatgaacaaagaatgtatatatttttcctagcccacttaagtaatgaagaacctaggaaaaatacagaggaccctagtccagaacaaattcaagattgcaacctcgctgacggagagtacgtgctcatcactgagcaaggagctgtccacgaggaagatcaggagccagctcccgagcctgccatcgaggatctccccgcagccccagcaattgaaggcaagccctggttttatgcataa

SEQ ID NO: 31114 - DNA, 177 bp, Zea mays
  Peptide Sequence Number=SeqID_74489
atggatacagttaagatgaacctgctcccaagaaggttgcctctaagaagccagggagctccaataacagagattgagtacaagttgataattaaaaccagaaacatgatctgcactatcgatgcatggcaaaagcgcgatgctcctctctacggccctaaggttgtgcccctctga

SEQ ID NO: 31115 - DNA, 177 bp, Zea mays
  Peptide Sequence Number=SeqID_74490
atgtggacgatcaggaaggtggcgacgccgcaggtggccgtcctcctgctgctcctcatcgtcgttgcgcaggaggcggcgccgttggcggaggcgcgcgtgtgccggcgccggagcgcgggcttcaagggggtctgcatgtccgaccacaactgcgcgcagtttgaaggtgtataa

SEQ ID NO: 31116 - DNA, 1917 bp, Zea mays
  Peptide Sequence Number=SeqID_74491
atgccgctttatctcttctcctctcccgccgccgccaagctcgccaccggcccacacgcgtccctgcaccggcggcgccagttcctcttccgagttccccaccgccccgtactctctctctccccgtctgctatttttgagcttctttctttctacttattgattggtgagctgtccgagcttggtttcttacagagccgccgcgccccactgctaacttcggcggctgagcgtccagcagggcgcaccatggctactgcggataccggagcgtccacggtgaccgattcgaggctccgaggtgggcgcttcttggtttggcactgcttgattgttactgcacttgatgaagcacagttttctattatttccactggtggcacggcatcaagtttggaagcatctggtgttaatgttacaaaagttgaagaaattacacagtttcctgaaatgcttgatggaagagtaaaaacattgcaccccagtatacatggtggtattcttgcgcgaagagaccaggagcaccatctgaaagcactgaaagagcatggcattgggacatttgatgtggttgtagtgaatttgtatccattctatgataaggtcacctcaggtgcaatatcttttgaggatggcattgaaaatattgatattggtgggcctacattgatccgagctgctgccaagaatcataaggacgttcttgtcgttgttgatcataaagactatcctgctctactggaatatctagaagggaaacaagatgaccctgatttccgcaggacacttgcatggaaagcattccaacatgttgcttcctatgattctgctatctcggagtggttgtggaagcaatctaataaaggtgttgtcatttttctgccaattttcatagatgtttcgtctcatgcagcagattcatttcctcccagctttactgtgcccctcacaatgaagtctacacttcgctatggtgagaatcctcatcaaaaggctgccttttatggtgacaggagtctttctctagtaaatgctggcggtattgcaacagcaattcagcaccatggaaaggaaatgtcctacaacaactatctggacgcggacgctgcgtggaactgcgtctcggagtttgagagcccgacttgcgtcgtggttaagcacacaaatccgtgtggcgtagcgtctcggcacgacatcctggaagcgtacaggttggctgtgagggcagaccccgtgagcgcgttcggaggcatagtcgccttcaacacgacggtcgacgaggatctcgcgagggagatccgggagttcaggaggccgacggacggcgagacgaggatgttctacgagatcgtggtggcgcctgggtacacggcggagggcctggaggtgctgaaagggaagtcgaagacgctgaggatactggaggcgaagcggaggaggagcgggaagggcacgctgctgtcgctgcggcaggtcggcggcggctggctggcccaggagcccgacgacgtgaccccggaggacgtggccttcacgaacgtgtccgagagggctcccgacgcccgtgagctctcggacgccaagttcgcgtgcctctgcgtcaagcacgtgaagagcaacgccattgtgatcgccaagaacagttgcatgctgggcatgggcagtggccagccgaaccggctggagagcctgaggatcgctttcaggaaggcaggggaggaggccaagggagctgctttggccagcgacgccttcttcccgttcgcttggaacgacgcggtggaggaggcgtgccagcgcggcgtggcggtgatcgcagagcccggcggcagcatccgggaccaggacgccgtggagtgctgcaacaagtacggggtggccctcgtcttcaccggcgtccggcacttcaggcactga

SEQ ID NO: 31117 - DNA, 549 bp, Zea mays
  Peptide Sequence Number=SeqID_74492
atgctggagggagccatctgtgttgaggacacagaaggcatcgcaaaccaggcggtcaaagggctcagactaacatcatcttacatgaacaatgagcataggtacataaagcaaattgagcttgaaagaggacataacacaaatctatatggccggagtcctcgcccgcctgcgcgcgcggaccgacctactccgaccatccctggagacgatccgcacatcggcgtgaccgtcaagacctcccctacaccctcgaccacctcaccggagcaatctcgccgccggaaattaggaaaggaaataaaaattaatgaacaaaggatgtatatatttttcctagcccacttaagtaatgaagaacctaggaaaaatacagaggaccctagtccagaacaaattcaagattgcaacctcgctgacggagagtacgtgctcatccctgagcaaggagctgtctacgaggaagatcaggagccagctcccgagcctgccatcgaggatctccccgcagccccagcaattgaaggcaagccctggttttatgcataa

SEQ ID NO: 31118 - DNA, 972 bp, Zea mays
  Peptide Sequence Number=SeqID_74493
atgaggacacttctcgatggatgtttgagtgaagatatgccttctagaacacggagtggacttgtcagaagaagccctactgttaagactctaagcaaggacaaatcagtcattaaggggctggcagatgggtgtctgaaagaagacaagcctcttggaacacgaagtggccttgtgagtggaagccttgctgccaaggcatgttccatcaaggctgaagtactcacaaaggggcagcatgatagatggctgaaaaatgacaaggctgctgcaatgcggagttcaaacccttggtcttcgtcgttcaccgccgtcgccgccgtgtcgcctacaacactggctccttcatcttcttcgactgtgctccttctcatcgacatcggcctcgacaacactggcgcagctagcggcgtgccaaccgattgcactcgacaacaccctctcgtgacgtctatcgtctgtcgcgagtttcttaaccatgcacgagggttgtcgctgtgtcgcctctttgggcagcaacgttgccgtttgtcgtcgaccctcgccgttgcatctacatcgtcgttgactccgccggtgcgcgtcttctgtgcacggtctgcaagctgttcgacacctgtgagctgcgtcggcacacccgtcgatctgcgttgcacctgcatgctgcatcgacaccctccgttgctggtctgcaccacgttcgttatcgagttcttcaccgtcaagtgtcgctattgcgctccactggcgctgtcgagtctcttgctgtgtgtcgtggctctcaccaccgcggttccaggatcctcgatgcatcgccacgcctacctcttcgccttcttcgagcacaatcttgttgccagcgtcgttgttggcacttgctctcctgggcaagttgatccaacgggaaagtggaaagagtatttgcaaagtttgtcgtgggatggcaaaagctttgttaatctacccctgtga

SEQ ID NO: 31119 - DNA, 327 bp, Zea mays
  Peptide Sequence Number=SeqID_74494
atgagctcctcctctgaaggcttatatgctgctggtgcttacataagcatgtatgctacagatatggatcaagatcaacggcatgcagctacggtggaagtgataatgcctcatgtgaccgaagcagatgttcatgccaaaaagcgaaacaggctagagcataaaagattaaagattgatgatattgctgaagatgacagtgatgatcatgattcacaagaccagcaaggtggatctgattcagaaataagaatggatcaagatggatctagacctgcaacacctggagatggaggatttcaattgaatgatgatttgattatttag

SEQ ID NO: 31120 - DNA, 333 bp, Zea mays
  Peptide Sequence Number=SeqID_74495
atggagtccgggatgtctgcgcagttgtatgctgctgtgcagtgtgcacagcagcggtgcccggcactgggcggttgggaacccgtggcgtggaagaagcagcttcctcctccaccaggaaatcgtccgaagtctcggcgcgtgccaactccttgcgccctgatatctgcggtctacgtagcattggcatgcagcgaaagcttccctggcaacggctcatttaatgctgaggcggcacatcacctgccagcggagtggacagggctcattaatactgaggcggcacatcgcccgcccgtggagtggacaggcggcgcaccttacccgcattaa

SEQ ID NO: 31121 - DNA, 609 bp, Zea mays
  Peptide Sequence Number=SeqID_74496
atgacaactagtcgggccaccggggagaccccgtccttcctggtctacggggctgaagcctacattcccccggaaacctttatgggctcctcacgggtccagtcccgtgcctgtatcaaaggatggctaatatcaggcgatgggtcctatggcctcgacacgtggagcctacatcctaggggggccaagtaccaaggaggagtcgacaacgccacacacaacaagaacaagcatcatacagataagagctatttaattgatagttcccaaaagtatgacctactcgacatcagtagggtcacgctggaagcgcgcgaccgccatctccgcgacatcttgtacgacctcccgggtggcgtcttcagcagccgggccagcggtcaccattggaggcggcaccgaagccatcaaagccaaagagatggagccgcagctcagctcgcatcccaacccatggagttggagctagaccagttcatggcggtgtaccatgaggcactggtgaagctcacgcgaaagatggagcaacagctcaactcgctttccacctcggcaaggctgatgaacatccttgaaaccgaatgctggaggaagaagcgtcgcccctga

SEQ ID NO: 31122 - DNA, 255 bp, Zea mays
  Peptide Sequence Number=SeqID_74497
atgtggatagctccagggccgtcacgtggccagataagacgatatattccaggatatcagcagtgggtccggacccccatgggaaagtgtcggacccctatacatcgcgattcgtttctgagcttcgaggaatcaacgatcaagcatggcgaccaagtgatcgaactcttcgagttctacgagatcaaagaccctgagcatctgtttggtgaaggcaagtgtcctctgacctattatgtcccatttactttataa

SEQ ID NO: 31123 - DNA, 438 bp, Zea mays
  Peptide Sequence Number=SeqID_74498
atggttggtttacagatgatgatgaggatggttatgatcatgcttatggtaatggttgcctttggtgcaatctatgctcagggaagctttcgctgcatgccaatgctacgtagaccgcagatatcagggcgcaaggagttggcactggcgacgagcattagttgctccaagtattacatccgttatgtccctgggcccgcatgtcatggctcagggtccttgtacgtgccccccttgagctataaaagggagggcacacggcgttacaaggcagactcagacacacttagactcccagactcacaagttcatacaagctctcaagctcaatacatcacacagtggagtagggtattacgctccggcggcccgaaccactctaaatccttgtgtgttcttgtgttcttcccgtttccacctagcaggcaaaacgcttag

SEQ ID NO: 31124 - DNA, 780 bp, Zea mays
  Peptide Sequence Number=SeqID_74499
atgccccctgcaccacctcagggcatcccggttgctggaggagaccctaacagagacagagacgacgatgacgccagtggcagttcgagccacggcatggagctctcggaggagccggagatggagggatggatcgctagacccatcactcgcgacgctgctcgcgggtgtcacttccacgacgctctcgataccctgttgcatcgggcctttgaccgacacacatggtctatcgagtaccgttgtgtagtctaccagcatcgtcgcgggctatacccggaccagtgggaggctacttgtttggtgcgctgttcggacgatggtctccggggtgcagaggccttctcagagcactattctattactgagagggatactgcagaggtagccatgctagatgcagcacgacaggcactttctcagtattgctcgttgttcagcggggtagctgatggcctcaacctgaagtactaccctcgccattcgaccgacagtgctggaggtgtgattgtctcgcctgttggtgagggcaatcctaggttgaacatcatggtcaacttggccgccgtgctcaacacagagttggaccacgcccttgacgagttgggcaaggttcgggtggaggttgcggaattgcatgctgagtgcgcagcacaccactatctggatggtggttctcccgcccctgccgggattcagcacccttaccgttcaccgccccatggtcgcttcgacaatggtaccccatactgcaggacccggatagatttggatccctag

SEQ ID NO: 31125 - DNA, 555 bp, Zea mays
  Peptide Sequence Number=SeqID_74500
atggttgtgaagcagtatgaattagcggacacatttgctgagttgattgatgatgtccttcgcgcggagtctggcgacccagacaatgttgcggaagcgcctcaaacagctaaacttccatatatatctcatcatatgtcgtcagaggcacacatccataagggtacccaaaatactccggacctgattatgccatcttcgcaaccgactacggagttgacaggcacccagtttgaggaaatacatgaaaagcaacaacaaatgtgtcgtgcatttgagggctgccctgacgatttggacgttactgcgcccatggagacaaacacaaactcaaacgcggaaaagcagggaggtgacattgatgcatctcatgacactccaacttacacgggccccctttttgatcagacacctagtggtcatactctcctcaattttgaggagcatgaacgctacagcaagtctcctcagattttttatcaaactgtccttgatgcttacttggacaagacactgccccagctggacaactttgttgactacaaatcagtataa

SEQ ID NO: 31126 - DNA, 345 bp, Zea mays
  Peptide Sequence Number=SeqID_74501
atggccttgctagatcctcccgagcgcctccagtccgaggtggcactcaacttggtgcgcaacctgcccggatggggtgtgccggcgttcgccagaaggatccgtgtcggcgcctctcctcacagtgatctcgccgccggagagttcgtgctcttcgtctccaacctccccagcgggttggcgctgccgatctcgtctttctttgtgctgctgttggaggagctcggcctccagcctcagcacttcacgccttgcttcatccttcaggcggccatcatcgcctacctctacaagatgttcgtgggggctgaaagggaattaggcttacacctatttcctaaatga

SEQ ID NO: 31127 - DNA, 432 bp, Zea mays
  Peptide Sequence Number=SeqID_74502
atgcccgcccacgcgccctgctcccttcttagagccccgccagtgccccgcgcttgcccccgcctcattttacgcagcttcgccctctctcgcgctctgcccacgccgccggcagccgccggagacccgcgccctcgttcccggccatctagctcaccggagaccgcgccaggcctccccgagctctgccccgaggtgagactcctccccggcctaatcccctccgtccgatcttcatcgcatggccaagaccgcttcgcgcacgcgcgcctgacgccctggcccgcctgtcagcgcccaagtcccctagcgctgggcccgctcgacaacgaggagtccgaggttcctgagtgtgttgttggagacctccctgagcaacaacctggtgaaggcaagtgtcctctgacccattatgtcctacatactctataa

SEQ ID NO: 31128 - DNA, 132 bp, Zea mays
  Peptide Sequence Number=SeqID_74503
atgccagaggctggcccgctgcttttggtggagatgaagaggcgcgacggttcgctccttgcgtggcggccaatgcctaaagaggatgactcgtgggcctgggcccccgtgccagaagctgggtcaccctag

SEQ ID NO: 31129 - DNA, 417 bp, Zea mays
  Peptide Sequence Number=SeqID_74504
atgacagttggcgtgaccgaaggtggactagcagtaattacgtcagcaagcgcacagaagcagcgtgcctatcgccaatcaagctttggccccacctgcaggctcatttcctcccctgaggcgggcccgggggccactgtcggtaccctaaatcaggggtaccccttactacagtatgaagacacggtgcccgcgcggccatctctagtcgcatggttccgggccactcacagcaaggtctcgagattccgggacctagaatacccaggccttgaccaaggccaggcggagcctgacgtaaggcctctaggccacatggcctctacattgaatgcggggaagcttccgctgcacgccaatgctacgcagaccgcggatatcagggcgcaaggagttggcactggcgacgagcattag

SEQ ID NO: 31130 - DNA, 1005 bp, Zea mays
  Peptide Sequence Number=SeqID_74505
atggatgaactacttttgctactttcgtggttggagccagatatagaaggtgatgatagtactagtgatggcgaaggaatccagggcgatagggatgatgtaagggacatgccaggagaaaatctaccgacaagaagggcacaggctggtgaaattgaattggtgcctactttacaagaaggtggtgtgtgcgatacccaatgtgctatgccgctacaaatattggaacaggggaagcttcttgcagaaggggtaatgagcacagtgcgccgcatggcacgggcgcactgtttggtgacagattggacaggcgcgccgtctgacgccgtctgccagcggattggactggacgcattaaatgccaagagggcgcgtcgcccgctcggcccgttggcttatgtcacgggccataagccacgcggcagcagcgaggagcgcagggcaaggcctggacacgtgccagcaccggacccctactcatgccaggaagagggtacccctgatccagggtaccgacagtggaccccgggcccgcctcaggggaggatgggaatctacaggcggggccagatctgctgcgacggccccgagaaggcgtggcattggcgcgagcggcggtgcgacctttccgcacccgacaactggtgcgccagttgtatgacatgtgggcctgggcccccatgttggaccgccagttgcagcgaagctgaggggcgcataaccgcggggcggttatggggtgcaccggtgtcttctggagagatccgcatcagggtcgtcccctctggcgatctcaccgtcggagacctggttgcagtcccccgccagtggtcatccagaaggatgaccaccagcctcgtggtggggagaagcaagccgggctgcggcccccctcccgccctcaccttcaaggatgttcatcatccttgctggggtggaaggcgagccgagtcggggttctactttccgcatgggccggtgacccacttcttcctccagcattag

SEQ ID NO: 31131 - DNA, 825 bp, Zea mays
  Peptide Sequence Number=SeqID_74506
atgaccacgtcgaaaaagggaccgggaaagggggataccccgaaaaggacccttctccgtgaaggaaacaggctccgagcctccctactgatcagaggttcgaaggctggcccctcggaggggttcaacagccgcctcagagcacgtgggctccacacccactactggtcagaggctggccctcgaagggttcacagtcgcctcagacacagagcgagggatgaccatgggtacgttcgatacataaccaaggctcaggctacgctcccgagcgtcgcttgcgccgctccgactgctgagccacccgacagagtgaggctgacaacagccaaggccggccccgggcgtcataagaaactccgctccgcccgacccagggctcggactcgggctcagccccggaagacggtgaactccgctccgcccgacccagggctcggacatgggctcagccccagaagacggcgaactccgctccgcccgacccagggatcggacatgggctcaaccccggaagacgacgaactccacctcgcccaaccccagggctcagacatgggctcagccccaggagacgacggactccgcttcgcccgaccccagggctcggactcagctctggcctcagccgacggtctccgcctcgcccgacctaggggctcggactcgaccacggccacgggagacagactcgacctcgacctcggaggagcctccacatcgcccaacatagggcgtggaccgaccacgtcgacaggaggtgccatcattaccctaccccgagctgactcaggctacggggaacaagaccggcgtcccatctag

SEQ ID NO: 31132 - DNA, 465 bp, Zea mays
  Peptide Sequence Number=SeqID_74507
atggaggggtcggcctgggaggcttgccccatggcagctcgtgccgcctggaccccccgctcgagagcatcctgtgcggagaccagccaaccagcatggcgcgccgcggcaccggcggcagaagccggcaccgtcttaagggccttcgtgggggccaggccggttgggccctgcctccgcttgctgaaagggagaaagaaagcaagttcaagtcacgcgacgaaagaagccaaaacagaggcattctcagacacctacccgctccggaccaaggccaatcgtgcctgcggggaggcccctcaggcctcggtccccacaggcgccgccaagggttgccccactaacgacttcggcgctgctcccaccttaggcgcccgaggcgccgaaggagcggcctgcccaggcgtcaccgcagcggccgaaggatcgacctcctgcacagccgacacgggcgcttgcccctga

SEQ ID NO: 31133 - DNA, 782 bp, Zea mays
  Peptide Sequence Number=SeqID_74508
cgttggcgggccttgtagcgaggagggggtgcggaggcgccgcgactgttcgcgggatgagcttcggcggcagcagctccctcgcatcaggtgcgaagaggccgttcgagtacgggagaacgcatgtggtgaggcccaagggcacgcacaaggccaccattgtctggctccatggacttggggacaatggagccaggtatagaacccgcctgctcaactcacctgtacttctgaatgggtttgatgttgctgatctttctgaggatgctcctgatgacattgagggaatcgatgcctcagcagcacatgttgcgaatttgttgtcaactgaacctgctgacatcaaacttggtgttggcggctttagtatgggtgctgctactgctctgtactctgcaacttgctttgcccatggaaaatatgggaatggcaaaccattccctgtgaacctaagtcttgccgttggtcttagtggctggcttccatgtgccaggaccttgaagaacagaattgaagcctcaccagagtgtgcacaaaaggcttcatcaatacctcttttgctctgtcatggaaaagctgatgatgtagttgcctacaagcacggggagagatctgctggtgccttgaaggcaaatggcttttccaatgagaccaagaaagaagtgaagcatataataaggttgaagaaactcttggtagggaagatgtggaaaaagaaggcggctgaggagaagagagcaccggaggctagggaaatggaggcagctagagccaaggagtag

SEQ ID NO: 31134 - DNA, 90 bp, Zea mays
  Peptide Sequence Number=SeqID_74509
atgtgccgtttcgtatccgtcgagagcgcacagagaaggagatccgccccgcccgtggtcggggtatatcaacgtactaactgcgggtaa

SEQ ID NO: 31135 - DNA, 726 bp, Zea mays
  Peptide Sequence Number=SeqID_74510
atggacgtgagagaggtggaaatcccgcggccttcgtgttcgtcccgcgcccaggtcgggtgcgcttgcagtagggggttacaagcgtccacgcgggtgagggaagcgagcggccccaagagagcgcctgtccccgtcctcgtccccgcgcggccaaccttctctaagaaggctctggtccttccttttataggcgttgggcgacgtggaggctcctccgaagccggggtcgagtctgtcttccatggccgaggccgagtccgagcccctgggtcgggcgaagtggagttcgtcgtcttccggggccttagcccgagtccgagccctgggtcgggcggagcggagttcgtcgtcttctggggccttagcccgagtccgagccctgggtcgggcggagcggagttcgtcgtcttccggggccttagcccgagtccgagccctgggtcgggcggagtggagttcgtcgtcttccggggctttagcccgagtccgagccctgggtcgggcggagcggagttcgtcgtcttccggggccttagcccgagtccgagccctgggtcgggcggagtggagttcgtcgtcttccggggccttagcccgagtccgagccctgggtcgggcggagcggagttcgtcgtcttccggggccttagcccgagtccgagccctaggtcgggcgaagcttcctatggcgcctttggcagggcctggcttcctttgcgttaa

SEQ ID NO: 31136 - DNA, 243 bp, Zea mays
  Peptide Sequence Number=SeqID_74511
atggtcgcccgtctatgtcgattaaggaccgttcgatgtaggcctgttgtggtggagactttgcaactatccacatgccccgccagcatatccttgagagtcttttctttagtcgggatgcaatgtggagtaattacttttctgggaattcagtacctcatggatgtgtatgggaatacagacatgggaatactgagaagtgtaatgtacttgcaacgacgtacctacgctcaggtacactaa

SEQ ID NO: 31137 - DNA, 354 bp, Zea mays
  Peptide Sequence Number=SeqID_74512
atggcgctgtacgacgcctgctggttccgccgcctcgtgctgctcgcttcccctcctcccgcggcggcacctcggccatctgtaccggcgcagcaggcgccggtggagcgcgacgagttgggtactacgcacacgccgcatgcgcagcggcctgcttcttcgagtcccacggccggcgggctgcggcaccggcgaacgcggagcgacgaggctaccgcggccgcgttcctgggcatggagccgctgaggctccccgacagaggcaaccgcgcgcgcctccagaccatactctcgggcaaagacgggctcgtggccgcgccccccccggaacggagaaggcccgggcccgggggg

SEQ ID NO: 31138 - DNA, 483 bp, Zea mays
  Peptide Sequence Number=SeqID_74513
atgcctcatcggagttacttcagcccgcccgagatcttctctctaccgttctcccctctctgccctcggattcatggcctcttccttgccattgagttcgccgtgacattctctccctctgtgcccaactccggcgaccccggagccaccttagctcacgccagcctcaactctagtgacctctctgccgcggagaagaatagcgccgcccgcagtcgttcaccactgcctggtctgatcccctccgtccgatcttcatcgcacgacccagatcgtgaataccgcttcgagcacgcgcgccctgtgcctctggcccgcctgtcagcgcctaagtcccctggcgttgggcctactcgcaaccttcagacatgggatgaagttgtatatgatatgaagagcacagttcaggagaaggatgaacaaatgccgaagctactcgtggaaaaagcttcggctcaacagtggaaaatgaaaccgacttaa

SEQ ID NO: 31139 - DNA, 795 bp, Zea mays
  Peptide Sequence Number=SeqID_74514
atgaagcgcccgcaaccgcaacaagctgctgcggagcagatcatggcgctgtacgacgcctgctggttccgccgcctcgtgctgctcgcttcccctcctcccgcggcggcacctcggccatctgtaccggcgcagcaggcgccggtggagcgcgacgagttgggtactacgcacacgccgcatgcgcagcggcctgcttcttcgagtcccacggccggcgggctgcggcaccggcgaacgcggagcgacgaggctaccgcggccgcgttcctgggcatggagccgctgaggctccccgacagaggcaaccgcgcgcgcctccagaccatactctcgggcaaagacgggctcgtggccgcgccgccgccggaacggagaaggcccgggcccgggaggcggcggcagcggcggcgcgggcggagcatgtcggagctggagttcgaggaggtcaagggcctgcaggacctcggcttcaccttcgccgacgccgaggtggacgccgagctcgcgtccatcgtgccgggcctaaggaggaagcggtccgaggaggacaacaacagccgggccacggcggcgtcgacgtcttcggcccggccggaagctgccgacgacgcgtccgtggccgccgtcgtggcgccgaggcggccgtacctctcggaggcgtgggacagcgaggaagaagaagaggtcaggagggcgctgcgcagctggcggataccgccggctggcgacggcaacgagctcaaggagcacctccggatgtgggcgcacaccgtggcctccgctgtccggtga

SEQ ID NO: 31140 - DNA, 414 bp, Zea mays
  Peptide Sequence Number=SeqID_74515
atgaagggagcagcagaggcagcaatgaccccatcggagacttggaagccaaagtggaacaacttcagactgagctatgtcaccgaaatagggtgtgggcacaagacaatgccatcacggactcgcgcgcatgacggtgcggggacttcccgtggtcgagaagatactcctaatcagccaccagtaccaccgacactggccaaggctatcgctgccttggtcaatgctactgtagataatacccgcttcttgcgcgagatggcgggtaatcagttccaacagcatggcgggagaattcctccacaaggactgcgtgaaacctcgtatctggaattctctgaaacgtgtcccccgctctttgttaaagcagaagaccctcttgaagctgatgagtggataagagtaatggagtag

SEQ ID NO: 31141 - DNA, 318 bp, Zea mays
  Peptide Sequence Number=SeqID_74516
atggatcctaagggaaagcggaccatgatcaatgacaaggaaaaggagaacgataccctctatgttgatgagccaaaaggtgacaagcccactgttggaacttgctctcctgggcaagttgatccaagggggaagtggaaagagcactcgagtgaccacccgtcccttgtcaaagacgtttatgccttcgagtacccggtctatccccagaatattctcatgagaggagaggatgaaggggaccacgtcggtcttcatccaatcgacgccttcggcttgctcgggcgtgctctgtggatgtggtcttcgtcggtgtag

SEQ ID NO: 31142 - DNA, 369 bp, Zea mays
  Peptide Sequence Number=SeqID_74517
atggacgagggttgcactcaacccctttcaagtgatccaaagatccacttgaataccacggagtcgctctcgctggagaagaagttgtgcctcgtcatgggcctccacgacagatcaaccaagtgcttatatcctgctttggaatatagttccaagaagaacgccaaggggaacaaacctagaaaagaaagaaacataatgtttgaaggtttcagaacgcctagagaagctattgaagtaatatcatggttacctaatagttgccaatcaatcatcatggtcactaatttagcaactggggcatgtcaattacctgaacttgcgctgaagaagaatatgccaattcgaataagtctaattttcatctga

SEQ ID NO: 31143 - DNA, 294 bp, Zea mays
  Peptide Sequence Number=SeqID_74518
atggcccactcatcatcactcaacggcgagaatttcgcgtcagggagccacatcatgttcgactccctcgactttcttgccaccgctgccgacgagctccgcctcaccgacctcgacatgcttgttcccacgggcacaagacccgcacgctccactaggagcaaggcggagatgcgacacctcaagaggcgtgtcgccgtcctgaagtggtgccttaataggtttgtcgacactattaagcatcaagccactcccacggcccaccccgctttctccctccgtcggcccacctaa

SEQ ID NO: 31144 - DNA, 178 bp, Zea mays
  Peptide Sequence Number=SeqID_74519
atgaaaagggttcaacaaaaagagcaagggataaccgaagtgtgccctgaggcgcttcgctataattcaccggactgtccggtgcaccaccggacagtgtccggtgctctagaggagagcgactctgaactcgccagattcgggaatccgctccgctataattcaccggacatgtccg

SEQ ID NO: 31145 - DNA, 318 bp, Zea mays
  Peptide Sequence Number=SeqID_74520
atggcgcggctcgcggccctagcgccgcaacccgcggcttgcccggcacaggagcctgcgtggccagcctctggagaacgagaagaagacgcaatcatcctattcaatcacgactcgtttctgagcttcgaggactcgacgatcaatcatggcgaccaagtgattgaactcttcgagttctacaagatcgaaggccctgagcatctgtttggtggtgatgaggaggatggttatgattatgcttatggtaatggtaaagaagaaggcgtcaaggcggatctccaggagttccaggacttcgacgagttcgaggattag

SEQ ID NO: 31146 - DNA, 675 bp, Zea mays
  Peptide Sequence Number=SeqID_74521
atggcgcctcctgttgacgtggctggtctgcgacctaggttgggcgatgtggaagctcctccgaagccgaggtcgagtctgtcttccgtggccgaggtcgagtccgagcccttgggtcgggcgaggcggagaccgtcggctgaggccagggcggagtccgagccctggggttgggcgaagcggagttcgtcgtcttctggggttgagcccaagtccgagccctgggtcgggcggagcggagttcgtcgtcttctggggatgagcccaagtccgagccctgggtcgggcggagcagagttcgccgtcttccggggcttagcccgagtccgagccctgggtcgggcggagcggagttcgtcatcttctggggctgagcccaagtccgagccctgggtcgggcggagcggagttcgtcgtctttcggggcttagcccgagtccgagccctgggtcgagcagagcggagttcgccgtcttccggggcttagcccgagtccgagccctgggtcgggcggagcggagcttcctatggtgcctgcggccgggcctgactgcctgtcagcctcactctatcaagtggcaccgcagtcggagcggcacaggcggcgctgtctttctgtcagaccggtcagtggagcggcgaagtgacggcggtcacttcggctctgtcggctaa

SEQ ID NO: 31147 - DNA, 312 bp, Zea mays
  Peptide Sequence Number=SeqID_74522
atgaaggatcttgactctctccaccacttcctcgagatcaccatggagcttgccctagggcctctttcttcaccagcgccagtacaccatcgacattttggagcgggctggcatgtccgactttttagttgcaaaaacttcctgatcccgaaacctaatctaaaccaaacggctcgatttttactggcgaagttaaatccatcagtgacatataactcggacaatccctcccctggtggagacgtcatattcacagatgatgtgagcttccaggttttcatggaccatctccagcggctagcagtccaatag

SEQ ID NO: 31148 - DNA, 354 bp, Zea mays
  Peptide Sequence Number=SeqID_74523
atggacgccagagaccgggtgtatgagggcggagatcaccaggcgcctcaccaactagccaagcgacgatgggctccagacttcttcggtgtcgagggtgaagcttggttggtggccgacaatggcaacctcgtacgccatggggctcaactgatgatcatcgtggaggaccacagaggtcttggccctacccttgcggcccttggcgcgctagatgtcagtgagctaccccgaatgctgtcaaagtggatgaggcggggttcgtcggtggcggtggcgaggaagtcgagagagccgaacgtgatgtggcttcctggagtgaagctctcaccgtcggtgaacgttgaagtgtga

SEQ ID NO: 31149 - DNA, 1932 bp, Zea mays
  Peptide Sequence Number=SeqID_74524
atggcaatgggtacccgctacccaaaactcgtgggtatgggaaacccgttgggtacccaaaatccgcatgagtatgagtttgggcaaaattttatacccgtcatggatatgagtttttttagcgggcgtatttttttttcgcgggccagatttctttgtctgacttgtggaagcctcttacaactattgtacaaggctgctgtattgaagatgtctgagttccttgacctagagctacaagatgggataaggatgccctggaatgttattccaggcacaaaacaggagactgtgaactgtgtgattcctgtttccgctatctacacacctttgaaaccaatttctgatatccctgttcttccatattcacctcttcgctgtcgcatgtgtcgttccatcctcaaccctttctccattgttgactatgttgctaagatttgggtctgttcattctgctttcaacgcaaccagttccctcaacactactcttcgatctcagaaaataatctccctgcggaactctttcctcagtacaccaccgtcgagtacatatcttcaactgaaactggtcctatagttccaccggttttcatttttgttgtagatacttgcatgattgaagaagaaattggttatttgaagtctgcactggcacaagctgttgagctattgccagataattctcttgttggattcattacgttcgggacgtatgtgcaggttcatgaattgggttttggcttattgccaaaatcatatgtattcaaaggaacaaaggaggttatagaagaaatacaaaaggacccttggcctgttccagctgatcagcgtgcatctaggtgcactggagctgccttaagtgttgcagccaatctccttggggtttgtgttcctggatcaggtgctaggataatggcatttgttggtggtccatctacggagggccctggtcctattgtatccaaatccttatcagagcccattcgttcacacaaagaccttgataaagactcggcaccactctatgataaagctgttaagttttatgatcaaattgcaaagcagcttgtgcaccaagggcatgtgctggatttgtttgcttgtgcagttgaccagggtggtggggatgctgagaacccgaacgtcgccggcagccacacgctcgcggacgaagtgcagatcgatctccacatgcttggtgcgctggtgctgcacaggattagtggagaggtagacggcgctgacgttgtcgcagtagacgagggtggcacgctgaagggggctgtggatctcgtggagaagctggcgcatccaggaggcctcggccacgccgttggccacaacgcggtactcggcctctgcactagagcgggagatgatgggctgccgcttggtggcccaggagacgaggttggcgcccaggaacacaacatagcccgaagtggaccgacgcgtgtcggggcagccgacccagtcggtgtcggtgtagaccacaagctccgacgtcggggaaggtcgaaggaggaggccgtagccgagggagccacggaggttggagtcgctgaaatgaaggttgcgattgagaagactggaggaattgttgtccttgctgaaagttttggtcattctgttttcaaagactcacttctccgcatctttcagtcaacagatgacaaccttggtttatcattcaaatactgctttgagaaggattctgttatgactgatattgtgtacaagagaaggggaaagaaggtagaagcaggggaagtggacacctcacaatctgagctgcagcaggaagtgcagcatagagagtcagatgtgcacgtgctttgctgtagcagtactgcaatgcagcagtacactatagctgtagcaagacaacaatatattatagctgtagcagaacaacatactctgaaagtctga

SEQ ID NO: 31150 - DNA, 780 bp, Zea mays
  Peptide Sequence Number=SeqID_74525
atggcaaaagcttctgacatggcaacaacgggagaagaagggcgagggcacccaggggagaggacgccgaggagatctgattcttcgttagaagcggccaccgccgatcccctcttcgtcgaggccaagctccgccagcagatgcgggccgaggagcgccccacgcggagcgccgtgcccaggatcgcctacctcgtctccggctctgcaggggacggagccgcgctgcgccggacgctcagggcgcgctaccacccggcaaacacgtacgtcgtgcacctcgacctcgaggctcccgccgccgagcgcgccgagctcgccgctgccgtccgcgccgaccccttctacgccaggtttcacaacgtcaaggttgtcacacgggcgaacctagtcacctatcgtggcccgaccatggtgtccaatacgctgcacgcggctgccatcctgctgcgcgagggcggtgattgggactggttcatcaacctcttagcctccgactatccactcgtcacccaggacgataagcgcagatgcgatctgcctccttcgccccccggatctaggatggaaggcgcggacgcatggtgcgaggcaacgtggcagaaggtggtgcacacagttgtggacgcctacgatgagtggtatgctgaccctagacaagacctaggacctcttctctccgatgtgatccttctcgggagcgagatccaggcgttactggtgaactccgcctcccctgcgtacgcgcggaccgtcctgtccgttaggcaggaacgctag

SEQ ID NO: 31151 - DNA, 384 bp, Zea mays
  Peptide Sequence Number=SeqID_74526
aggaggaggttctcctctgagtccgaaggggtctccggctcccgtctctccccccagcgtcgtaccgatgactcggaacgactctcagggattgccgcggaggtctggacttacatccggaccgtcgagcgctccgggctcgagggctcggatgagtcggagtattcctcggacgaggaggactcgcccgaggaggacggcgaaggtgacgacgacgacgacgacgacggaggcgacagcagcgacaacggtgacggcggcagcaggggcggcaacggcggcagcaggagcgacaacggcggcaacaggggcggtgacggcggcggcaacaggggcagcaacggcggcggcggcagcaaaggcagcaacagggccagtggctag

SEQ ID NO: 31152 - DNA, 477 bp, Zea mays
  Peptide Sequence Number=SeqID_74527
atgggtctaagcagcagtatttcggtccagaaaaccttgtatgaggttttatctgtgagcgaagacgctacgtatgatgaaattcgtgcagcatacaggtctgctgctctgaacacacaccctgacaaggcacggacacctctcgagtcatgtgttctttccggtgagcaacaggaattttctagtgtgcagaaagcatgggaaatcctacgccatcctacatctagagcagactacgataagcagctgcagtcatccagacagaacatcgagatcatcgcatctgaagtccaagtcggggatatgatcattgagagcactgccgatgccgatactgtagagctgtcgtacccatgcaggtgcggtgattacttttccatcacttcgtgcgagcttagcgggatgggaatttccgtcagtggagatggagatggagaggcccgatttaatggtcccatctgccagccattcacctaa

SEQ ID NO: 31153 - DNA, 972 bp, Zea mays
  Peptide Sequence Number=SeqID_74528
atggcgtcgtcgtcgttcaatgtgggggagtcgtctcgcgcccgtgagcaaacagcgcgcgacgtggcgctcgagttccagccccgcccgtgggtggcactctcctccatccccatcgtcctcgacgccagagacgagcgggcatcgatgctcgcgcctggcgtcaccgactttgttttcgccctgcagcacccgctgctcaggccgtcctacctggtcctgcccgggcgcatcgtcccgggccccaggtcgttaagcttcccctacgtcgtctccacctgctccgatcgcctgctcttccgggttacccacggcggcagcgtctgggactactcctatttcctctgcgacatccacgcccgcactgccgccctcctccccgacgtcccagccaacctcggcgtcagcaccttgccgcgacgaagcatcggcctcatcgccgaccggcgacacgttggccactacatggtggcccagctgcagcccacctccatgaggacgatcttgctctgctactccacctgcaccgaccagtggaccgccaggacgctggcctcccacccgaaccacgagccctcgggcgttgacggcgtcatcgcccacggcggcctcctctggtgggtcgacatcgccagcggcgtgcatgtttgtgaccctttcgccgacaacgccgacctgcacctgcgcttcatcccactcccggtctgctgccagatgtcgaggctcgacaagctcgtcagcccctttgagctcgtgcaccagcgacgcctcatcaggcccagcgacggcaagctgcgctacgtcgagatccagggagtcccctttgttccggctgccaacaagcagcccttgttgaaccctcgggtttgcatgttcacgctcgtcagccaggagaaccgacattactgggtacaccagtacacggcgaccttcgccgacatcttcgccgacgctgtcctgccgtcgggcgtg

SEQ ID NO: 31154 - DNA, 2215 bp, Zea mays
  Peptide Sequence Number=SeqID_74529
atggatcccgctgccctcaagttcctcctcgacgagatcaacagaaggttcgacgaggcagatgcccgtgtcaaccggctcttcgacaagctgcagcagcccgcccaccttctggggtcattgccctccgcgtcattcgatctcccagccaccccgctcagcgtcgaccacttctccgacgcatccgccagcgtgccggccacccccgctgcggctgttgaggccgtcgtcattgtcgacaactggggcgggtgcttcgatgacagagagcagtactgtacggcgccatccgtcgtcgccgacaactggggagggttcttcggtggcgaggatctcgatctgccaggaagcacttccttcccctgcaacagcgaatcgggcgccgtccctaccaaggcgctcgtcacctccaccgaccccgacgcgccgcttggctcgggcgccgacagcatccccacccatgtcggcgaaggggccctcgagccaggccatggcgatgtggccgtaggcggtctcgttgagttgggcgcagtcccagttccggtggaggccacaacccgacgccgaaccccgacgctcagcttcgctgggaactactcgcaacacgccctcaccatctggaggccctccttcatgcagcagatccgcttcgacgcccacaccccgctccgggaggcctgggagatcgacgcgcacatgcagtccgcggtcaggggcccgggcgccttcaatgtctacggccgagcaggcgagcaccctgctccctggacggatccaccaggacctctcgatcgagctccagcagtaggcaccttccagatcgagctccagcagcaggcgcaggtgcgcagcgatcaatcagcgagcaggacgagcggcaggggagaagcactcgagtcgagagcagatcaggatgtttgtgaagatcgaccgcacgacgcccagacttccgctgtcgaggaggccatggccgcgggcgcgggagaccccgggcagctcgaccaactcttgctgctcgacccctacgccgaggacgacatcaccaactactgcgtcgagttccataatgctgtcgtcactaccatctactcctccatcatcatcaagccggagacgggcagcagtagcagctcttccttcgcgtgttcgaccaattgtcccagccaggcactgcacaacattggtaagcccagtctggtagccgtggtgactattgcaggcacaccttcatctactttgattgatgctcaagtgcagctgcttgtttctgttggctcccctagcaatgctcttgtgctcaagattccaattcagggtgttgtggatgcacttcataggaaaacactccagggcacaggtctgaatgaagagcaaatgagacaggctagcgtcgcagacaatggtcatcgtcagctaaacaagatacttgttgacttggatcaagataacattactgctaagaattatgcaattgcattttacacagagaagcacattcagattccatgcttgggcggtgaacacgaagttactttcttccatgagtatagagattcagttgaacgggtgtttgttgatcatccctcgtatcacagacctggaaatttatatggagctaaagttgttcttcttgggttccaacattatgcggtcatgcttggtacaactgtgatcataccaactgcacttgttccacaaatgggaggaaaatatgaggacaaagttgtggttatccagacattgatgttcgttgtaggtatgaacaccctacgtcagagtttcttgggtaccaggttgcctgcagtgactggcgggtcatacacttttgttctgtataccatttctatcatccttggtggacgttctgctaatgaacctagttcacacattaaatttctgggcatcatgcgtgggacacatggtgcgttgattgtggcttcagctttacagattatagttgccttcagtggcctttggtgtaatgttgccaggtatctgagttcactttcagctactcctttggtggcactagttgtatttggactgtatgagttagaaattccaagagcagggaaaataaaggctttgtccgttgatgcagtaatagtgtttggatcacaaaggattcctcagctccggcccgccggcggttttctctactcgacctccctcatcgctgcatctggacatacgctgctgctcgccgcgctccctg

SEQ ID NO: 31155 - DNA, 237 bp, Zea mays
  Peptide Sequence Number=SeqID_74530
atggctagagcacaccttggcactaaagactatgatcacatgtggaagaacttaaggagcaaagactgtaaccttgctgacggagagtatgtcctcgtgccggagcaaggagctgctcaggaggtagccccagatccagcaccagagcctgcaccagaggacctacctgccactgctttggaaggcaagccccggtttatgcataacctgttatttatactattttacttcacttaa

SEQ ID NO: 31156 - DNA, 180 bp, Zea mays
  Peptide Sequence Number=SeqID_74531
atggggctcggtgtatgcggctcgctctgccaagtttgggttcgccccttggggaggagtgcgagacattgtggtacaggtggttatgagattgatggttctggttatgattatggtgctggcgaagatgaagctgtggaaggagacttccgggagttccaagattacgacgagttctag

SEQ ID NO: 31157 - DNA, 639 bp, Zea mays
  Peptide Sequence Number=SeqID_74532
atgactaaaatggtcaggccgtggtggtcgttgtcggcggccgagatccgcctgcccgtgtggcccgcggcgtccgagacccgcggcggccgaggggaacgctcgccggagaggagcgctcgccgctcgagggaggcgcggtggaggggagccgcgcggtcgagcctggaggctggagcgtgcgattttgattgggatcgatttgggggagaagctgaagtgaggaccggtcccacttgtaaggacttaggtccacatggaagagcctttgacgggagaaaatgtcgccgtgaggtgatttctgagcatagtgtggagaggcgagatggtgatcgtgtcgacgtcgatcctaccaagactgagggtgatcgcggcaaggcgattggactctggtggttggatgttggatcagaggcaaatttaaaaataattacgttctttatatattcttttgaaagattcgagctcattattaattcttgctccttcactagcaagtgccctaactcaatcaatgcatccagtgttggctggttgaggggggaagataacaacaaaacgggtgaaagacttatctgccaaaagagaaaaagggagcaggtgatggcttccatactgagtatgaacattgttgcttag

SEQ ID NO: 31158 - DNA, 384 bp, Zea mays
  Peptide Sequence Number=SeqID_74533
atgaagggagtggccgattatggtgttaaaggaaagttggcaccattatatattggtcctttcttgatactagaacaatatggacctattgcttataagcgtcaacgctcagaagacaagcggattcaagtgcacaacacgacagtagccttcgctgggacttggagtttgccatttgggagaaggccttcgagatgcgtctggggctatggcgagcccccctccgcgtctaatgtggaccttcgccttcgcttcctagcgaagggagaggactggagagtgctgcgtgcatccccttcgcttgatgcacctgtaaaagaaatgcctggtcgtagccgggtcagacagatcgaggtcatgtttggcctccgctccaacaattga

SEQ ID NO: 31159 - DNA, 559 bp, Zea mays
  Peptide Sequence Number=SeqID_74534
ggaagatgcagcagccgcgtgcgccatcgcagatacagcttgctgcgcgcgccaagggagatgcagcgagcagggcgccgacgaggatggccacgaccgagcgtcgtcttctcacggccgggcgtcgtccctggcagtgggagtgtcgatttggtgtcgatttgggatggagttttggtgtcgatttggtgtcgatgttggtgtcgagctaccggccgcacccactccgcgtcgagctcgcttgcggctggccgttcccgaccgcgcccacccccgcgtcgagctcgcccgcgtagaagtcgcccgtcggagcgcaccgcgttggccgagatccgcctgcctgtgcggcccgcggcgtccgcctgcctgtgcggccgggatgaaggtggatggaggaggagcccccgctgtcgatggagagcgagcacttggaggacagcaacgacgacgagtgcacaggctgctgctgctgctcgtctcggcgcaggggagccgcgcggtggagcctggagcgtgcgatttcgattgggatcgatttgggggagaagcaggggagtga

SEQ ID NO: 31160 - DNA, 498 bp, Zea mays
  Peptide Sequence Number=SeqID_74535
atgggggatgttggggtcgacgagggcgagccagggcaccacgcccgacggcaggacagcgtcggcgaagatgtcggcgaaggtcgccgtgtactggtgtacccactaatgtcggttctcctggctgacgagcgtgaacatgcaaacccgagggttcaacaagggctgcttgttggcagccggaacaaaggggactccctggatctcgacgtagcgcagcttgccgtcgctgggcctgatgaggcgtcgctggtgcacgagctcaaaggggctgacgagcttgtcgagcctcgacatctggcagcagaccgggagtgggatgaagcgcaggtgcaggtcggcgttgtcggcgaaagggtcacaaacatgcacgccgctggcgatgtcgacccaccagaggaggccgccgtgggcgatgacgccgtcaacgcccgagggctcgtgttcgggtgggaagccagcgtcctggcggtccactggtcggaacaggtggagtag

SEQ ID NO: 31161 - DNA, 279 bp, Zea mays
  Peptide Sequence Number=SeqID_74536
atgcaggaagggtgtaaagcctatctcttggatgattcagctgcttcactgttgatgaggtgtcatacatgcagtaaaggtgtgctggactttttccctgagcttccaccttgcgtggtaaacatgcagctccggcccgccggcggttttctctactcgacctccctcatcgctgcatctggacatacgctgctgctcgccgcgctccctgagctcccagaaaaggaagttgaaattcaagaagtggttcctgaagaggagtctgctccagtgttgtag

SEQ ID NO: 31162 - DNA, 387 bp, Zea mays
  Peptide Sequence Number=SeqID_74537
atggctagagcacaccttggcactaaagactatgatcacatgtggaagaacttaaggagcaaagactgtaaccttgctgatggagagtacgtcctcgtgccggagcaaggagctgctcaggaggtagccccagatccaacaccagagcctgcactagaggacctgcctgccactgctttggaaggcaagccccgattgccctcctcacgcgacctgagacatggtctcccattccggttatggtgggtacaagtgcggtcactgcacgacggcagtcggggttctctggaggacatggttgctggagtgacttggtcgtccatcttgccaccgggttggactatcgagtgggaccccgcctcggctgaggaggagcatgaggagtga

SEQ ID NO: 31163 - DNA, 234 bp, Zea mays
  Peptide Sequence Number=SeqID_74538
atgtatggtttacaggtggtgatgaggaggatggttatgattatgcttatggtaatggttgcctttggtgcaatctatgctcagttcagtttaggtgtccatgaccttcttgtcttctgggatcatttcttattcggttgtcttgtcttaactccatcctttgtggtacttatatccttggttattatgcgcatttacctcctctcctacatccttgtccgttatcacctttaa

SEQ ID NO: 31164 - DNA, 837 bp, Zea mays
  Peptide Sequence Number=SeqID_74539
atggccgacccgtcagcatcatcggtgccgccggttgtcaccatgggatccgtggtcactgtggcctcgccgcccacgggtggtggatcgacggtctctgcaggtatcacaggcggcggcaaaggcgggccgtgcgcagggtgcaaatacctgcggcgcaagtgccagccggactgcatatttgcgccctatttcccgcccgacaacctagacaagttcgcgtacgtgcaccgcgtcttcggcaccagcaacgtgatcaagattctcaacaacctccagccctaccagcgccagtacgccgtcaattcgctcgtttacgaggcggaaatgcgtatccgcgaccccatctacggctgcgtcggcgtcgtctccatgcttcagcaccgcctcatacggctcaagaaggcgctcgagagcgccagcttagagctgtccaactaccaggcggctgaagccgcggcggcctctgtggccgtgggaccccatggtgtggcagcagctgggatggcagacttcgtaggcaacgcagtgcccaattgcacacaaaacattatcaatgccgggtactccacgatggcgtcgatcaccggagctgggccgttcatgcagcaagacaactttgcctccgtgcagatgctggccatgagcttcgagggtgagaatggagctgcggcgagggtgggcatgaacggaggtggaggctatggcttcgcctactcgccggccatgggcgtcgggcacggtgtagtgtctggtcatgtgcagcagcagcagatcaacggtggacagttcttgaaaaacagcacgacgggcggggattaccggcccactatgtga

SEQ ID NO: 31165 - DNA, 291 bp, Zea mays
  Peptide Sequence Number=SeqID_74540
atgacggcgtggtccaccctctgccctcctcaccgcaaggcgaaggcttacgatgaaggcctacgacgaagtcttcccaccccacgtcctcaccagacatggaggccctcttgggattcagcccaccgtaacaggccccgcattaagaagcgtgttacgggcccaatttgtaatagcttttttgtaatgacagtctgtaaccctcccttgtgggaatattctggggataatccaggaaaaatcacaaacccaagagaccttaaagggattcttgagacgggctcaaaatga

SEQ ID NO: 31166 - DNA, 1806 bp, Zea mays
  Peptide Sequence Number=SeqID_74541
atgctagccgccgctcgcccccttcgccgcctctcctcttcttgttcctcttccgtcggcgcccttcgccgcgtcctcctacaccctccagcacccccgccttcgcttcagcctcctctttcgcctctccggacccttacgcgcgcccttcttccgtccctcgccgccgcccacaggttctccactacatccttctctacctccgccccatcacgcctaggagaatgcgttggcgtgttgggagctccggcgatagccgaggaggaggagggggaggagacgggggcgttggtgcggcatgacacggatgcgtacgcggcggtggagctggctctggactcagtggtaaaggtgttcacggtgtcgagcagccccaactacttcttgccatggcagaacaaggcgcagcgggagagcatgggctccgggtttgtaattcctggaagaaggatcgtgacgaatgcacatgtggtagctgatcatacttttgttcttgtgaggaagcatggttcgcctactaaatacaaggcagaagtccaagctgttggtcatgagtgcgacttggctctgttgacagttgagagtgaggagttttgggatggggtgaacagtttggagcttggagacatcccctttttgcaagaagcggtcgcagtggttggctaccctcaagaaatgatgtcaaaatgtggatggtatatgatcctgaattttggctcaggtggagataatatttctgtcaccaagggggttgtatctagagttgaaccaacacaatatgcccatggtgctacacagcttatggctatacaaatagatgcagctataaatccaggtaatagtggagggcctgccattatgggtgataaagtagccggagttgctttccagaatttgtcaggagcggaaaacattggttatatcataccagtgcctgtaattaagcgtttcatttctggagtagaagagagtggtaaatattctgggttttgtactcttggtgtatcttgccaggctactgaaaatattcagttaagagagtgctttgggatgcggcctgaaatgactggagttttagttagtagaataaaccctctatctgatgcttacaaggttttgaagaaggatgacatccttcttgagtttgatggtgtgcctatcgcaaatgatggcacagttccattccggaatagagagagaatcacctttgatcatctggtgtccatgaaaaaacctgaagaaacagctgttctcaaagtattacgagatggtaaagagcaagaattgggagtaacacttagacctctgcaacctttagtcccagtccatcaatttgataaattaccaagctactacatatttgctggttttgtttttatcccacttacccagccctatctccatgaatttggagaagactggtataatgcctcaccacgccggttatgtgaacgggcactaagagagcttccaaagaagactggtgaacagttagttatcctatctcaggttctaatggatgatatcaatgtcggttatgaaaggcttgctgaactacaggtaaagaaggtaaatggtgtggaggttgaaaacctgaagcacctgtgcagcctcgtggaaggctgcaccgaagaaaacttaaggtttgacttggacgatgaaagagtcattgtcctgaagtaccagaacgcaaggcttgccacatcccgggtcctcaaacggcacaggataccgtcagccatatcgagcgaccttgtcgaagatcaagtaactgatggcgaggttgagacgtcatgcaccagctaa

SEQ ID NO: 31167 - DNA, 387 bp, Zea mays
  Peptide Sequence Number=SeqID_74542
atggggaggagggaccacgaggcgctctacttattctcgggcgcccaggtagtcgcggataccgcggcgaagaccccgcccgaacaccacggccccggcgagctcgcgaagtccgttgagccgcggcgattctgttgggagaggatcgccgacaggcgggacccacaacgcagtgaggaggagcgcggcgagagatttaccgagcgcggacaagcaagccctggcaagtgggtcccgcgtcgcagtgggagtgcgagacgcggcgcaagggagactgacaggataaatgatatctttaaagcatatatagttttgggtaaggagtggggtaagaaaagactccatccaagatttgtggatcttgactccgttggcgattcaacttga

SEQ ID NO: 31168 - DNA, 1464 bp, Zea mays
  Peptide Sequence Number=SeqID_74543
atggcggaggccgacgagacggcggcgctgcagtacacaccgacgtggatcgtggcggcggtctgctccatcatcgtgctcatctccctcgccgccgagcggggcctccatcacctcggcaagacgctcaagaagaaccatcagaggccgctctacgaggcgctcctcaaggtcaaagaagagctgatgcttctggggttcatctccctgctgctcacggtgttgcaggggacgatccagaggacatgcattcctcccagctggacagactacatgctgccgtgccaaagaccggggcacgacgaggctcctgctgcggccgcctccatggcggcgcgttttgtcgccgccgacatcctcggtgggatcagttgggcacgcgtgctcagcgagggcgagggtgcggcggcccaagccgggctgtgcgagaaggaggggaaagttccactgctgtcccttgaagccctgcatcagctgcacatcttcatatttgttctggctgtctcgcacgtatttttctgtgcttcaactatgttgccaggatgtgcaaagatacgcaaatggaagaagtgggaggaggaaattcagaaaatcgctgcagaaaatggacccaagaaggtgttacctatgcatcaagtttcatttatcagagaacgttacaagggtattggcacagattccaagacgttgtgttggctgcattcatttcgtaagcagttttatggttcggtagctaaatcagactacgccgcaatgcgtcttggttttatcatgactcactgtcgcgggaacctgaaatttgatttccacagatacatggtgagggttttagagtctgattttaagaaaatagttggtacaagctggcacttgtggatcttcgtggtgatatttctgctgctcaatgtcaacgcctcaacgcttctgctagccgttggcacaaagctggagcacgtaatagcacagctagcctacgacgtagccgagaagcagacggcgatcgagggcgatctggtcgtgacgccatcggaccagcacttctggttcgggcggccgcgtatcatcctgcacctcatccacttcatcctcttccagaacgcgttcgagctcgccttcttcttctggatactgatgacctatggattggagtcctgcttcatggaccatatcggtttcctggtgcccaggctcgttctcggggtcgtcattcagcttctctgcagctacagcacgctgccgctttatgcaattgttacccagatggggagctactacaagaaggagatcttcaacgagcatgtgcagcagggcgtgctgggctgggcacagaaggccaagaagagatcgggggtgaaggagggtccatttggcaaagctccagctcctgcttctttagctctagatcttgatcatcgtgaggagctgatcctcctgattctcttagaaaatcagaatcatttttaa

SEQ ID NO: 31169 - DNA, 345 bp, Zea mays
  Peptide Sequence Number=SeqID_74544
atgggcaaggacaaaaagggtcgaggttcgccacgtcgctccggtgacaggcggaagcgcgaaccaagtcttccatcggaggacttcggtgactctgagtactcagaggaggaggtttcctccgggctcgagggctcggatgagtcggaggtctcctcggacgaggagaactcttccgactcatccgaggaagggaacggcgacgacgacgaaggcgacagcagtggcgacgacagcggtggaggtggcggcgacgacgatggccaagacggcgacgagggcggcggtggaggcagtggcgatggcagcggcagcaaggccagtggcaaagcgccactggcttaa

SEQ ID NO: 31170 - DNA, 468 bp, Zea mays
  Peptide Sequence Number=SeqID_74545
atgacggacatgtggttacctgcgaaaggcaactggctgttgggatcgattggaggaatcaccacagcagacgagctcgaggtcttcctcttgggcgccatctcgattctaccagcgagcagagtgggaagcggatggcagagaggattcggaagcgggaaagcaagaactagggcacggaaagcaaaggcggctaaaagcgcaacacttatgggatattctcgagccggataccgttttaaaaagtgcccagtcagcacccagcgtgccacgtggtcacccgacagttatctccagaacaccggtacgccacctcatcactcgaccatcatcctcaaagtggctcgcgcggcctgctatcactcggtgttgcctccaaaacgccgatttcgtgttcagtcgctcggcattacctctaaaatgctgatatcgttcttcaatcactcggcgttgcctctaaaacgctga

SEQ ID NO: 31171 - DNA, 615 bp, Zea mays
  Peptide Sequence Number=SeqID_74546
atggctgacagggggagctcggtgcggccgggcccactggtcagcggcacagtgcgggtgcgggtgcggtgtcgttctgatgggtggggtccgccggtcagcgactcagaaaggagaggagagggggtcggcgcgtgggagactgacagtgggccccgggtgtcggggtcttcatctccctcccgcccatgcatggcgcgaggcgacgtggccgtgaccgacggtgtgcgtggggggaaaggcgtcgagcgccgacggtttgtcggaggaccatggcatgacggcgcaacgccgccgtggtcgtccaccggtgaggacagagagaaagaggaggaggcagatgagagagaagagaaggaaggggccagcagttttaccttgggcggagctcgaccggggcggagctacgggcggcggtggcggacctcaggcgagaacacgacggggcgggcttgccgtgggttctccgggtgttacacccttgaggtcaaggaagaatccacaagcaccccacctgcaccaccgccctctgaggtcaccttggagctgcaagagccagtcccgcttggagaagagtacgaccccgtcctgccatctcaatcgccgccagaataa

SEQ ID NO: 31172 - DNA, 501 bp, Zea mays
  Peptide Sequence Number=SeqID_74547
atggaaggtcagagctacaccagtttctacatcaacgaagaaggtttccctaggctcttgagggacaatatgttatgcctaggaatccctggttacctagaataccgtggaatagaattcatggaacatagtaaaaagaagtacatggttaccgtgtacattggatcaagtaatcggcaacctagatggtgttccacggcaaccaggcataggtccaaggacatttgccatctcatggctcgtgaagcgctgaggacactatgctcggtctaccgagatgaagtgggaaccacccccatgagattctttccacctctcataaagacccatcaagagtggaaggaccgggtgcaagttttaagagagcaaaggcatagtggagatcccacaacagcataccttgccctctatctgcttgccttggatgagaaatatgacaaggtagtcgctcagttgcggaaacaaccaagcgagcggagaaagcagaagcccttctgttga

SEQ ID NO: 31173 - DNA, 423 bp, Zea mays
  Peptide Sequence Number=SeqID_74548
cacccgccacgtgttcgacgaaatgttgcaaagaggaaacgtggcaaccgtgctctggagcttctccctataaatggtagcccaccccctcccttctccctcccatgggcgagcagccccctgctcggcttccctgctccctctccctcccttggcatctctccacggcggcctccctctccaccagatgcagggcgccgaccacccttggatgccacgcacgctccctggtcccaggactccggcctcctccccgcgctgctcggccatgggctcccctcgccggcgctgtctcttgctcagcctcgactccaagccgcgtctatagccgtcggccccgcagtacctgctacccccatgcacacagccgccatctcctacatccaggcgcccctccctagcagcttcctgctgttcacgtga

SEQ ID NO: 31174 - DNA, 693 bp, Zea mays
  Peptide Sequence Number=SeqID_74549
atggggcccacccgtcatactcacacactgcttcttctttcttcttcacgtgaacagcaggaagctggtagggaggggcgcctggatgtaggagatggcggctgtgtgcatgggggtagcaggtactgcggggccgacggctatagacgcggcttggagtcgaggctgagcaagagacagcgccggcgaggggagcccatggccgagcagcgcggggaggaggccggagtcctgggaccagggagcgtgcgtggcatccaagggtggtcggcgccctgcatctggtggagagggagaccgccgtggagagatgccaggggagggagagggagcagggaagccgagcagggggctgctcgccatgggagggagaagggagggggtgggctaccatttatagggagaagctccagagcacggttgccacgtttcctctttgcagcatttcgtcgaacacgtggcgggtgctacagcagcgactttgggcggtcgtttttggctgtttctgtttggaatcggaccttggtcactgtagcaaagttgcttcccgcgcaatgctcttcaaaattgatagaggatgctcagccattaggttcacggtttaggagatatttagcttcgaatttggtgctgtcagagggtaaattttacctaaagaatggatgtcaaaccttgtcaaatggggtcggatga

SEQ ID NO: 31175 - DNA, 339 bp, Zea mays
  Peptide Sequence Number=SeqID_74550
atggggtgggtagccagctccaaggggtggaatccgcagaaggtagtcaacccttgcagagcgattgcctccttcgtgtcctctgcccgggtaccccgaaagactctgagtccaaggagcgccagcctggctgcaggggatgaggctccaaagtcatcttcaccctatagcggggaactcggtgcttctcgaactgttgcaccgcgtactgagggggtgtcggctccgataccagctgtggcggaactgcccgaattattccaacttaagtgcccaagccccgcctcagaggctagaccacacttaaatgggaataacccgtcaatccctcggacctag

SEQ ID NO: 31176 - DNA, 480 bp, Zea mays
  Peptide Sequence Number=SeqID_74551
atggattttggactgctggcagaggggcaccggactatccggtgggttcccagaaacggaccagaagaaaaccagagaagtcgccagcacttgaggaaggcaccggactgtccggtgttcaccggactgtctggtgggaattatagcggcggccaactgaactcttcaccttcggaaaatcttcggcagagggcaccggactgtccggtgtgcaccggacagtctgacgagagctgcaatggctacctgctgaatgttcagaacggctctgtctgtcagaacggcttctggcgcgtgcactgtgcattatccggtgtgcaccggatagacactgtagagtgtccggtgcaccacccgatagacaagtttggctttctctccaacggccatttgagtggttggggggctataaaataccccccaaccagctcattcaagacagaagagctaccaccaagcaatatacttcaagtgcaataa

SEQ ID NO: 31177 - DNA, 1092 bp, Zea mays
  Peptide Sequence Number=SeqID_74552
atggccactcggcggctcacgcccgactgctttccttccctcctcgccggagttctggcagcctttctccacgccgccctccacgcgcctctcgccgttgctcaagagcgacagccgccgtggctgctctgcagcccccctccagacagcggcatcgccggcaactacacggagaacagcccgtaccaaggcaacatcaacctgatctcagccaccctccccaagaacacctcgtcgagcccggtgctgtacgccaaggaccgcgtcggctccgtcccggacatcgtgtacgcgcacgcgctctgccgcggcgacgccaacgcctccgcctgcgagagctgcgtcgccaccgccttcaagggcgcgcagcaagggtgcccgctcgtcaaggacgtgctcgccttctacgacctctgccagctccgcttctccaaccgcaacttcttcctggacaacgacaacttcatcaccgcgtactacctccagggctccaagctcgccgcgggcacgggcacgggcacgccgatgggggcgttcgacgccgccgtcctactgcttgtcaacgcgaccgccaactacgccgccgggaactcttccaggagattcggcaccggagagatgggcttgggcgatgacaaccgcaccaggatctacgcgctggcgcagtgcacgccggacaccgcgccggacatctgccagacctatctacaacccattgttaatcagctgccggtgagcttcagtagtgtgagtggaggcggaatctttgggacctggtgcagcttccgctacgagctgtatcctttcttctccggcagcccgctgctgcagcttccgacgttcgttgggacgacgcctgctcctgcacctgcgccgccgccgccagccacaagtcaagaaaaacggaggggtataatcttggttgccaaggaggcaaggactaattataaacaacaatttttaagtctaaagccccagaaatctttagacaaatggcacgagcatctgcatattcaagcagaagtctgttcagaaattctcaaggttcattcagccattatggtgatgaacctgggaattataacattgtag

SEQ ID NO: 31178 - DNA, 1290 bp, Zea mays
  Peptide Sequence Number=SeqID_74553
atgacgaagatgataaagcctcaacatcatcctctgaggacaaagaaacggtctgacgcgtcggaaaggtggaggatcttctccttaacattgacaggaaaaagcaaagaaagagaggatgcttcaaatgtggggagaagggccacttctaggacaattgcccaaatttggccaaacccaaaaagaggaggagcaaaggcaaggcgctcaatagtatcaagacttgggatgattcttcaagcgaagataaacctccaaggacgcgcagccaccgatcctcatcgcgctcatcacggtcatcacacaaatgccttatggcaagaggtaaaaacaagtatcccatcctctagtgatgagagtagtagtgatgatggcgaagaaaaatttgaaacttttgcaaacttgaattgtgagctaactactaaaattgagcaattagagtctaaagctccatccccagctaccgatgatagtttaattaaaaagaatgaaaaacttaaggctaagttagctagctctgaaaatgctatggttaatttgctagagaaaatggaaattcttagcatacataacaatgagctaacaactaagctagaaagcatcggtagcaccccaggagcatctttggttgaaattcctgaagttattaagaaagatgcttctacttcatgcttagatttgattgatgttaattctaatccatgcaatcaagttcttgttaagaatgttattgtagaaacttgttcggatgagattgctatggagaatgagcaattaaagcaagaggtggctcgccttggtaagactttgtatgacaagaaaggcaaagcgaaacaaacccaaccaccacaggataacaccaccgcgggagtgaagaagcctatggagggacaaaccatggtttgctggctgtgtcataaggaaggccacaagtcttaccaatgcaaggtgaagactgggggtaagcaaaagcaaaagccaacaagcaagatatccaacacctacatcaacaaggtggataaaaaggccgctacaccatattttgatcaagaagaaaaagaatggaaaggtgatagcgatcaaggccaacaagcaagccaacaaaggaaagggggccaaacgcatctgggtgccaaaggagattatctcaaccatgaaaagcaccaagaaggtttgggtcccgagagggaagtgagaagtccgaagtacttcggggaatttagagacttggcaaaattgggatgtatatcatgggatgcatcacatcggatcaagattattgccaagtag

SEQ ID NO: 31179 - DNA, 468 bp, Zea mays
  Peptide Sequence Number=SeqID_74554
atggaggttcactgccaaactagctattgtcgaaatgaagatggtttccctaagttgttgagagcatgcacagcatgcctcggaatcaggagccagccagagtatgatggtcgtgaattcatcgagcatggcacagagaaattcagagacacctaccaagtcgttgcccacaaggcattgagggccctatgtcaaatctatgaagaggaagtggctgacaccctgctcagattatttccgtcctttcagagagaccgccctaattggatggccaggatgcgtgccttagaagggcagcagctgctggaggacgaccctacagtcgtgtacctcacggcatacctgcttaccatggatgcacagtatgatctcttggctcggcaccaccgtcagattattgcccaagtagaagatgcagaaaggcgcaaccgtcagctccatgtggatctcaccacagctcaagtgtaa

SEQ ID NO: 31180 - DNA, 225 bp, Zea mays
  Peptide Sequence Number=SeqID_74555
atgtccaaaccggacaaaactttccccctccttatcctcccggtgctccccagccttcataaccctggggttggaccgtacgagttcagattgagtgactgcccacacagtctcgagtggttgtactataaaggagtacagaagatctacttccggaagttcgggctccgacccttcttccagggctacgggttccaggtctgtggtccctgcttcttctattaa

SEQ ID NO: 31181 - DNA, 924 bp, Zea mays
  Peptide Sequence Number=SeqID_74556
atggatggagaatggtggaatcgagaaggccggtgtcacccacaagatcgacatcagcgatggccccgtgctcccagtcccgtccgcctcgaatccattcgtttgcctgcacaggagaagaaccacgcgtcgttcgacttcatcttcatggacgccgacaaggacaactaccccgagcgactgctcaagctggtgaggccggaaaatgcgacatcaaacttcgccgccatcgacgcaagcttgggagatgcgacgggggaaggtgtggcggcgcgggggcttgcgacgagaggcgcgcgcgcggcgagctcggccgtggcactgggcttcagcggggaggcggagaagccccgcgaggagggcaagctgatgttgagttcggcggacgaggggcccggcgacgacgacgcagttgaagagccgactccacggacggtgcaattgcggatacttggaggtatttgggctgataggattggtggtgctcttgcatggagttctttgctttcttctagaagccgtgataggagcatcctccaccatgatatccgtgctcaagaagattatgttagcaagcttaccgggcacaaatctgagcacatgttgctgatttcactcgccaagttcttgcaggactatggcgcatcacagtgtatgtctgcaattgctggctcctatggctatattgctccaggagcagagcgtgcaacagcctatgatgcggaagatggtgcagatgctcaacgaacttcccaatccagctgcaggcaaggagatgaggttcccgacggcgacgatttttccactacacaatcggattcttcagcagcagatggatctattgaagcgtcgtgtgacgaagtcaccaaagagcagcagcaaacgagatctttgctatgtttccttctccttgctaaccactga

SEQ ID NO: 31182 - DNA, 1032 bp, Zea mays
  Peptide Sequence Number=SeqID_74557
atggggagtcgagaactccgggcagaacgggaatcacggctcatgggtaaaatggcctgcattaggcacaccgctcataagtcggtgatccctttcctgccgtctcgccttgcggagcgcccactgcgccgcatggtgtccggtcagtcgagtcacctagagaggctacaccaccgcctgctcgaggagcgggagcgccggtgtcaggagagagagcaacaggactcttcctccccacctcagcaggaggtggagtccatgaggcgcccctcctctgtgcctcagctggaggcgccccctgcaccaccacagggcgccccggctgctggaggagccgctggaggagctgctggaggaggtcctggaggacaccccgacagagatgacgacagagacagcttaggccacagcactaagctctcggagaagcgggagccagagggatgggttgcccgacccgcttttgagcggcacacctggttgatcgagtacagttgtgtagtctaccagcacagtcacgggaggtacccggaccgctggaaggctacctgtctggcacgccgtccggaggacgaccttcggggtgcagaggccttctcagagcactatgctatctctaagagggacactgctgaggcggccaagcaggatgctacacggcgtgcgctttcacagtactgctctttgttcggtggggtcactgatggtcttaacctcaggtactacccccgctgcccaactggcaatacggagagcatgattgtctcgcctatcggtgaaggcaaccctaggttgagcaacacagtcaacctagtcactgtgctcaacaccgagctagaccactctctagacaagctaagccgggctcgtacggagatcgcggaactgcgtgctgagcgcgtagagcgccgccaccaggagggtggttcttccgctcccgttgggactcagcacccttaccgctcgccgccacgtggtcaccacgcctacggcgcccccgactacaggaccaagatagatctggattcttag

SEQ ID NO: 31183 - DNA, 225 bp, Zea mays
  Peptide Sequence Number=SeqID_74558
atgtccaaaccggacaaaactttccccctccttatcctcccggtgctccccagccttcataaccctggggttggaccgtacgagttcagattgagtgactgcccacacagtctcgagtggttgtactataaaggagtacagaagatctacttccggaagttcgggctccgacccttcttccagggctacgggttccaggtccgtggtccccgcttcttctattaa

SEQ ID NO: 31184 - DNA, 518 bp, Zea mays
  Peptide Sequence Number=SeqID_74559
agcttcctgttgcgcccgaggctgaacttggctgttgtcagccttacccgggtggttggcacaacagtcggagcggggtgagcggcgctgttttcctgtcagatcggtcagtgaaggggcgaagtgactgcggtcacttcgaccttgccgactacggcacgcgtgtcaggataaggtgccaggcgatctttgcattgaatgcgcctgcgatatggtcggctggtaaggcgatttggccaaggttgcttcacgacgaagcctgcccgagctgggcttcgggcgagctgaggaaccttcgtccgctctgcgatgagctgaagccggaggcagcgatgtcggcgtggacagaggcagagtcgtctcgaaaagaggcttcatcggcccaggagaaggtggcttcccaggccgaggaggtgcagcagcggcggctggggcttggccaggtcgtccgcgagcgggaccaaccctggagtcacgctgccgaggccgtgagctgggctgatgtcgtcgggggatag

SEQ ID NO: 31185 - DNA, 1332 bp, Zea mays
  Peptide Sequence Number=SeqID_74560
atggaggcccaggcccacacgtcatgtaaccggcgcgccggttactacgtgcaagaaactgcaccgccactcgagccactaccgtgcctcctcgactgcggaaccagtaccgcgactcgaggcaaccctgcgcatgacctaacagtgccaactgagcacatcgatcacgggtcagatagccacgggagaaggcgcgacggtcgatacggccagaaatgggccggcagtaatggcggtggcaggcaggcggaagcagcggacaggcggcacctttggcaggcgaagctggcgacgcttcaccttcgccataatgaccgcgtcaaaaaagggaccgggaaaggggataccccgaaagggatccttctccacgaaggaaacgggccccgagcccccctactgatcagaggttcgaaggctggtccctcggaagggttcaacaaccgcctcagagcactcaggcttcgcgcccactactggtcagaggttcgaaggctggctcctctaaagggttcaatggccgcctcaggccactcgggctccgcgcccattactgatcaggggttcgtaggctggcccccgaagggctcgacagccacctcagacacagagcgagggatgatcctggcctcgggcaaggggagccgacctcgaaggattcacgcctcgcccgaggaccccctcaagcaacggacacaccttcagctcgcccgaggcccagtcttcgccaagaagcaaccttggccagccaagtccggcttcgggcgccataggaagctccgcctcgcccgaccccagggctcagactcggcctcggccccgaaagacgacgaactccgcctcgcccgaccccagggctcggactcggcctcggccccggaagacgacgaactccgcctcgcccgaccccagggctcggactcggcctcggccccggaagacgacgaactccgcctcgcccgaccccagggctcggactcggcctcggccccggaagacgacaaactccgcctcgcccgacccggggctcggactcgacctcgaccttggaagatagactcgacctcgacctcggaggagcctccgcctcgcccgacccagggctcggaccgaccacatcacggggggggcatcattaccctacccttagctagctcaggctacggggaacaagaccggcgtcccatctggctcgccccgggaccccccggggtcgaaacgccgacaaatagattccaagccaggttggctaactccaacgtggatgtaggctattttgagacagggacttcatttccgctgcgactattccattgtgatccagatttcgagtag

SEQ ID NO: 31186 - DNA, 216 bp, Zea mays
  Peptide Sequence Number=SeqID_74561
atggaccttattatcacacctatccacgtggggcccatctttatgggccgaattacacatgggcctcccacggaggtgagagggcgggagcctttgtctgcgcaaagagaggacgaagtcgtagagcgaaagggtggtgtgttcgccttcgccccaacatttgccttccgagggactagttcgactaagtcagctggtgccgaagaccaccgttag

SEQ ID NO: 31187 - DNA, 1587 bp, Zea mays
  Peptide Sequence Number=SeqID_74562
atggcgtgggcgagcgcgaagcctaccgcccctctcgctccagcatgcctccgcctggcgcgcccggcgccagcatgccgctgcctgtcgcgcccactcatgagcgatggcctccctcgccaccacgcgctactgaggtggcggtgggtggcgccgatcgccggcggcggctggtccggcgaccatggcaagcgtggcgaagtggtctttgcaggacccgtggtccaggcggccgccttcgccgagcacattacgtcgggggtgttgaccttggagttttctactgaaaggcaacgacttgaggggaggattgagcgcatccgaacgcagcatacggaggctgtgcgagacaagtcggcaacagaaaacaagggcagcaatctgctggaaaagctgtcggcaacggaggctaagaaagaggacctcggtcgctggcttgcggcagaaaaggaagatgcggaaaaagcccacacagaggcccacgctgcccgtgccgaggccaacctcgccctcaagcgtgccaccgacgcggagtcggggcagaggagtctgcgcggctatgtggacaaagcggaagcctccacccgcactggggtcgaccgagcacacgcgttgctcgtggacacgtactgtcagcttggtgcgcgtatcgcccccttcgacacatctggcaaaagaggtgggcctccgattcctcgggtggctgcaggaggagctagagttgctcctgtccatcgtgacggtcatttcgaggtctttgaccgagcaaacgaggacttcgaccgtggaatcttccaggtcgaagatgagatgatgaacgatgaagaattcgacgacttcggtggcctggaaagcttggcgacccgggcagaagatgcgaggacgggggttgaagagcaaccggcgccacagattggccctggcaaagaccctgcagcggcggctgcgccggctagcgaagacactgcagcgtcggctgctccttcgcaggagtcttcggatgagaatttagattattttgctgcgttggatgtggccgcggcggagtccttgccgcagcctgaagtgcgcgaagtctctgctcccccggctgcggcgatgcccgaagagcaccaccggcgaagggtggtgtcgaagcacaatgttggcgagatgtcgcgaagtgggaggcgtcgacggatggggatggaatggtcccgtcttcggctagatcggggtggccaacgagatttgttgtcatcgacgtccgggacgtgtattggaaagggggatctgcggaatctttttaagggcgaagagttgaagatgatgatgtttaatttttgtgaggcaggccttattctgaaggccgagccgattgtggccgacaaccctttgttgtgtggggacccgtgctttaactcttgcggcgtcattgcttcggatccatacatcaggcagaagggtgtgaacccggttgctcggcactctgtcatattcagcacccatatggcttcggacagaggcaaagactggctttgtgccgatggagctgcagaattccctgaagtcttggctgtcgaactgtttgccattgtcgactattag

SEQ ID NO: 31188 - DNA, 1161 bp, Zea mays
  Peptide Sequence Number=SeqID_74563
atggcgcccaggcctgctcctcccctcggccagccagggcgcggtggcccctgcccctgcctcttcttcctcgcgcacgctgcatctcctagctcggcctcgccatcgcgcagcagcagacgccatcttcttccctggattccccacgccagcaatagggagcacggctccttccctccatggccggaccgccctccccttgctgccggcgagcagcagctccctggatccatggcaccggtgaagctcgagcagtcaagctcccagctatggcgcccgctccctgcagggatgcagttcccttggccgacgcccggcagagcagccatggccgagctccctgggagcacgccggtgcccctgctctccccttggccgccagcagccatggccgctagcccccggcgagctcgggttcttctccctggccgccctgctccctgtccacggcgcccaggaattccaacagcagcatctcccttccccaaactgctcttgccatggccgattcttccctgcacccagctcctcctcgccatatgcccgacgcccctcgctgcgcagctcctccacggtgcagcaccgctgttcctgcagcctcggcccctcccccggcttcctcgctgccagcgctgcgcgcgtgccacgtgctcgacaaaatgtccaagtggggtgttgcgcagtgagcagcacgccgtgatgcgcccccggtgttcgctgtttttgcgcaatcccaacatcgacgccgttcaccccggagagaaccccgtgttttgcgtggagaaggcaagtcgttcaacctcgtcggatgttcggagcgatgcacaaatcggaatcgccatcatccttacaaacaccgattgggtttgtttatggattcatgattatctagagagtatatttattgatgtgatgagtagtttagaaaatgctagttgcgtagaggataaattattaaaacatgagtgtcggagtttatatattactggtcgcgccacgttgattgaagtgtctcgagtgcacgccaccatatggttgtatgcgagacaaggttatgcgcatgtatatgttgcgtctcggattgcggcaataatagtcaagttgatgtgtatgttatttagcggcgatgtcgttgctctagttaaccgaattgttagatga

SEQ ID NO: 31189 - DNA, 846 bp, Zea mays
  Peptide Sequence Number=SeqID_74564
ggtgttacaatggtgggggaaagcgagccgggctgcggcctctgcccctccctcagcctcaaggattttcatcatccaggccaagatggaggatggggcgagtcggagtcggcccctgcgtgggcggcggcccgccccttcactcagtggtcggagggaaggggcggttgtcgtccgtggcgctggcagctgcaccgtgcctggctctcggagcgagtggcttcggagccgcttgcggcgccggcgtctgccacggcagctggaagaggttcttccgccggcgagatagccaaggccggccacggactgacctccaactctacggccttctgcccgtccttgcctcacaagttttggcatgggcgggggggggggggggcagaagtcgtcgtcgtcgccgctgctggagcaggtgacggcacgccgttcgtcggtcttctgttgctccgcatgcccaccccaatcgagtggggttactcgcctgttgattatctgaaccgcttcaccaagcatgagtcgccccgtgtcaaggtgacgagtgaggccaggggtagcagtatcagcatgaacagaggcggagttggctcgaaaatgaaacctggttggccggagcctagctgggttgtccgtcagcgggaccgacgccggagtcgatcagccgaggcctcgggtcgggcaggcgcccttggaagatggttggccgaggccccagggagcggagatcctcagaccgcgtcgccgtccgaggctaggtcggatctcgccgaaggtgtcgtcgatgccgagggtgctgccgcccccttccagcgccaagacccgagcctgcaggatcagagtgtcttgtag

SEQ ID NO: 31190 - DNA, 1176 bp, Zea mays
  Peptide Sequence Number=SeqID_74565
atgcattgcgcccttccaccttccgagccccctgatggggagcgcacgcgttgctttcgtcttgctgctgttggaggagcgcaacttcgcggaagttggtacctttcagccatcgctcggcttcaaggattttcattaggcagcccggctgcatcccctcgccgatggtcacccaagacggtgaccaccagtttgatggtggggagaagcaagccaggctgcggcctctgccctgccctcagcttcaaggatcttcatcatccttgctggggcggagggcgagctgagccggagctctacctcccgtacgggacggcgggccacctcctccttcagcattcaggggagagggcgctcaccggcctagcagggggggcggacttcgacaacgcggggccgatcggccgcaagcgtcgtcagctccaacgtgcccggttcgctggctcagctggctctggcacagcttccggtgccacctcccaccgctgggcggagtgcggctatttgctcgccgtacgggcggttgttgcgccgcacgcaccgggggaccgcccaagacgtcgcgcgctgctagggcggcgttcgagttcttgggctgtcctgcccttgctccggtacgacgcctctgcgcggaggtcggtgctcgcccgtccgggaggacccgagtggggatctgccggtgggcagatggctgccgtcgtcggtgctgaggtggtggcggctgaagaagtcctcgttgccggcgagatcgccgccaccatctgcgctccgggcctccggctctttggctctaatagcttgtcctcgcccctcgagtggggacgtgggcgagggccttatcgcagcagcgtctgccctgaggtcatcgctgctgctgtttggccgcccggagcggaggtcgttgtcgctgctgccggagtgggcggcggcgagccacctgggattttgtcgtcccgcaggccctccaatgtggggggttgttcgtacctacgggggtggaaccggagttccgtctgtaatggcaccttgagtgtcggtgtctgttcattgcggctgtcggggcctgaacatctaggtggagatcctccgaccgtgtcgccgtccgaggtcgggttggattccgccgaaggtggagtcgacgccgagggtgctgctgctccccctactgatgtctga

SEQ ID NO: 31191 - DNA, 558 bp, Zea mays
  Peptide Sequence Number=SeqID_74566
atgaagcagtggcgtgacgatgtcgaccgcctgctcggcatggcgcattctggctcagccaggcccaggcctcggtcatcccggcgtcaacatgaggcgtcagcattagtgcgctcgccttcagtgagggctacgccgaccgaggacctgtgggcggagctcaaccccaggcgtgcgggagaggatgcaccggtgtcacacccgggtttcgaggcaccaagacccgggcgcgaacataatcaccagtccgagctgctcatgaccgtgagcacgactagaataccagttttacactcagcagaggttgcgcatctttaccaacaagtcatgttacccatctgccaagagatcgcgacttcccatacacctctactgaggaggcgaggcagggtaacactacgaggcctttacaaagttccactagcttcagaaaacccgctacagtttataggaagctccaatgcagggacccctcgcatgaccgccatcgcagcaaaatcatcccaagggcctccctacactgaccactcccctactgcccttgcccctttcgggtaa

SEQ ID NO: 31192 - DNA, 731 bp, Zea mays
  Peptide Sequence Number=SeqID_74567
cggcggcggcggttccctcgggcgtgcgagcaggcgcccgtgagcaggagagccccggccgccgcggcgctctccagccggcggattggcggacgtggagggggcgcgaggaggagcctcagggtccgcggcggtacagcttcaggaggcaccggtcgggcgcggcggagtgggcggcggtggtgttgttcatggtgctggcggtcgtggtgctgctggcgtcgtggccgtccttgtggtggtgctgctgctgctgccccgcgcgccgtacgtggcggtgcgggcggcgagcctgtacgcgctggtgtacgggcagacgggggcgctggacgacgtgcaggtcacggtcctacccgttctacgtgcccgccaggggcgtcctcccgctggcgtacgtggggcgcgcgcagggcgccccgctgggcgacgccgacaacgccgccatggaggccgcgctccgcgacggcgtgcctggcgtgccagctccgcttcttctggcccaacgacaccgtgctccccttcagatgcagctccaagtccaagctcttgttcttctgacagccgtgccctctgtattgtctagtggctactcttctgacctcagttccatggccgggcggagagaagaacccggccggccgcaaacgattattcaacagtggcaatgcggcggcgaccttcgaatctactttctgtcaaaaccattgaacattcggcttgcagaatcgtga

SEQ ID NO: 31193 - DNA, 195 bp, Zea mays
  Peptide Sequence Number=SeqID_74568
atggcagagaatcgcgcacggtcctccagttgccgccgcaagaattccccactgcagacgccctcaaaattcaaggctcaagtatcatttgagatgcaattgtggacattactccacaactcatcacactcaatcaaagatccaaatcaaattagcatcataagaacaagcattcaagcacatagatacctataa

SEQ ID NO: 31194 - DNA, 555 bp, Zea mays
  Peptide Sequence Number=SeqID_74569
atggccaacgattccttggtcacagctcgtgtcataggagatgtcctggaccccttctacagctccattgatctgatggtgctgttcaacggtttgcctattgttagtggcgtggagctgcgtcctcccgcggtctccgagagacccagggtcgagatcggaggagatgattatcgcgttgcatgtactctggtgatggtcgatccagatgccccgaacccaagcaacccgaccctgagggagtacctgcactggatggtgactgacatcccagcgtccaccgatgatacacacggtcgggaggtgatgtgctacgaggcccctaatccgacgacgggcatccaccgcatggtgctggtgctgttccggcagctggggcgggagacggtgtacgcgccatccaggcgccacaacttcagcacgcgcgccttcgcccgccgctacaacctcggcgcgcccgtcgcagccatgtacttcaactgccagcgccagaacggctccggcggacggaggttcaccgggccctacaccggcggcagacgtggtggtgcttga

SEQ ID NO: 31195 - DNA, 246 bp, Zea mays
  Peptide Sequence Number=SeqID_74570
atggagatagtctcggctgatggccaacatcacttcgatgacctcataaggcgtgaggaggaggtgctgcaacaactcgccgaacggtgcgataaagaggaggaggaggcgcggaccatccgaaagcgtgtagtggaggatccactcccgcgccctatgccgcagaccatcgatgcctccgcagaaagcaccaccaagtggttcaatcccatgtttggtgtccagatcggcgccaacagtttctaa

SEQ ID NO: 31196 - DNA, 654 bp, Zea mays
  Peptide Sequence Number=SeqID_74571
atggagcctatccataggctcttcgggcctataaatgacagccgccgcgaccgcccccatcttggtgactcaaccggtgtgccaaacgacatcttggcagctatcgcggtttttagggccgccaccgtcgaacttgaggtgaatcgttgccgtgaaccttggcgcatatctctggtggtgctatatgtcgtgtggggtttcccgtggcgtcttcgagcttgggggcgctcggtgtgccctcaattcgtcactagagaagtccgtctacggcagttctacgccgcaccgttgttcagcgaggttacgagtcacttgaagaccaagttggtacctgggaatcccgagtctaaggcaagttgtgaccttgatcactcttctttacataataatgttcttgttaatcactatgacatgctcagaaccacccgggaaaacagtgctaccacaagggtggaatgggattcccttggccatgtaattaggaaagctagggagagactaccttacccgaaaggggcaagcggggaggcatcgctgctagagtatagggaggttctccggtcgaactgctgcgatggcaattcagacgagggattcctatgcttcctttgtcctgaaaccgtagtgggtactcttgaactattggaactttag

SEQ ID NO: 31197 - DNA, 1959 bp, Zea mays
  Peptide Sequence Number=SeqID_74572
atgaagcacgtggaccgtcctccaaataaccccaaacgtataacaattcagtcaagccaggagtgtttcagtgttgacattccctctgcagaacagtctaatccatgtccagaagatggaaatcctccaaatgttgacagtcaaaatttgaccaatgaaacagttcagattgattctgatgaagatgacttcatgccagctctgaagaagcgtaatgtttctgaaagccacacaagagtgttaagaaaagttgtgacaaagaggattaaacatgaggagctaccccgacaggttaatgttatgcatacccaacaaacaatttcatatttatcacaccttcaatggttgatggacaaactagaccccaaggacatgacaattcgtcctggtccaggaaaggaactaaagatcacaaaggacattgttcatcttatccttggtgtgccaaatcatggaggtggtaaaccattggggattgacgaagcagttgcagcaagcaacttgagggctgagcttggtgtggccaaagatgagttcaatgtgacatttctacaggatcgtttaaggaaaggcgaggatgatgacctttcaatcagatgtttcttcctcattttattcaaccgtctgctgtttccaactgctagctggggcataacatatcatgaggtgcttctcacagaagaaatgcaccgtttccatgagatcgactggtgccagttgatttttaatgatctatgtgaagctgcgaagaagtggcacaaccgaatcaccacaaatgtctccacgactatatatggatgctccattgttgtccttttgtattacttggatcacctgcatacaaccgctgccccccaaaataagactggcacacctcgcattaaattctttgataagaatagcataaaagctttgaccaaagctgacaagaggaaggtacgccatggggctgaacctttcggacattgtgaaatgatgtcaagtaagatcaacgatctcccacatcgtcatcgatctaatttcacagacattcttgctgcatatgacttggaggttgacaagtcatgcatagccataaaagacaacattgacaaaattattgagaagcaatacgacatagcagacaagtttatagaattgatagacgaggtactacgtgccgagtctgataatttagaaaacgagactgatgagccacagcatccggggaattcggctgattcagcagcttcgcagctcgagacccagctgggtggtactcagtttgaagaaattcatgaaagacaacagcatatccgtagagtgcttgagacatgtcccgacgaatcggatgtggttacagatcaacagagaggtgaaatggcaacagaggaaatggaacacaatgacagtgggccagtttttgaccagaccccaactcctcatgatgatacactgaaagggacaacaaactctggatctgatccaccccttatagagcatgagtgcgttcgttctctgtgggatttaatttgttccaaggacattgaccaaagcagggttgtcatagattacggtgaatacagtgcaaactgtatggatatttatgaatctttcgcggagggcaaatgtcttgagaatgtcttcatgcagtgtttcattgagtgtgttcgtgatgattccaaaaatcatcgtcgaactatgacatctaacagattaatacttgatgtcaatgttggggctctgttaaattttgaagagcaggaacgtcacagcaagaatcctcagccgtttgatcaaaatgtgttacagaattgcttgcacaacacattgcctcctttggtaaatctggataaatgcaagtcggacaattcccgagacctacgtgctcatgcccttcatcaactcacattccatcgcatgaacaaggcgctgccacttccattagatatccagagatttatgtttgcgcgtaattag

SEQ ID NO: 31198 - DNA, 384 bp, Zea mays
  Peptide Sequence Number=SeqID_74573
atggcggagaacgtggaagcagtcgggtcggcggagagcgaggaagcagacgcgtcggcgaagaaaggcatcgcttgctcgccggccttggaagtgtcgcctcctcggggcttcggggacgccgccgcttgcccgcacaagggccccgctgcggatcgaggaacctccgccaccgcgcatcgaggaaatggagttgcggccaccggcctgggaaccgccgccgccgcacaagggtgctgccgccgctcgccctctggatcaggggccgccattgccggcctgggaaccgccgccaccgcatgtcgaggtcggggagccacggccaccgcagtcactggccggggttcaccgccgcgcgcgctatcgggcaaccgctgtcgctaa

SEQ ID NO: 31199 - DNA, 219 bp, Zea mays
  Peptide Sequence Number=SeqID_74574
atggctcacagcgcaagtgttcctcttgtgatgaaccgtgatggagttggccaggggcggcaccaaatttacagtggcaaggacggagaccgcgcggtggcgttcgaccggccaaagccgaattcgtcgcggtttgttgcaacgcccaacggatttgaggctttaggagagctccaaaagtttggagagacttgtgggccttggatctcgttcgtctaa

SEQ ID NO: 31200 - DNA, 783 bp, Zea mays
  Peptide Sequence Number=SeqID_74575
atgcttgctggcgggatttggaagggcaagctgtatcaaccacctgtggtcatcttttatgtatggttccactctactgccctctctggtgcagatgatgctaggaaaatactcaataatgatggtacatgtccaatttgtgatcaggtgctctcaaaaagccatatgaaacctatggatataaatccaggtgatgattggacaaatgcgaaatttactgagaaactggaagaagtacataccgcataccagaagatggcgaaaagatgtcagttgttggagcaagagaatgaaaacttgaacagagataagcacgagctgcaagaaaaatttgctgagaaatccaggcagaagaggaagcttgatgagatgtatgaccaactgaggaatgaatatgagtcggtgaagcgttctgcccttcaacctgcaaataactacttagcaagacctcagccagacttatttgcaggcatgcccaacgtgatggatggtggcgaccatctgagacaaggatcggttgatcttcctaaaactccagggcagagagatgagggctggggtccaccgccaaggcaacgtcactgcacctctggtccctttgatctgtccaccgggtctcctgcccatgccgtggctcctccggctgatatcaggcccagacagcagacacggtcagtcttcggagctacactgaacaatccatcaagcaccctgcgaaacctcataatctcacctgtcaagcgtccccagacgtcccgtaatcgccaacacatattcacgtaa

SEQ ID NO: 31201 - DNA, 414 bp, Zea mays
  Peptide Sequence Number=SeqID_74576
atgccttctatcacttcagccttgtccattataacatctagaaagaaaccatatagtgatctgaaacatgagcacaaggctaacgagctgctgacggcggtgtggcgccgtgcgatcgaacagcaaatgctggcgttcttcctcgccaaggttgctgtcgactcgcaggtgctgcgccgcgtcctcgccgggaccggtggcagcgagagcgacggggtcttcctgacagtgacagtgaccgccggccagctgggcagcggaaatggcaatggtgacaaagcagcggggaggcgcaccgatggggtcttaggcggtggtgaggatggtttcgacttcacggggctcctcaccggcggcggcgggcagacttctgatgccaccctgcatgttcagtgcggacagcggctactctag

SEQ ID NO: 31202 - DNA, 375 bp, Zea mays
  Peptide Sequence Number=SeqID_74577
atggccagcatactagaccctgttatggaatcttcaaaagtacaaactcccgctacaacgcctgatagaaagggtgaaatgccaaagaaatctagtgaagctggtgcaacactagatattgctgaagctaggccatcagctcgtatcgagacaagatattcggtggttgctgaagaaggtatcgaagcaagaccttcaaaagctgctggagcagcattaatgttggaaagagaaggtgctgctgaagaatctgaatcacccgcccctggaatgtgtggcgaaccgcccgaattattccaacttaagtgtccatgtcccgccttaaaggcaaggccgcacttaaatcggaataaaccgtcagttcctcggatctag

SEQ ID NO: 31203 - DNA, 588 bp, Zea mays
  Peptide Sequence Number=SeqID_74578
atgcccaacatagccatcatagttcccagacttcgagtatgcaacagacttgttttagaccgccagctccgagaggtagaggaggaagaagttttggtggtggaaggtttggcaatcaacctcgaaagttgtactgccttttttgtggcgaggacaagggccacacaacaaggacatgctaggttaccattcaaacgcagaaagaaattgctaaagctgaagcgtgccagagtcagccgaagcaagtcctccacactgcttcgtgctactctccttatgtcccagactacaaagtcgttcctaagggagcgcagagtaagttccgaagctacaaagtcattcctaagggagcgtagagaaatattcgtcaacaacgatattgaacaacagttatggcatagaagacgtattaattctttgcgaagcatgaaaagaagggaaggtgttttttcgccgaaggctcaaaagtgcttcattcagcagcctgttaacagcttcgtcaatgatcgtattggcgaccttcatcacatcaaaagcttctttcatggcgaggtcagcctcaggatcgaatgcctccggaggtggtaa

SEQ ID NO: 31204 - DNA, 576 bp, Zea mays
  Peptide Sequence Number=SeqID_74579
atgtcttcttgctcccttatgcatcgcgtcttttccaccttccaagcccccggatgggggataccccgccgtcttttcgcctcatcgttggaggaacgcaactccgtgggagttggtacctttcagccatcgttcggcttcaaggattttcatcagccagcccggctgtacccccccgccggcggtcacccgatacgcttcaaggatgttcatcatcctcgctggggtgggggccgggctgagccggcgctctacctcccgcgcgggttcgtgggtcaccctctcccgcggcgttcgagggagagggcgctcactggccctgcgggcggcccggacttcgacaacgcggggctggtcaacgggggacgtcgtcacctccagcgtgtcgggctcgtcggcttggctcccggcggccccttctgccggagggcggctgccgcgccacgtgcacgggaggaccgctccagatgccgcgcgctgctagggcggcgttcgtgttctggggtggtcctgcctttgcaccggcgtggcatcttcacgcggaggccggcgccccactcgtccgggaggatttga

SEQ ID NO: 31205 - DNA, 417 bp, Zea mays
  Peptide Sequence Number=SeqID_74580
atgcaggcggcatgcaaccgcgccaagtggacgcgcttctccgactcccgacacgccaacgtggaggcccaggcccacgcgtcacgcaaccggcgcgccggatgctgcatacaagcaactgcaccgccacttgcgccaccaccgaaaagcgggcgacgcttcgccttcgccgtaataaccgcgccaaaaaagggaccaggaaagggggataccccgaaaaggatccttccccgtgaaggaaccaggctccgagcctccctactgatcagaggttcgaaggctggccccccgaagggttcaacagccgcctcagatcgcgtgggccctacacgcactactggtcagaggttcgaaggccggccccccgaagggttccacggccgcctcaggctacccgggctccgtgcccattactga

SEQ ID NO: 31206 - DNA, 1212 bp, Zea mays
  Peptide Sequence Number=SeqID_74581
atggggaacactcgcaatccttccgccttgtcgttggaggaacgcaacttcgcggaagttgcttcaaggatcttcatcatccttgctggggcggagagcgaggatgcaacattccgtcctcctcctcgctttcgtggcgaggacgggagcgaggacctgccggtgcgctttggagcggcccgcgctcgccggtgcggcgttggtggaaaggcggacgccgccgtcggtgctgacgtggtggcagctggaggaagcttccccaccgtcgaggccgtcagcaccgcctacggaccgacctccggctctttggctttaatgtctggttcgtgtcccttgagtggggacgcgaacgagagccttctggtggctgcgtccgtcctgggaccatggactgctgctgcagaggtcgctggcgagccgccagagcttgtcgccccgcaggctccccggtgtggaggttgttcatacccgcggggacggaaccggagttccgtttgtaatggcaccttgagtgccggtgtctgttcattgtggctgtcggggcctgaacatgagtccctcggctcggtcggccttgccgcccgaggcttctcttgcttagttaaaggaaacccttggccgctcttcgatgagccgaagctggaggcagcggtgtcagcacggacagaggcggagttggctcgaaaagaagacttcgtcggtcggagcctggccgggccgtccactggcgggaccgacgccggagtcgagttgccgaggccacgagccgggctgatgtcctcgggggacagctggctgaggcttcggggtggccggccgagctgtctgctcgagccggattcttggagaagaccctggcggcgatggcccgggcgcggtgctgatgtcgtccttcggagtggagatcctcctaccgcgttgccgtctgaggctaggtcggacttcaccgaaggtgtagttgacgtcgagggtgctgctgctccccctccgtcgaggcccgagcctgcaggatcggtttatcttgtagtaattgtttgtccgagcgagagttacttttcacggaaggtgatgagtgaggattctgctatcgatatagtcgagaaggcccgaaaaatcgtttcggcagaagagtttttcgagcgtgaagacttgttcggcccgcagaatcacctatccgagcgtgagttacttatcgcagaaggtgatgagtga

SEQ ID NO: 31207 - DNA, 72 bp, Zea mays
  Peptide Sequence Number=SeqID_74582
atggccccgtcgtggggagctatcggcgccgccgcacctgtctgcctgagttggggaggatctagatcatag

SEQ ID NO: 31208 - DNA, 195 bp, Zea mays
  Peptide Sequence Number=SeqID_74583
atggctctctgcgcgtcaacggttgactaccacagtgaacggtgtggtcagaagtcagagcagagaagtcagaacgcaccggacatgtccggtgtgccacctgactgtccagtgccacttgaagacagaagacgccaatgtttccttgccaatattgatttgaggttgctcccaaatgtcattcgcatcatttga

SEQ ID NO: 31209 - DNA, 363 bp, Zea mays
  Peptide Sequence Number=SeqID_74584
atgatgacaaaggaagccatcttcagaggccatagcacacttcacagtcttcgggacagcagcaaagctccttcaggccgccagctccaaggggcagaggcgctaggggcttcagaggaagatatggggatcagcccaggaaaatctattgcttattctgtggagaggacaaagatttacaaagctcaaaagtcgttcctaagggaatgcagagccaaaattgccgaagctataaaagtcgttcctaagggagcacagcccatgtttatgatgtccagcgcttccttcatttttggatcagctaggggatcgtacggttctggcagtggagataattcagctgaagtaggaaaaattaattag

SEQ ID NO: 31210 - DNA, 438 bp, Zea mays
  Peptide Sequence Number=SeqID_74585
atggaccacaagctgaagcagtccatcatcgatgatcttaacaggttcatcaagaggaatgattactataagaagattggcaaggcatggaagcgggggtacctgctgtatggtccacctgggactgggaagtctagcctaatcgcggccatggccaaccatctcagggaggaaggtgagggacatggcaagtcaaaatctacagaacaaaacaggagggaagagaaggtaacgctgtctgggctgctcaactttgttgatgggctgtggtcaacaagtggggaagagaggatcatcgtcttcacaaccaactacaaggagtggctcgacccagcactgctacggcctgaaaggatggacatgcacatccccatggggtattgcaccctagatcttttcgaaatccttgccaacactaccactccattgagaccatga

SEQ ID NO: 31211 - DNA, 291 bp, Zea mays
  Peptide Sequence Number=SeqID_74586
atggtgaatagtgatgacaacccaattaaaggactaacaagtgtgctaagtgttgaacaggtgattaattcaaagctaacagggttcaacacaaagacaaccgatcaagccaaggatggaggcaagaagagcttcgaggtaccgagtgcatgggagaaggtcaaggagaccaggaacccaaagccaagggtgaagaagaagacttgcaaagtcaaggatgatcgagttaataagagttatggtgcatcaaggatcactacaaaaggacatgacttacaaccaatgaggtaa

SEQ ID NO: 31212 - DNA, 654 bp, Zea mays
  Peptide Sequence Number=SeqID_74587
atgcgcagcgagtccacggccgcccaatccctctgccaccgtagaccggtcagtggagccattcccaactccgtccagccctcggagaagactgtgcacacctccgtgaggctccccgagcgaggaatcggagtttgcttcgccggagaggctagtccacgctcgccggagctctcaaccccgccggagtacgtggaccgggtaaaccactccaccatccttcgattccttgtgcatacggtcgctccgttacctcatgaagctcaccatgccctcggattgaaccagttcgccgtggtttggccggtatactcgccgccgacgaggacacccgcctgcacgcgtggaccgggcgattccggccatctccgacgtcaagtcgtacctcgacgtgaccgccagagtctccccgagccaaccccacccttcaccggacctccctcgccgccggtaagccgcgccacccttttctttcccgcggttactgtttgcataaggggaaggactgcggactgtaatcttgctgacggaaagtacatcctcgtgccggagcaaggagctgctcaggaggtagccccagatccagcacccgagcctgcacccgaggacctgtctgccactgctttggaaggcaagccccggtcttatgcataa

SEQ ID NO: 31213 - DNA, 1893 bp, Zea mays
  Peptide Sequence Number=SeqID_74588
atggacaaggatcgccaaggggcggcgcaaaaacgccaggcgactgtcaggattcacgaagctcggccgaaaaggccgcggggaactgcgaaggctgtggcctccggcggaggtaagccgcccctggcggcgaaggctggcgcctctgcacctagcaaggcgccggaggcaacggcgggcgccggaggctccaagtcagcgaaggtggtgcccccggccagcggagtggcggaggcttcgaaggcggcccgagcgctgccgctggcgggcaagcgtgttgccgacttcggcaccgacattactgtggatgactatcttggtgggtcggacgagggccagcttgccatagttgcgcctgccgcggcgatcgcgacggctgcgcaagcgccgaaggcgaggggcgagatccttggcgccggaggcgaggtgccggccctcgcgttggtcagggacgaggcgggcgcggcgacccgtcggctgaagggagtgacggaggcgctgagtcaggcgacggaggcgttgagtcaggtggctgatttcaccagccgtactgcgtcgggggcccttacggcggctttgtctgccgaagtcgagagacttcggacgcaacatgctgacgctgtccgtgagaagtcggcctccgacagcaagtgccgcaatctgacagacaaggtggccgccctggagagggagaaagttgacctccggcgccaactggcggcggagaggagggaagccaacgaggccatcgccaaggaacaggctgcgcaggcggatgccaagctggcgcgggtggagggcaatctcgccaaggagctcgtagagcaactgcaagggcggctcaccgccctggagagccacgcgaaggaggccgaggccgcgatgcgtgcggaggccgaacggacgcgcacacagcttatggatacatatcgtgagcttggtgcgcggaccggtgacttcgaggtgccggaccgagagcccgggcttcgctgtctgcagtgggcgcaggaggagctgctggaacttccaaccgttgtgggggggttgatgtcgtacgcctccctggtcacctgcgagggggcgatgaacgcgctctcccgcgaagggtgccggcacttcgaggccttcgaccaggtggatgaagactttgagcgagacatctataaggtcgaagaccccgtagtgaaggagtccgccggggccctttacgaccggatgtggggtctgtacggtcgtgaggtggtcagggagcgcgccgaggctgcgagggctcaggcggagcgcggcgagcgggtggacgacttcggggctctggacagcgtgctgccagatctggggtcgaccctcgcggaggctgtgactggggtcgacctggagccaatcccggagaccgcagcgatcgcgacggctgcccccccatccgctgcgactggcgaaggcgaccctgatgcccccgcagccgctgtgccgagtgctgaaggttccgcggcggtggcggcggaaactgcggcggaggccgcggcggagcctttggcggagccaacggcgggggctcccgcagcgccagggccttcgcaggttcaagaatttgggcctgcgcacgcaaccgctactactgagtttttggcggcttcgaccgcggaaggtgggaatgaatatggtgggcctgtatctgagttttttgattttactgactctgggagctcggttgagtggactgaggagtcgtcggaggaggacttggattattttgcggccttggacgtggctgcggcggaggcgtcgccacacaccgcggatgcgtcaaacgtgccaggtcctagcaccggacgccgacgacgaagggcggttgcaaagcgtagggttagcgcggaggaaggggctcggcttcgc

SEQ ID NO: 31214 - DNA, 246 bp, Zea mays
  Peptide Sequence Number=SeqID_74589
atgccggtcatggccagtccgagcaacaaggtggtcgacggcgagcgcgtcgtggccatggaaaacgaggaagaggtagaagttgaagaagcgtggactacaccaccaccacgtgaagaacctcaagcaggaaactgcttttactttgacatctgtggaatagaacctgattcacctatcacacaaggcaagccccggtgcatttgccacctccttgctattttaaaatctttctcacttacttga

SEQ ID NO: 31215 - DNA, 165 bp, Zea mays
  Peptide Sequence Number=SeqID_74590
atggcgagagtagcatgtaccctccatggcaagaggctggacggtggtgtatctgtgctctcggttggggtgaggaagcaacaaatgtttgttgcttttgttccaaggtggtgcccaaagaagaaaatcaagactgaagcctcggaaggaagtgtcctccgttaa

SEQ ID NO: 31216 - DNA, 1986 bp, Zea mays
  Peptide Sequence Number=SeqID_74591
atgagcagcgggcgcgatcttgttgaggaattcatggatatggagtatggcccttggcgcatggctgggtacttggcaaagaacccggtcgcgtttgtgcgtgaggtggagcccgaggctgcgaggattgtagggcaatacatgccgaggacggagaccttgcgtagttgggatattcgcggttctaatgttcgtttgaaccgtgtttttgagttgaaccgtatgccatatggtggttacccgggagacgacgatgctgttgttgtcgaccgccagggaaagagggcggcgacagcggtcgacggaggcccttcacggggaactgtgccagctgcgggcactaaaaagaggaaactaggtactgctgctgaggggttggggttctccgatcatttttctgtggatttattgggaacttgcgcggcccccggggagaggatgtcttcgcccaagctccggaaaccttccgcgcgaatgctgaaggttaccaggggtcggtggcctaggaatgttccgatcccccgagcggccggcaaggacattcttacttctcgattagctcgtgagatgaggatttttccttacggggggaatgttgctactgttgtgtcagcagtgatggaaaaggatcgccaagacgcgtcgcggaagcgtcgggcgtttgctagggtcggggacccgtgccacgaggtcaagatggctcggggtgttgcgaagtctaccgccccttgtaccagcaagcctccactgggtgcaaagtccgccgcccctagccccagcaagccgctccctgccgtgttcgtgcaggagcaaaggcctccgtcgccgtcgcgtgctgctgaggcggaggtgggcaaggtcggggcctccatggatatttccgtagaggactatcttctagggtcggaggctgggcagctggctgttgccccagcatctatggctgctgggtcggtcgtcgtggcgactggtgtgacggggtctgtgcaggacccgtgggcccagttttacgccggcggcgagatcgtgtcggccgccgccgctaaggacgtggcgggcttagttgcgcaacagctgaagcatgcgaccgccttcgccgaacggattgcgtccggggccctgacctcggagtttgctgccaaaaggcggcgactcgaagggaggaatgagcgtctccggacgcagctcactaaggctgtgcaggacaagtcagccacgaaaagcaagagccacaatctgatggacaagctgtcggcggcggaggccgaaaaggaggaacttggccgtcggctggccgcgaagaaggaggacactgataaggcctgcgcggaggctcaggctgcacgcgccgaatcaaaacttgcgcgcgccgaggctagccttgccctccaacgtgctgcggaggtggaggcgaaccacaggagccttcgtggccatctggacaaggcggaggcctctacccgcacaggggaggagctagaggtgctaccgtcgatcgtgacaagtctcatgcactttgaagtcttcgatcgacccgatgaagactttggccacgagatcttccaggttgaagatgcggtgctaaagcgctccactggggcgctttacgataggatgtggggccctcacggccgcgacagcgtctgggaaaggtctgaccgggcgatggagcagatggcgaatgttgaggaggtcgaagacttgggtggcctggagagcacgggcgtgagggcgggggctgaggaccagtcggcgccgccaactggcgttggtgaggacgaccctgtggccgccgccacgttgcttgaagatactttgggggcggccacgccggttccgacgtctgggcctgcgcaagcaacccctactgatagtattaattttgtggtggccacgaacgcagtgcctgctaatgatagtctttctggttctgaatctgggtcttttttgtctggtggtggcgggtttgagagcccatttttctag

SEQ ID NO: 31217 - DNA, 228 bp, Zea mays
  Peptide Sequence Number=SeqID_74592
atgacgagccacactgagacccaggctatggaggccaagggtcgacgtggcacatgggcgctagttcgaaacacagataaaatgcttagcctcatccatatccatggatttggtgctcagaattatgtcatcaagaggaagactaatatgaagagttcaatcagttctaggttgttgtcgctccggtcatattgctcgtggcttgttaacgagatcatcgtcatttag

SEQ ID NO: 31218 - DNA, 702 bp, Zea mays
  Peptide Sequence Number=SeqID_74593
atggccgtgaagcgcaccacggtgccaaggtcgaagcagccgaccctctctaatgacttcagggtcgggtcatccatcggttgtcgtggggctaggttgaagcaggttaggggcaaggatgggttgggctcggatagtctgcccctaaacgcgatctctttgagaggtggactctttacattaaaaactgctaatgagatttggctaaaattgcatgagctccatgacggcacattcaatgtccgtgagcaaaaacattgcctagtcttaaatgagtataattcttttgctatgaaggataatgagcttgttagatacatgtattctcgtttgaatctagttatcaatgagctcaattctattggcattaataagctaggtgaagcggacattgtgaggaagattatctccctgctaccacaacaaagatatgggagcatcatcactattcttcacaacatggaggagttgagtacaatgacgccgaccattgtgattgggaaaattgtggcacttgagatgtcacgaaaaatgggtcatcaagaggagccaactttctcaaggccatatgcttttgcatgtgatgaaaggaacggtaaaaagaaggctcccactccaagttcctcaagtgaagaagaggaggaagaagaaactgatggtgatgaagataatcaaccatcaacatcatcctccaaggactaa

SEQ ID NO: 31219 - DNA, 429 bp, Zea mays
  Peptide Sequence Number=SeqID_74594
atgcagagtcttgagtgcttcagtgtgggcgtgtgtattcggcataaacatcatgttgcatcatatcattgcatcattccgcataacattacttcatacgtcatatcacatcaacagcaaagatggagtacaaagcagatcttcggcagtagcgtgataaatgaaaatgtactgaggcacgaagcaaaccttcggcaaatacaaacttacctggacaaccttcacacaatagctttgctacaaaaggctctcttctttatgaagcatgaaaagaagagaagcaaaagccgagtcttctttgagaatcttttcagcagcctcattcagcagtttgtcgacgacttcgtcgatgatgatattggcaacactcatcacatccagcgcctctttcataacgggatcggcctgggggtcgtatggctcgggtag

SEQ ID NO: 31220 - DNA, 630 bp, Zea mays
  Peptide Sequence Number=SeqID_74595
atgacagtcaagctgacatcatcttcctacatgccttcaaccgcatgggcatcagccacgccgacttattctcgcctggttctactgcatgatgctccagcgcggggaagtcgggtcttctgttgtgatttctcgctcaacgctatgggtcgtccagtggacccgggggatatctgtcccccacaagcccccgatctttgggttaatttagaagtaatcagcccaaagatcccagaggaggagttctcctctaaatccgaggggtctccggctcccatccttctgcgtgagtcgtctgacaactcagacgactcccaggggctcgcggcggaggtctggacgtatatccgggccgtcgagcactctgggctcgagggctcggatgagtcagagtactcctcggatgaggaggactcggacggcggcgaggacgaggacggcgatgacgacgacgaaggcggtggcggcggtgacggtgacggcagcggcagggcggcagcaaggacggtgacggcggcggcagcaggggcagcaacaggggcggcagcggcggcggcagcaacaggggcggcagcggcggcgacagcaacagggccagtggctagatgccactggtcctttagatgttag

SEQ ID NO: 31221 - DNA, 471 bp, Zea mays
  Peptide Sequence Number=SeqID_74596
atgtggatgactccgcgatatggttgttcggcgaagtcttcctgctttggtgcttggggtgattatggtggtgtggatttgggtgatgcgaaggcggaggtggaagaacttgcacttcctgacagtgctgtcctcgccatgaaacagacagtaaaatctgcgtggctgctgcgttcgtccccggcctctccctctggtgccattaccgcggccttgggggggatattcctaacggcgagtggtttctccggctgggtgctgattggctatgttgtgcacctgttgttgactgtggctgtcctacctggagtctggctgcgaaggcctagtccagatgcagtgactatacaggacgccagcccgaaggccactgatggagtaatagatcgcgatgtggtcgtcgaccgatggaacttgtctcggaggcctttccaggagtcgatggacagtggcggtaacctggtgtactag

SEQ ID NO: 31222 - DNA, 302 bp, Zea mays
  Peptide Sequence Number=SeqID_74597
atggccaatcccatacacctctaccgaggaggcgaggcaggctctatcggcgtgaagctccctgtctccgaaaaggccacgcaccattgcggcggacgagttccgcgggttcggttggtaacagtccgcggcgacttcgacggcaggtggaaggaggcctcgctactactgccaccgggatttctgacggaggcaacagacttcggtgggggagatagaagagacttctgcgccgttggcccacatggcggtcaaggtgagaccgagcggctgatgaaggaaatgacagatggggcccacat

SEQ ID NO: 31223 - DNA, 228 bp, Zea mays
  Peptide Sequence Number=SeqID_74598
atggcggtatgcgcgatgcactcgatcagtctctataggtcagtaactgttcccccggcgtactacgcacacctggcggccttccgtgtgcgccactacatggacgatgacctctccgaccaggggtcgtcttcagtggcgagctctcgcatgaaagatggcgctgttccggtaaagcagctgccaaaagtgatggagagcgacaagcagttcatgttctactgctga

SEQ ID NO: 31224 - DNA, 354 bp, Zea mays
  Peptide Sequence Number=SeqID_74599
atgaccctctccaaggaaaatgacaaacagcaagcgtcatgtcaggttgagcgacgtttctgctacaagtgtggtgagcagggtcatatatcaaaggtatgtgataaaggtggaaaagagaagataagcaagaaatggagcaatcaggacttgggtacctctgtaagtcaagaaattggtatctcaagtcatgagtgcttaagtgagacccgggtgcgtagctcggagacaactgatcaagccaaggacggaggcaagaagagcttcgaggtaccaagtgcacgggagaaggtcaaggaggctgaggaacccaaagccaagggtgaagaagaaggcttgcaaagtcaagggtga

SEQ ID NO: 31225 - DNA, 1080 bp, Zea mays
  Peptide Sequence Number=SeqID_74600
atgaaggtgctctgctccgcgtgcgaggcggccgaggcgcgcctgctctgctgcgccgacgaggctgccctctgcgcgcgctgcgaccgcgacgtgcacgccgccaaccgcctcgccggcaagcaccaccgcctgccgctcctcccgcccgacgacgtctccgcgcccaactgcgacatatgccaggaggcccacgcctacttcttctgcgtggaggaccgcgcgctgctctgccgggcctgcgacatggccgtgcacacggccaacgccttcgtctccgcgcaccgcaggttcctcctcaccggcgtccaggtcggcctgcagcccgccgccgcggcccaggacgcagacccgcacccgcccgccgccgcggaacccctccagacgcccccgccgcccgacaggaaggcggcggcggccggcgacggcagcagcccggcgctgctctacagcgacgacgacatcgactgggcggccggcgcggacgccggcggcggcgtcagcgtcgccgtcaccctgccggactggtcgctcgtccacgagcagttcggcgccccgccggtggtgccccgacacgcggacccggcgctagccagaacgccctcttccaagcgcagtccccggcggtcggtcgccgcggcgttcaccgtccagggcggcggcggccttgcagggggcttgccggactggccgctcgacgagttctttggcttctccgagtacagcgccggcctcgccttcgctgagaatgacacgtccaagcgctccgtcttccattggcaggccgacagcgggaagctcgggagcaccgacggctcgccggccggccggccgtcgtccgacgcgtcccaggacttcttcgggcaggtgccggagttccaccagtggtccgtgccggagctcccttccccgcccacggcctcggggctccactggcagggcggcccgcgccacggcgcggccaccaccaccgacgtggccgccgtgttcgtgccggacatctcgtccccggagaaccccttctggtgctacgccaccgccgctggccaggcgccgacgaagcgccgcaggagatgttga

SEQ ID NO: 31226 - DNA, 690 bp, Zea mays
  Peptide Sequence Number=SeqID_74601
atggcgcacctctccctttcccccttcaacaccggatccctcggtacggcgctggagatcgcgcccttcccaccttccccaccggatccggcatggcggtgcggatccatggcgcccaccggagacctctcccttggcccttcaacactggatccctcggaagatgatgtacaaatagactatccaactactggcaggtctacttatcaaacagaagtttcttctcatgatttggaggccagcttgacagaagaattggccagtaaaccaggacttcacatgcagctgaggatatcattcaacatctgtgtgctcgctgagctgcttctaggacagcctctgttccctggagaaagcggtgttgatcagcttgttgaaatcatcaaggttctgggcacacccacacgtgaagaaattaagtgcatgaatccaaattatatcgagtttaaattcccgcaaatcaaagctcacccgtggcataagatattccataaaaggatgcctgctgaagcagtagatcttgtgtccaggcttctgcagtactcaccaaaacttcgatcgactgctcattacttagcacaatatcatataaacacttcttcaagcgtcctccgcaagttcatcgacaagtctgggactcatgtcatcgacggggtcaagatgggaggcaaggacgtggtttgcgtgtga

SEQ ID NO: 31227 - DNA, 823 bp, Zea mays
  Peptide Sequence Number=SeqID_74602
ccacttggagagactacaccaccgcctgcgtgaggagcaggagcgtcgacgacaggagcagcagggctcttctttctcgctccaccaggagatagagtctgtgaggagctgctcccctgtgcttcctctggagccgccccctgcatcaccactgggcgccccagcttctggagtagctgctggaggagacccagacgacggagatggcgacgacagctcgagccacaacaccgacttctctgctaaccctgagccggaaggatgggttgctcgacccatcactcgcgacgctgctcgcggcacagtcgcggggtctacccggatcgctgggaggcaactttgcataaagcgatgcccggagaacaatctccagggagcggaggcttgctcagagcactattctatctctgagcgggactcagctgaggcagccatgcaagatgctgcacggcgtgcgctttcgcactactgctcggttttcggtggggcagctgatggtcttgacctgaagtattacccccgccgttcatctggcagcacaggaggcgtgattgtctcacctgtcggtgagggcaatcctaggttgagcagcacagtcaacctagccgccgtgctaaacacggagctggaccatgcattagatgagctgagtagggctcgtgctgagatcgccctactgcgggctgagcgcgcggaacgtcgttatttggatggtggttcccccgctcccgtcgggactcagcacccgtaccgctcacctcagcgtggacaccagtcttatggcaatcccgcctgcaagaccaagataaatctagaaccatag

SEQ ID NO: 31228 - DNA, 423 bp, Zea mays
  Peptide Sequence Number=SeqID_74603
atgggggcggatcgtttcctgagcgtggcggagggcggcctcggcggcgaggcgctctacttcgcggtcatcctgtggctgtccgtcatgtcgtggatcatcttcacctgggtcggcgacggcggggaggacgggaggcgggggaggaagcgccggggcagccgcggcagcccggtgttcgtcggcgcgtcggggatctgcgacggcaccgggcccgagtgcagcggcggaagaaccaaatacatgtctcgaacagtactatgtgagacgagatccttcttcgtccgcgaggtaggcaatctgcagtggttagtgggaagtctcaagacggctttcggcaagcaagccaaagcttatctcgcttcctcaccacaaaagccactgttggagcaggctgcacaggaaacgttaagcatcagttag

SEQ ID NO: 31229 - DNA, 903 bp, Zea mays
  Peptide Sequence Number=SeqID_74604
atgaaaaaggttaagtatgtaagagaaagtaccattctgagctctgctggaggagaaacagaaaagctaggagaagaacaagaaagatggcattttgagacaggatcttctattccgctgcaacctactcaaaggatctttcattccactgcgatctggtctttgagtagaatggctcgtcttaggcacaccgcacgaaagtctgtcatccccttcttaccctctcgtctcgcggagcgtccgcttcgtcgtcccgtgaccggtcagtccagccatttggagaggctgcaccaccgcctgcatgaggagcaggaacgtcgacgacaggagcagcagggctcttccttctcgctccagcaggagatagagtctgtgaggagttgctcccccgtgcttcccctggaggcgccccctgcaccaccactgggcgccctagcctctagagtagctgctggaggagacccagacgatggagatggcgacgatagctcgagccacgacaccgacttttctgctgaccaggagccggaaggatgggttgctcgacccatcactcgcgacgctgctcgcgggtgtcacttccatgatgcgctcgacaccctgctacgtcgggcacttgaccgacgtacttggtccatcgagtatcgctgtgtggtctaccagcatagtcgcggggtctacccgaaccgctgggaggcgacctgcttgggggcagtgattgtaaccaacaatgttttcaaaaagtgtgcgatgaagggtattcaccctcatcacctggtggaaggctcttgggtcattaggacatcctactgctcaaaggaggaaggatttcctcacctcctacggagttgcatgctacgtatggggatccgcaagaagcccgaatatgtctggaaggaataa

SEQ ID NO: 31230 - DNA, 189 bp, Zea mays
  Peptide Sequence Number=SeqID_74605
atggatgaagataatagaattagtggaggagatggaggatggttggttacagggagccatggtgggagaggcctgatcggtgtcggcggcagggccggccctgagggtatgcagagtatgcgaccgctcagggcccctaagttgcttgtaggaggtggatgggatattctacagtctggtggggagtaa

SEQ ID NO: 31231 - DNA, 504 bp, Zea mays
  Peptide Sequence Number=SeqID_74606
atggaccagcggccgccggagcgcaatgcgaagcgcgcgagggaggaggagatccatgccgcgcccgcgcagccggacttccccttcgaggaggaggaggaggaggaggaggaggaggaggaggccgcggcgggggcgggcgaggcgtcgcggcggccaccgggggtgttccagttcccctggcagaagtgccgcggcgggctgggcgtgtccgccgctgggtcgtcacgggagctgcgcgacgtcttcttccgctccctcgtcgacgggggcgccgcggccatcggcgtgccgggggaccggctggtgtcgccgccgcccggcaggcgcgcgctcctcgagggcgtcgacgcgtggctcgccgcggccgccgacggcgaggtggacccggtctggcggtccgcgctcatggcccgctcgtcgaggatggacggacgtgggccctccccgcgcatgcttcgaccccgcgtggcatcgagcaagaggaccaaggagaagcggtag

SEQ ID NO: 31232 - DNA, 585 bp, Zea mays
  Peptide Sequence Number=SeqID_74607
atgggcgggtccggagccgccatgtgtccagagaaggtgatacactccaaggcatcaacagtgagtccggaccccatgggagagtaccagacccctggatatacagtccggactttcaagcttggtccaggacctccacgtgtgcaagccggacccctggaatgggatccggaccccccgcggcatgacccggcgcttcaggaagtcgccgaccacatgcatggaggtcagaccaccggttgccaagtgcttgaggtcgagggctggcccgttgctcggcaggacgaggcggtcgttggcctcggcgctggcgatcacccagtcgccgcgtcagttttcccacctcacgccgccgaaggtggagatgtaggctacggccaaattcggcctcgtctgaaagtagtagccaccaagatggtccctagccttcccagacttgaccagcacgaagaagtggcggaagagggaagtacagagggccacccctacgaacatcttgcagaggtggatgaagatggccgcttggaggatggagtggggcgtaaggtgctgaagctggagcccaaactcctccaaccgcagtag

SEQ ID NO: 31233 - DNA, 1977 bp, Zea mays
  Peptide Sequence Number=SeqID_74608
atgtcttcgcccgagctccgggagtcttcggcgcggatgctgagggttaccgggggttggtggcctaagaatgttcctgtcccccgcgcggccggcgaagacttttttacatctcacatggttcgtgattggaaagtgtttccttacgggcggaatattgctgctgttgtgttggcagtgatggacaaggatcgccagggagctgcacagaagcgccaggcggtcgtcaggcttcatgaagccaggccgaagaggcagcggggggctgcgaaggctactgcccccggcggaggccagccgccgctggtggcaaagtcggtcgtccctgcatccaacagggcgccggaggctgcgaaggcggctgccgccggtggttccaagtctgtgaaggccgcccctgtgcccagcggggtgccggaggctgcgaaggcggcccgagagttgccgccgccgggcaaacgcatcgccgactttgccaccgacattagtgtggaagattatcttgttgggtcggacgaaggccaacttgtagttgttccgcctgccggggcgaagggcggtgcgtttagtgccggtggcgagatttcggcgctcgctgcagtcagggacgaggcgggtgctgtgtcccgccggctgaaggagctgaaggaggcactaagtcaggcgactgacttcgctgaccgcacggcgtcgggagccctgacggtagttgtgtctgccgaagtcgagagacttcggacgcaacatgctgacgtcgtccgggagaagtcggccgccgacagcaaatgctgcaagctggcggataaggtggccgcgctggagggtgagaaggctgacctccggcgccaactagcggaggaaaggaaggaggacaatgaggccctcgccaaggcgcaggctgcgcaggcggaggccaacttggcgcgggtggagggcagccttgccaggcagcgcgccgagcagttggaggagcggctccgcgctctgcagagccgtgtggagagggctgaggcctcgacgcgcacggaggctgagcggacacgcaaacagcttatggattcataccatgagctgggcgcgcggaccgctgaatttgaagtgccggagcgagagcccggacttcgctgcctcgagtgggtacaggaggagctacaggcgctccccaccatcgtggaggggtttatgtcttatgcctccctggctaatgaggatttcgagcgtgatatctacaaggttgaggaccctatagtgaaggaatccgccagagccctctacgaccggatgtggggcccccacggtcgagaggtggtcagggagcgggccgagacggcgaggggtcaggcagcgcacggcgagagggtggatgatttcggggctttgaacagcacgctgcctgatccggagtcgaacccggcggcggctgtgtccgaggtcgccctggagctgcccccggaaaccgtcgaaggcgctcctgatacccccgcagccgctgcggccggcagaggcccgcccctggagaccgccgaaggcattcctgatgcccctgcagccgctgcggccggcggaggcccgccgccaactgctgcgccgagggctgaggatcctgtgacggtggcggcggagacgacggcggaggctcccgcgacagctgggtcttcgcaggttcaagattttgggcctacgcacgcaaccgctactactaattgtttggcggcttcgactgtggatgatgggaataaatcggacgggtctgcatctaagttttctgattttggtgactctgggagctcggttgagtggactgaggagtcgtcggatgaggacttggactactttgcggccttggatgtggcagcggcggaggcttcgccgcaagctgcgggtgctgaagttgtgcctggtccgagtactgggcgtaggcggcgaagggcggttgcgaagcgtagagtggggcggacgttggtcggcttcgtgtga

SEQ ID NO: 31234 - DNA, 438 bp, Zea mays
  Peptide Sequence Number=SeqID_74609
atgccgctgcagaggaggtcgcgcctgtgctgctggttcactggcccgaatgatatcggcaggatccagcgtgggccgggtaccgatctatcctgggaggagctagaactcctggtgaagggaattactgggctgcgaacggtggttctggccacgctgccgaccctcgacgacagcggcgtggcggttcatcagaccggcggtcgggaccccctccgtgggatccagatccctggtgtaccggctgggggtcctcagcccaccggtccggccccttgtgtcgatcctgccgcgacccccagccccttggacaagggcaaaggggctgcaagcagcgcctccgccccaggtagctccgggggttcggaggaggagaggcgacgcaggctgcgtcgtgctgatgagtcactcgttttagagccctcccggaagcgttag

SEQ ID NO: 31235 - DNA, 561 bp, Zea mays
  Peptide Sequence Number=SeqID_74610
atggcgaaggcgaagtggtcgttgtcgatgtttatgacccaactgcgcaccacgaggtgcacgtcagaacacaagagagtttatacagatgagtggtgggcgggaatggatgaattctcctatcaatttaatgatgtcgtagttggtgctcctgcttatccggagttatgtcgcctttcctccgagttatctcccgagtatctagctcttcagcaaccctggcgtcttaccacctcgactgcgcccgtcccaacggtgatcgcggccctagtgacccgcggtcatgtccccacctgtgatgacttggagttcgcatggttagtcgatggcagtggagacctggtatttgacacgctctatatggactcagacttggacccaagtgcccctgcaagcagcgaagaagagcccccaatgggaagtaggatgaagaccgcccaacttatgtggtaccagcaaaatggggcaccacacatggtaggagtcggagggattgccgaacgtgatgcatccagcgagagcggatctgcgccccattctaaatccttcgaacatgtgtga

SEQ ID NO: 31236 - DNA, 351 bp, Zea mays
  Peptide Sequence Number=SeqID_74611
atgccatactacttagggacgttgagggatattcaattaggtgcatacctgcattgtatccgtgtaatccagagaatcagcggcggccagtcgcgggttcgaacacgcgtgcgagcagcggatccagggaggttggggaatctaggttgggacctacaggtcgaggatggggtgtggccgcatggatttataccctgggcaaggtggtggggtcgctgcaacggccttccgagagccacaatagaggcgccaatacatctcccactcatggcctacgagcctctcgggccgcagcacatttatggctcgcatgtcccctcctacgacgcactcatgacctatcaggactag

SEQ ID NO: 31237 - DNA, 675 bp, Zea mays
  Peptide Sequence Number=SeqID_74612
atggccctaattgtcagaggctttttcttggcgctctcgctgactgatgacccaaggaccagggatattatccccgacactaactcatttgggataaagctaatgcttggcggcggcggcggcggcagttcatccaactccaccgagagcggagcggggctcgaatcgcccagcatccaggccctagatctcggagaaggggcggcggtccttctagtacggcggcggggccaagtggccgtaggcgcggaaggagccgccggcgccaccgcggccgtatgcatcgtcctgcaggtgcatgctggtgagcttgtggaagccgcgggtgtagacgccgaagccgaagacgaggccgacggccaccagcaccagcacgatgagcgtgcagatgcagcacgccttgctcgggcagcagcacatctcgccctgtcgtcgtcggtcgttctcgccgcggatggacgggaggagaaccaaggcgcggaaaaggcgaggggcttttgcttctggctgtgggtagtgggttgggttcgctcgggaactgggcgccgcgagggtccccgatctggtctcgtctgtctgggcgtgcgtgcccggccgagcggcgacgctacaactataataaaggaaggtggaggcgaaccgaatcaagtgcgctcgtaccgtcagattggttag

SEQ ID NO: 31238 - DNA, 64 bp, Zea mays
  Peptide Sequence Number=SeqID_74613
atggccgagccatcccgccccaaacagttgtcctccagcgtctttgcgccgttgctgtgcccat

SEQ ID NO: 31239 - DNA, 798 bp, Zea mays
  Peptide Sequence Number=SeqID_74614
atggaagaaacacacctccacgtgttcgacgcttcctgcccgcgccagagcacgctcgcgcgcgcccccgcacgcccagcgccgcgcccgagccaagccagcgccatgatccgtgcccgcgcctataaaaccctcccagacttcgattgtacccttccgcgcaccctcaaacctcaccggagtctagctcgccgccgtttgcccgtgcgcagcgtgtccgcggccgcccaatccctctgccaccgtagaccggccagtggagccattcccaactccgtccatccctcggagaagactgtgcacacctccgtgaagctccccgagcaaggaatcggagtttgcttcgccggagaggccagtccacgctcaccggagctctcaaccccgccggagtacctggaccgggtaaaccactccaccatccttcgattccttgtgcacacggtcgctacgttaccccgtgaagctcaccatgccctcggattgaaccagttcaccgtggtttggccggtatactcgccgccgacgaggacacccgcctgcacgcgtggaccgggcgattccggccatccccgacgtcaagccgtacctcgacgtgaccgccagagtctccccgagccaaccccaccctttgccggacctccctcgccgccgaattatggatatggagcacgaccaggacgaaggctgagccaggcgaaggtcgaaggcagccgaagctgtacgcagggaagcttcggcgcgatagcacaagggggaaccgacttaaagataaaaagacttcggggtcctcaatag

SEQ ID NO: 31240 - DNA, 225 bp, Zea mays
  Peptide Sequence Number=SeqID_74615
atggagagtacgtgctcatccccgagcaaggatctgtccaagaagaggaccaggagcaagcttctgaggctactgttgaggatctcctcgcagccccagcaattgaaggcaagccccggtaccattcagaaaatggttgatggtgtgacttggcctaccaccctgccaccgggttggacggtcgagtgggatgttgctccggcaggagaggagcacaaggagtag

SEQ ID NO: 31241 - DNA, 597 bp, Zea mays
  Peptide Sequence Number=SeqID_74616
atgtccggtgcaccagagcactccaacgcaaactcgccaccttcgggaatttccagaggcactcgcgctataattcaccggactgtccggtgtacaccggacagtgtccagtgcgccaaggaagagcggcctcaggaactcgccagcttcgggaatctccaacggctagtccgctataattcaccggacatgtccggtgtgcaccggactgtccggtgcaactccggagcaacggctatccggcgccaacggctacctgcgatgcatttattgcacgcgcagcgcgcgcagaagtcagagtcgcccatactggcgcaccggacagtgaacagttcatgtccggtgtgcaccggacatccaggcgggcccacaagtcagaagctccaacggtcagaatccaacgacagtgatgacgtgggcggggggcaccgggacatgtccggtgtgcaccggactgtccgggcgagggtgcggcggcctcggccccagccacgacttgggcgcggcagccccgtccttggcgctggcttcatccccggcgggcgtggctccggcgtacgagagttcagccccggcggcgcggccccgtcgagctag

SEQ ID NO: 31242 - DNA, 348 bp, Zea mays
  Peptide Sequence Number=SeqID_74617
atggctgcagtggtgtatgccctgtcaatagcatcagcggtaatagctgattgggggaaggagaaagcgttttgggctggacatgatctcaagctcgccatcgatgacttcgacgaggagttgatcgaccctaagctacgcttctcgttccagctcaacagcaaggtttgtggagtggacttgactgacaaagtagtggacataattttccatgtatttgatgctaattgtgatggtaacctgagctcagaggagttcttgaggtcgttacaaagaagagaaaatgacattcgccagccagcaacttctggttttctaggggagctggagaacgtgatcgacaactga

SEQ ID NO: 31243 - DNA, 465 bp, Zea mays
  Peptide Sequence Number=SeqID_74618
atgcaggcggtggtgcagcctctccaagtggctagactgaccggccacgggacgacgaagcggacgctccgcgagacgggaagcctcccggaccggaagctgcacgtggcccgacagctcgtttatgtcgtctatggcggcggcggtgcagcagcagcgggagaaggcggcgtcgcaggtgtggcgggcggtggtggggtggatcggcttccttgttcaggttctgcttcagatccttcggggcacgccgtcctgcgcccagctctttccttcgtcggcgtccggtacccgctcctctccgggcccgcggcctcgaacccgtcgtcggaggtggtcttcatgccgctccgctccgaggtcccagctgacgcggcacctgccccgacacctgcgcctgagcccgtgggccgcctcacgttgtcaaaccaatttggattcctgagtgtggtaatggacctaacatag

SEQ ID NO: 31244 - DNA, 960 bp, Zea mays
  Peptide Sequence Number=SeqID_74619
atggcgaggccggaggcaaccggaggaggaggtggtgccgtggcggtcggtctccgcgcccgcgcccgtgtgcgtggtgtttttgcgggcggtgggagcggcggcggtgtggggaggagagtcggggggagatggctcgtcttaggcacaccgcacggaagtctgtcatccccttcttaccttcccgtctcgcggagcgtccgcttcgtcgtcccgtggccggcgccccctgcaccaccactgggcgccccagcccctagagtagctgctggaggagacccagacgacggaggtggcgacgacagctcgagccatgacaccgacttttctgctgaccaggagccggaaggatgggttgctcgacccatcactcgcgacgctgctcgcgggtgtcacttccacgatacgctcgacaccctgctacgtcgggcacttgaccgacgtacttggtccatcgattatcgttgtgtggtcttccagcacagtcgcggggtctacccggaccgctgggaggcgacctgcttggttcgtcgtccggagaacagtctctgggtgctgaggtctgctcggagcactattctatctctgagcgggactcagctgaggcggccattgctcggtggggtagctgacggtctcaacctgaagtattaccctcgccgtccatctggcagcacaggaggcgtgattgtttcacctgttggtgaggacaatcctaggttgagcagcacagtcaacctagccgccgtgctaaacacggagctggaccatgcattagacgagctgagtaggactcgtgctgagatcgcccagctgcgggctgagcgtgtggaacgttgtcacctggacgatggttcccccgctcccgtcgggactcagcacccgtaccgctcacctcggcgtggacaccagtcttatggcaaccccgactacaagaccaagataaatctagaaccatag

SEQ ID NO: 31245 - DNA, 55 bp, Zea mays
  Peptide Sequence Number=SeqID_74620
gctaccacagatgggaatagagctaatggacaaccattgcttgtcaatgatctga

SEQ ID NO: 31246 - DNA, 216 bp, Zea mays
  Peptide Sequence Number=SeqID_74621
atggtttttttgcaggtggtgagtaggctgatggttgctcttatgattatggtaatgccaaacaggatacttgctgagtatgttgaagtgtactcacccttgctctacacaccaacccccccatccccaggttgtcagcattgcaaccactgctcaggagaaaatgaagccgtggaaggagtcttccaggagttccaagactacgacgagttctag

SEQ ID NO: 31247 - DNA, 144 bp, Zea mays
  Peptide Sequence Number=SeqID_74622
atggttcctgactgtggtgccaaagatcttcttaagcaacaacctggggactcagaccattttcctgagtacctcttctgctcaggagaagatgctggcaacatggaggacttcgaggagttccaggactacgacgagttctag

SEQ ID NO: 31248 - DNA, 276 bp, Zea mays
  Peptide Sequence Number=SeqID_74623
atggctaactgtaagggatttccagagcctttcctttgcctcgctctcgtcatctcgtacgcagcggcaccgggaggaatgaggtcgttcctgcaggccgtgtctacggtcaccgaggaggcgccgacgccactccgcgtcgtccagatggagggcctgagatctgagaaactgtgctcaggggacggatctgttcgcatagatcgaaatcaggggaaagcaaaggtgaaatgcttgtctggtttgctgtccaccagaattatactgcagttgtag

SEQ ID NO: 31249 - DNA, 318 bp, Zea mays
  Peptide Sequence Number=SeqID_74624
atgggtgtagcccccgaccttcaaatggattttttaaggataatccattcgaaggtcttccttttgcttgaaaaaattggcatgaagctattcgcattatgctttggaggtcagcattatgtcatcaaaattttgctgcagaggtcagcatatattttgtctttagcagccgagtttgcaatccgtccatatcttgctaggtatttactgcgtgccctgcacggatgtgaccgttttgaaaaatatactgataattcctgggcgtccctccaatgggtgtgggcaagggacggcttgatgggtgggagtgcttattga

SEQ ID NO: 31250 - DNA, 891 bp, Zea mays
  Peptide Sequence Number=SeqID_74625
atggcgcgcgagtgcacaaaatcagcagcttcttaccaggcatgttcaacagcccctaaggcaattaaggagttgagtccttttccaggcaaaccaagcacgactcctgagatttgctcccaccagctcatgaaggaaagtaggcctggctatggagccaggctttctaacccaaaaggtctcagaaggtatcagtcttgcttgcttggatcttttcaaactgtggaactgattgaaacatttatgaactatcaggagagcatcaggagatgtgtgtgcattgtctatgacccatctagatctagtcaaggcgtgctagctctcaaagccttaaagcttacagactcgtttatggatctttaccgtaacaatggtttaactggggagaagttaagggagaagaaattgtcctgggttgatatttttgaggagataccaataaaagtttccaactcagcgcttgtcagtgcctttatgaaggagctggaacctgagtcacctgttacccagtgtgacctggaccgacttaaattgtcaaccgccccctttatggaaaggaacttggaatttctgattgggtgcatggatgatctttcatcagagcagaacaagttccaatattataaccgcaatctctcaagacaacagtcacagcagcaggcatggcttcaaaagagaaggcaggagaacatggcgaggaaagcagctggtgaggagccactaccagaagaagatccatccaatcctatatttaagcctattcctgagccctcacgattggagggctatctagtaactaatcagatctccagttactgcaaccatatcaacggggttgctggtcagaatttcgacaggctatacctgatgaaggccttgcatgaggattag

SEQ ID NO: 31251 - DNA, 294 bp, Zea mays
  Peptide Sequence Number=SeqID_74626
atggttaaaaattttggcagcagaacagtgcaaatagcaatgaatgctgtggtaacttcacacctactcgtctgtttatatagtactgcagcatttgagaacaagtccccaacaaccgatatagcgccgacttctaaggcgtgggacaagagtgaaaagaccaatcctcaactgagatgcaggagcgcgaatggagataatctttggggaagaccttcgagtagattatcttctaaaatctactcaaaggtcgggggctacacccattgggtgcacctccggtgcacccaatga

SEQ ID NO: 31252 - DNA, 378 bp, Zea mays
  Peptide Sequence Number=SeqID_74627
atggtgattgaaattagactagatgcaaatagagtgcagcatacccttgagagtcttttccttagtcggatgaatcaacaagaagcccctacaggagttggagagtttctacgagattttggtattccagtggtcctgtggcgactacttcaagaggtcggatataccgaagcacccaaataccagtggtcacgcaccgttcttagaggacaaccatggtatgaggcccgagtaatggaaagcattcctattgggcaggattctgttgaatcggcatctgctcgagttttgatggcccgtgctagagttgcaacttactcgggggcacagtcgtcaaaagtggcagcagttgtacactgggagttatgcagcatttaa

SEQ ID NO: 31253 - DNA, 402 bp, Zea mays
  Peptide Sequence Number=SeqID_74628
atgcccctcgaggcgatacatccggtggacaacataggctacatggcggacaacataggctttctgaagctagaggctctattatcaacgacgccctccaaagattttttggattgccacacctacatgcatttgaaggatttcattgagagtcgaatcaaggttcagaattttaccaaagagaaaaatgaagctctatgcaaggttttggagctcaaggctttgaatgcggaaaaagaaaaaaaacttaagctaattgaagccgaaatgaaccgcataaaagaagagcatgaggcagaaattatcaagatacagcaagagtctaccgaagcatatgctagtttagaggttgctaagtcgaaaatagaagatcttaacgctgaaagggatccgaaccgctga

SEQ ID NO: 31254 - DNA, 225 bp, Zea mays
  Peptide Sequence Number=SeqID_74629
atgtctgtcggcttggggtgtaggtgtggagtggtgatcaatggtgaaggaatcggtggcggcatgtggcatcataatgaaggatgcattgaggcgaagcaacttcatgtggagtgtgtggccatcagatcaaaaccgcaggagttggtctatttctccccggctaagtggatcggctctgaatgggaaatgaccataatcataggatttgatttttgtgcttga

SEQ ID NO: 31255 - DNA, 231 bp, Zea mays
  Peptide Sequence Number=SeqID_74630
atggcgccggacctctcatgggtcaccaggtatcgacacacgatgacatcgggcgcagtggtggattggaacctcaggaatttctcaccgtcgggcgagcgccgtcgcggtccgcctgttgccgtggtcagctcttctgcgcacacaaacccgagtgagtacccaattctctggatcgctaggttctccacatcgcgtagtaggcctcgtagcgaagaatcacatagttaa

SEQ ID NO: 31256 - DNA, 324 bp, Zea mays
  Peptide Sequence Number=SeqID_74631
atggctagggatccactacgaggcctttacaaaattccactagcttccgaaaacccactacagtttatgggaatagcacttgcaagaatcccccgtctggccgccatcgcagcaaaatcaaaccgagaacctccttgcatgcaatcccctactgcccttgcccctttcggcaatagcaaaaactacccatgcgattcaggggtaaacaagtggatcaaggcacaacttgccttcaatgagctcctgctcagctacttctatctgctggtcaccaggatcctcagtcacaggctcctctactcgccacaatacaaacaagcatag

SEQ ID NO: 31257 - DNA, 516 bp, Zea mays
  Peptide Sequence Number=SeqID_74632
atgccgttgcgcgcgtgcggcattggcggaggggaggcaacgacctggacaccgcggagtatggcgcgtgggacccaaggatcagtggtaccgacgcaggaagcgggcccgagagaccaaccgggaggtcccaccagtcagtatctgagagatggcgccacggtggggctgacaaaaggggcccgcgcagtagagagcgccactgcgcgcggtggagaagtctggccgagcggctacttcggctttggcttcgggttgtttaaattcaattattccctgaggagtagaaactttctaggaaaagttagaagaaattgccagcataggcacgaagtagtcaagaaaaagcatcatggaattaaagtgccttcagctcctttcggctgcaattttttttggatagttgtggccttctcaactgaccttcgagcctgcaagaagctgggtattagaaagtgtgcttgcttcacaacagtgaaacgaagtcgaaaggaagctcagatgcttcagacttaa

SEQ ID NO: 31258 - DNA, 177 bp, Zea mays
  Peptide Sequence Number=SeqID_74633
atggaggaattggacgagcgcgccttcctatttgtcatccaggctagaactgatgatggcagtcttgcgctcatcggcgaacccgaggttgattctcttggtttctttggtcggtcgcatagaggtcacggcttgagcttcattcgtgggtaccgcgaggtcttactcaggctttga

SEQ ID NO: 31259 - DNA, 255 bp, Zea mays
  Peptide Sequence Number=SeqID_74634
atggcaatctccggttgttacgcgtcggagaagaagcagtcgaacccgatgcgggagatgaaggtacagaagctcatgctcaacatctccatcggcgagagcggtgatcgcctcacccgcaccgccaagcaaccatgttgtgacattgcagcaaggtacactgtgaggtcgtttgggatccggcgcaatgagaagatcacatgctatgtgacggtgcggggtgagaaggcaatgcagttgctggagagtggctag

SEQ ID NO: 31260 - DNA, 813 bp, Zea mays
  Peptide Sequence Number=SeqID_74635
atggcgtcaaaggtagcttttgatcacccagaacgattctccgaaaagttcgagttcagtgcagacaacattaagcccctggttcagacatgcatgacaactctatcctcaaagatttcagcttgttttagaaggaatgtatggctaggtgatctcaactataggatcaacttaccatatgagaagacacacgaactcatatccaagcaggattggaacgaattgtttgggaaagaccagctgaaagtagagctgaagaagggcatctgtttgaaggatggaccgaaggggtcatcaactttcctccaacgtgtacatgtgcacaatttggtgattgagcaaagtctggtgagccaatcaactgaatttgaagctgttattcagaatggcgacaaaagttcgctacgtgctctatctgacgaggagagagaaacctggggcttcttaagggttatgtttgaggacggggattttgcaaggacaaaattgcttgctcatcttggcttcgaaccacctcaggcaccgcctgcaagttcaactaatgaattgagccaaatattggcagatacacttaatattgatcatgctgcagtaaccgataatgcggatgcccagtttcttattgataatggggatgattttttcaacaatcctcaaccttcagaggctagcttggctgaagaatcagtttctacaaatggtcaacagatagaacaggaagtttctggagatgctgtgccatcagatccatcaattgacaaaagcattcaacatgcgttggtggttggagactacaaaggggaagttaactag

SEQ ID NO: 31261 - DNA, 639 bp, Zea mays
  Peptide Sequence Number=SeqID_74636
atgcccaatgccgatctggaggatctcagtctcgaacctgaaggtcgaattgtgttcaagtattatcactatgaattgttgtacaatgcgatccaattctatgcatttgtaccggcgatactgttctgcacgactcagaaggttgtacaagtctctcaagtttttgcatggccgagggctatatatgaggagcctgggaagtatggcagtatagaaaatgaacttttatgctatcagtgcatcgaagaagtggagcctatgattgatttatgttcacataaactaggtggatcatatttacatgcacatgaactcctggatactgctaatgatcttctcaatgaagatggatgtgggcttgagggctgtgtgcttcttggcttcgacatccgcgacgtgcagagcccggaggacatcgtcaccgcggaacggctcgtttttcccggtgtcggcgccttcggctccgccatggacgtcctcaacaggacgggcatggccgacgcactccatgagtacatccaaagggaccgccccttcctaggcatctgcctcggtctccagctgctcttcgattccagcgaggagaacggcccggggaagctcttctcaaccccactttgtctgcgacttgcatactag

SEQ ID NO: 31262 - DNA, 267 bp, Zea mays
  Peptide Sequence Number=SeqID_74637
atgggcaagagaaagaaaagaggtatggacctacatccgggccatcgagcgtgccgggctcgaggcttggatgagtcggagttctcctcggacgaggagaactcctcggactcgtccgaggagggcgacggtgacggcgatggcgagggcgatgacggaggtggcggcgatggcgacggcggcgaaggtggcggcaagggcgacagcggtgacggcagggacgacagcaagggcagcagcaagggcagcaacaaggccagtggctag

SEQ ID NO: 31263 - DNA, 153 bp, Zea mays
  Peptide Sequence Number=SeqID_74638
atgaagagcagcttcgcagttaatagcgacacatgttcttttcgaaccaccagcactggaccgccgccccactggccagccgccacggcaccagggcaccacgccgccagggtttccacggccttcaccatcgcccacccactaacggctcag

SEQ ID NO: 31264 - DNA, 186 bp, Zea mays
  Peptide Sequence Number=SeqID_74639
atgacacgtataacctatacgggctgggtcgtcttattgcctgggcactgctcgctgctcgcgcacgccgggcagccagatgagaaaggaaaaggattagaagggcgcaagggaggaggaaacgtggtgaccgtctggatactcgtgtggacggttccagattggggaagcgccacaagccggtag

SEQ ID NO: 31265 - DNA, 293 bp, Zea mays
  Peptide Sequence Number=SeqID_74640
atggccagaggggggcgagtcgccggagatggcggcgagcactggccgccgcccgccgtcgtgcgaccgtgccgactgccgagcagcagcgagcaggcactgcgggagtgcgggctgcggcagctgagcccagctgagccgtggctggcactgcggcagctgagctgtgggcctgtggcccgtggcccgtgggcgacgctggtcgccggagctcggagcgccgagctgagcaagaaggcggcgcgctgcacggccaccgagctgaggtacgagggtttcacttggcgcttgag

SEQ ID NO: 31266 - DNA, 741 bp, Zea mays
  Peptide Sequence Number=SeqID_74641
atgggggatatccgccgtctttccgcctcgtcgttggagaaacgcaactccgtgggagttggtatctttcagccatcgttcggcttcaaggattttcatcagccagcccggctgtacccccccgccggcggtcacccaagacgcttcaaggatgttcatcatcctcgctggggtggaggccgggctgagccagagctctacctcccgcgcgggttcgtgggtcaccctctcctgcggcgttcgagggagagggcgctcgctggccctgcgggcgggtcggactttgacaacgcggggccggtcgacggcaggcgtcgtcagccccagcgcgtcgggctcgtcggcttggcccccggtgccccctcctgccggaaggcggctgccgcgccgtgtgcacgggaggaccgcccaagatgtcgcgcgctgctagggcggcgttcgtgttctggggcggtcctgcctttgcaccggtacggtgcctccgcgcggaggtcggtgccctgctcgtccgggaggatccgagtggggatctgccggcgggctgacggcccctgccgtcggtgccgaggcggaggcggctcgagaagtccccgtcaccgacgggatcaccgccaccatccgcgcttcgggcctccggccctttgtacttgtcctcgcccctcgagcgtcggcatgggcgagggcggggttgcagcggcgttcgccctgaggccatcgccgctgcagttcggctacccgtag

SEQ ID NO: 31267 - DNA, 253 bp, Zea mays
  Peptide Sequence Number=SeqID_74642
atgtcggacgaccttgttgttcctgtccactttgaagttggccaagaactttgctttcgcctcctggatcatccgctccttgtgctcttcgaactggagctgctcggccgatttgatgagcttatatatgtcgtccccagcggagtcgccaaaaagtatgttgacacctttttggaggcgccaattactcaagagaaccagcggcgggtgctctctggtcaggcgcggacggtccgcggcacagggccggacg

SEQ ID NO: 31268 - DNA, 1224 bp, Zea mays
  Peptide Sequence Number=SeqID_74643
ctgattgcaataagatatcatcaggcgctccgaggagaacaggggcctcctctccgcctcctccttcgacaggcagctgctgcggaaggagttggtgaggagggtcaaggctgcggtggtgggacctcctcgtgtggcctctttctattgaattatatcgaatactggacaggggatgaactgtctgacagtttcacccaggatgacatgtcacactttaggaaaaaattggctgatatattactatcttcggacatgaacaagagaaaggggtgcccattatacaaatatgaaaaagaagttgacatgggaagcccctctgatgttcagttattagatagtcccataaatcctaagaagagtaaactactctgtgcgtctgatgatacaaaagtattgatggtagatgaggatggccctattactcaagcagagttagaaagatggtttgttcatgattgggataaaagaactcctataaaagtctcgatcgatgagtgcaccaatgactttttaatgactggtctttctacaaaggacatgccagttactaaatacgatttaatggatgttctatgtgattatatcatggaaatccaagacgatacaacattagagatgacatgggtacaaagttttaacccttttaagatagaaatatctgtcaaagacctacagaacatattaaagataaatctagatatgactttaaaatgttttgacgtggctgttcgacttcttgacaataaagagtcacgtaggccgaaagatgaaaagataaaggatataaaacattatatcgacatgcgtttctggtaccatgaggacccttcaccagaagagttagccaaaacactcgactattggccatcaatgaactattatatcacgggttgtaaatatgttcttatgccatggaaattcaatgaatgctacgtccttttcgtaatcgatcatggtaaaaagcacataacttttatcaactttacacccactcaagattggtttatccaagcattattctatagggttaatactagctaccttgttctacaagctatggtcatgtgggggaataacagaccaatggaatttgttaaggatgcaaaggttcttcgaagaaactttgtaatcgacctgctaagttatgaggacaattcatgtcgatatgtcttccctgtaaacatacaacatagacttatcaatatctctaaaaaagattag

SEQ ID NO: 31269 - DNA, 624 bp, Zea mays
  Peptide Sequence Number=SeqID_74644
atggtgaccaccagtttgatggtggggagaagcaagtcgggatgcggcctctgccccgccctcagctttaaggatcttcatcatccttgctgtggcgaggggcaagctgagccggagctctacctctcgtatgggccggcgggccacctcttccttcagcattcaggggagagggcgctcaccggactagcaaagggggcggacttcgacaacgcggggccggtcggccgcaagcgtcgtcagctccagcatgcctggctcgctcgctcagctggctctggcgctgcttctggtgccacctcccaccgctggggcggagcgtggctgtccgcccaccgtacgggcggctgttgcgccgtgcgcaccgggggaccgtccaagtcgtcgcacgccgctagggcggcgttcgtgttcttggattgtcttgtcctcactccggcacgacgcctccgtgcggagaaccctcggctgctctgcgatgagccggagccgaaggcagcggtgtcagcgtggacaaaggcggagtcggctcgagaagaggcttcatcggcccaggagcaggtggcttcccaggccgaggaggtgcagcagcggcaaccggagtctggccaggtcatccgctag

SEQ ID NO: 31270 - DNA, 546 bp, Zea mays
  Peptide Sequence Number=SeqID_74645
atgggggcgcaccccttcgacttcgtcgcatccagcatggaggcccaggcccacacgtcatgtaagcggcacgccggttactacgtgcgagaaactgcaccaccacttgcgccaatgtcgtgccttctcgactgcggaaccagtgccgcgactcgaggcaaccctgcgcgtggcccaacagtgccaatcgcgcacatcgatcatgggtcagacagccgcgggaggaggcgcgatggtcgatatggccaaaagtgggccgacattaatggcggcagcaggcgagcagaagcagtagtaaaatcgtccgcgggctcacgtcccctcctggagcagcaggggagccctctcccacggcgtgaagacgacgcgcccatgttccgttcctcgaacggctcgcgcaacgaccgccccgcgaactgcctgtcccgtcacattaactccgctgaaaagcaagcgacacctttggcaggcaaaggaccaggaaaggggatatttcgaaagggatccttctccgcgaaggaagcgggccctgagccctcctactga

SEQ ID NO: 31271 - DNA, 513 bp, Zea mays
  Peptide Sequence Number=SeqID_74646
atggcaggggatacatttctaattcaagatgccattggagaaaagatcaccatcagtatcaaggccatcccccacttttgctcaaggaccaccaactcattcttcttcaccctctctagcacggacaaacagctggatccatgtccattcgaggtcactgttcttgcagaaaactatctaactcttagtgttgtcaataatctttttacagattctttgatgggcaggagaattggagacactttagactttgaaattaagaggtggtctactagaaaacagggcaacttgcgtgctttgttatcaactttacaatatacctcattttatggccatttgtattcgccttcatatgtgacaatcatcattttagaaacagttgtctttatgctgcaatctctgctaaaggtcacaagtcatgctgaccttactaagctatttgaacttttcatttgtgatcatgagattggcaaagcattttctgagctcacagacccaattgatcagtactag

SEQ ID NO: 31272 - DNA, 369 bp, Zea mays
  Peptide Sequence Number=SeqID_74647
atggcgctggcgcgcaggtggccactgtcgtcggtgctgaggtggtggcagccagagaagaaccttcggccgctctgcgatgagctggagccggaggcagcggtgtcagcgtggatagaggcagagtcggctcgaaaagaggcttcgtcggcccaggagcaggtggcttcccaggtcgaggaggtgcagcagcggcggctggagcttagccaggtcatccgcaagcaggaccaacctcggagtcacgctgccgaggccgtgagccggactgaggtcctcgggggacagctggctgaggctacggagcggccagccgaggtgtctgctcgggccgggaccctggcggagaccctggctgcgatggcctaa

SEQ ID NO: 31273 - DNA, 318 bp, Zea mays
  Peptide Sequence Number=SeqID_74648
atgccgcgcctcctcggctacggaaccggtgccgcaactcgaggcaaccctgcgcatggcccaacagtgccaatcaagcacaacgatcacggggaccgggaaaggggatattttgaaagggatccttctccgcgaaggaagcgggccccgagccctgctactgatcaggggttcgaaggctggacccttagaagggttcgacagccgccccagagcactcaggcttcaagctcattactgatcaggggttcgaaggctggcccctcggaagggttcgacagccgccccagagcactcgggctccgcacccactactga

SEQ ID NO: 31274 - DNA, 519 bp, Zea mays
  Peptide Sequence Number=SeqID_74649
atggaggaaagggtggaggggcttactggccgcgagattgctccggtgaggaaagtttggcaccgcccgtcctcgccgcttgaccgtgtactcgccggtaccgccccccgccgtgaggtctcgtcgtcgccgctgtgcggcattaaagctggcgctgtgcacctcaccggcgcccgccgagctctgccgctccccttccctcgggcgcctataaaaaggttgccccgagctcctccttccctgcaccggcctcagccaccactctcctccctcgcccgagcccaattcgtggaagcgtcgccgtcgtcttcctctccgcgagcaaatgggttggaataccagcttcaccacatcgccgtgaactcagaacgccactcccccaccccaatccctcgccgaagctcaccgacggtgactcccgccgccgaggttcgccacctccccgcgaacagccccctcccggacccctatagccaaattaagcccgcccctaggttcgccagacccttctcgtgctaa

SEQ ID NO: 31275 - DNA, 438 bp, Zea mays
  Peptide Sequence Number=SeqID_74650
atggttatgaaggctggggagcaccgggaggataaggagggggaatgttttgtccagtttggacatggcggtggcttgactccttccggtataaccattaagggagctctacggggctctgggaagctagccgaggcacggatcaagtggagatggccgggagtggtttggccacggtgttcgattgctcgggctgctcggcgggcggtgcagagctcgctggagctaagtgctgggtctggggagtcaggtgaggcgcggagggagtacgaccgaggcttccctgcccttataggcgtggacacggtgcacgggtgggcgtggaccagcgtgggtgcacgggcacgcacggcttggcacgggtgcgcgggctggcgtgcaccgggcatgtcagctgcggtcgagcacgtggcaccattgcttctgcccgtgttctaa

SEQ ID NO: 31276 - DNA, 108 bp, Zea mays
  Peptide Sequence Number=SeqID_74651
atgaactcgctgctctcgggaaatggaaaaggcgacgtgactataattcaccggactgtctggtggtgcactggactgtccggatcacctattcacccccacctctag

SEQ ID NO: 31277 - DNA, 54 bp, Zea mays
  Peptide Sequence Number=SeqID_74652
atggcgagctggggcgcaggggtgagctcacatctggggagggaaacggattaa

SEQ ID NO: 31278 - DNA, 1224 bp, Zea mays
  Peptide Sequence Number=SeqID_74653
atggacgaagtggatgcataccttgcgacacatagggcaagtaatgcaaatgatgaagatgcggaatctcctagccatttatgtgtgtctatccgtcccggggtattcaatccaatacttcatggaaagcggcttttccagcagttcgcggtcgacacatacataaagattgagagctctcgtttagatttcatatgcaagaatcaggatcggttaagggcaaacctataccagggcttggtggatagcatgctagatggagatattagagcagagaaggttggcaagcgaactgtgctatggacgtcgtttattgggggtcatcgtgacatgaggcgtcggtatatggatgctatgactctgaggaagtacaagctcacatgtcctgagcagtacgaccttttgatctcagccgagatcccaagcaacaagtaccctgaactacgaaagatggttatcaagcatatgatgcatggctcgtgtgggtcgctaaccctaactgcccatgcaccaagggtcgtaaatcatgcaagaatcattaccctcggcctttcagtgacacaaccttgtaagggaaggattcgtaccctatttacagatgtcatgacgatgatcgtaaagaaaaggtccgagggtgcgaactggacaatagatggggttgtcccttacaacccatacctccttcgtctcttcaactgtcacatcaatgttgaggcatgtgggagcatcaaggctattaaatacttgttcaagtacatatacaaaggccatgatcgtgtgtctgttgttatgagaaatgcgagcaaggcagatgaagatgtagatgagatcaagcagtacagagatgcatggtgggtgactcctccagaagccttatggaggatatatggctttgatcttggtcagatacctccacctgtgatgcagctgcaactccatcttccaaacatgcacatggtggcgtttcacgagcggcaaatggccgagcgagtcctcaaccgtccaggtgttgataagtcgatgctcacatcatattttgaggcgaataggctacacgaggaggctcgtggcatcatatatcatgacttccctgagtggtacacttggcagagtggtaagggcaaagtatggcaatggaggaaacgagatacgagtggacaagtcgatagaatagtctctgctcatccggtcgagggggagcactactgtcacacccgattttag

SEQ ID NO: 31279 - DNA, 1002 bp, Zea mays
  Peptide Sequence Number=SeqID_74654
atggatcaaactcgcttggaccaattgttgatgctaaggaacataagaggcaaagagataaggaaagatggctgtagcaccattgatctcacaaactttgcaacacaagacgttgcagccatgaaaatcattttatcgctgttgatttggctaatgcctaggatgctatcatggcaggcaaacgacattgtcgcaacgagagaagttctgacaccaggcagtctgcacaaaactgttggtcacacacctaagcatactaggcaaaggatcgcctactttagcgagcggtacaaaaacataactcccgtcgagagggagtttaggcgtgaatgccttaggttgtataatagaacaccaaggcgaaaagaggcaaaggtagatgacaacaggaaacgtagagttatgaaagccgacaatttgaatcaggcctccatcgccagggaggacccaacgtatacccctgagtttgtacaccctatagcagatgcaacggaacctgatggatccaccgtctatgacttggttatccctgaatttgtcaaaacacctttgttcccaatttcaacacagactgaggatttcacttcacctgatatgtctatcattccactaaaacgtaaacatcatgttccatgtggggaaagacaagctatattagctcatcgaaaccagcaatttgaagcagccattgcaaggaaggtggctacttcgattgaggatactagcggtgacgcttgtgaaggggacgattggacacgatgccatacgactatgaagatcacaaacaatggtgatgatggtgtcatatttgaagacgacgatgatgagaacgagggatacctattcgttgggcaatatgaggataccgatgaggatatcgagattgatggtactcaagatgaatctactgccactgatgttcttgactcgtacgacaaggtgtacaacaatatccttgaagaaacacatatgctcaagacagttcccaactgcggttattga

SEQ ID NO: 31280 - DNA, 927 bp, Zea mays
  Peptide Sequence Number=SeqID_74655
atggctggttccaaagatcacaccaaggtatccaccaccaacatcatcaagccgaccatggaggcactctctgctgatgaccaacatcccttcgatgacctcataagacgcaaggagggggaggtgttgcaaaaattcaccaaacaacacgacaaagaggaggaggaggtgcggcgacaactcaaggtacgacgtgaaaaggcgacagaaaagtacctatcatacttcacagtggattgccaccagaaaatcaaccatcaaggggagattgatatgacatctcttctacctcggcctcaggctcccaattccgaccctactcaagctcgtgcacagatcacacaggtagcgccatacacggctagaccattcgggtgtacccccggatcgttcggctcggtcacggactacctagccccttacgccgaactgtctagatacgtcacggaacatctggcatgtttcaccggaccgtccgaccctgcacgaatccgtgcgcagaccacccaggtcacgccacacatggcagaactatatgggtacaaccccggacaatttgaccaggtcgcggaccgtccggcccctcatgtcgaaccgtctaggcacagaactacccaggcagcgcaatatacgaccgaacagtccggatacgcactcggaccgtttggcacagtcatggaccgtcgggccccttacgccggacgattcgggtatgcatacatagaaccaggagctacacaatatgcggagttctcgcacccatcacaactgcactacggtgccccaccggcagcacatcataaccatgtcgtgccacctcctatacacagggtcgagtattcttcggccaccagagagcccgagagatatagggcaggagatggtgccattaataggacacctaacgcacattccgaacatccctag

SEQ ID NO: 31281 - DNA, 264 bp, Zea mays
  Peptide Sequence Number=SeqID_74656
atgcatgtatcttactcattgcattcattagattgcaatctcgctgacggagagtacgtgctcatccctgagcaaggagctgtccacgaggaagaccaggagcaagctcccgagactgccatcgaggatctccccgtagccccagcatttgaaggaaagtcccgctatggtgggtacaagtgcggtcacttcacggcggtagccggggtcagtggagcattgtatgccaaggcggtacgatttaggatatggttgatggtgtaa

SEQ ID NO: 31282 - DNA, 303 bp, Zea mays
  Peptide Sequence Number=SeqID_74657
atgcctctctgctcgctggcgacatgtgtcttctccagccaagccgcgcctagcactgttcatgtcgtcgtcgctcaccgtggaaaccagcttgcccatgccgagctcatgagcgacccgaccgtcatttctagtgtttggcctcccctgcaagctgctcgcgcctctgttcctggccatggtgatgttgtggcttcctacgtgacatctccgactggtgttcgcgccgacaaaaggatcccaagagaatgtggagaaacaatccccaagtcgatgcccccaagtgctcgacagaaggcctga

SEQ ID NO: 31283 - DNA, 252 bp, Zea mays
  Peptide Sequence Number=SeqID_74658
atggggcgcggtggagatggccgagaaggagaagtccaagcgtcgtccatggaagaaacctcggctcggcacgaagaggactgtgcggttggggataagaagctatgttcagcggtgggatttttccacgggctgcgcgacggtgaaaatatcagaagggaagagaaagcaatagaggatagagatgctggatattttccattttctctctcgcaaaagcgcttgccaaaatatcccggatctaaaatttaa

SEQ ID NO: 31284 - DNA, 252 bp, Zea mays
  Peptide Sequence Number=SeqID_74659
atggggcgcgctagagatggccgagaaggagaagtccaagcgtcgtccattgaagaaacctcggctaggcgcggggaggactgcgcggctggggataagaagccgcgttcagcggtgggatttttccacgggctgcgccacggtgaaaatatcagaagggaagagaaagcaataaaggatagagatgctggatattttccattttctctctcacaaaagcacttgtcaaaatatcccggatctaaaatttaa

SEQ ID NO: 31285 - DNA, 594 bp, Zea mays
  Peptide Sequence Number=SeqID_74660
atggtgtcttcaacctcccagaccgaagctgccgcgcggatcttacgggtgtggcgcaacctccccctcttctgcggggcactcgtggaggatatcgtggacgagccttccttccacatgcgggcgcccaatctcgctcggaagcttatcccccaccggatgaagttatcccctctccgcgtcccgcgctcggctaacaaactccgaccgccgtgcaacgggcgtggatcccgggactgcccgcctgctactcctcggccctgcctcatccccaccctagccccaggtcccggcgtcctggcgtgcagccagcatggccagcgccgcgcgcagctgtcgcggctcgcctgcgtggcggcccggcgcggctcgccagtgcagatgcctcgccgacgcatccccgcgcgcgcccttttattgcgcggaggagctacgcagcctcgccatcggcacgccgaccatgccccaccaggcaaggtcatcgtcatcaggaggagagacgcgatgagcctgcgcagcaccttcgccgtgcgtccaagcctcgccatcgtcgacgccttcgccctctcgctatcgaggagggagccacgccac

SEQ ID NO: 31286 - DNA, 885 bp, Zea mays
  Peptide Sequence Number=SeqID_74661
atggcgaggctcggacgcacggcgaaggtgctgcgcaggctcatcgcgtctctcctcctgatgacgacaaccttgcatggtggggcatggtcggcgtgccgatggcgaggctgtgcaactcctccgcgcaacgaccgggcgcgcgcggggacgcgttggcgaggcatccgcactgggtcgccacgctgggctggccgcgggctgccgcgctggctgcacactaggacgccgggacctagggctagggtggggatgaggcagggctacacgtgctgcgcgggtggctggagctgggcgagaacgagcgggaggagcgcgttgggcgagatcgtggtggcggtttccgtttcctgtgcgcgcacgaacgagcaggagccggatcgagtggagtcagtttttctgaagaggaaacatatgacaggtgggcccagcatgcagagcaaggagcgatgtctaggccagagacgtggtcaggtgcggcggcggctgggcattgccctcgcgcggccgcctggggctgagcgagccggccatagccgactgggccgagggcgtgggacgtgggccagggtgagggggcgcgtggcgctgggcctcagaaaaaaagtagaaaagacggagagtaagatggtaacacctgaatttggtggatatcagaaaagaaattttatacccccaaattcagggtgttacaaatctaacccccttaacaggaatctcgcccccgagattcaagaaaaagatagcgagaaagacaagatgttgccgactctgatcttgactgatttggaggagttggaggttgccaaatggacaggtgcaagaggaaagaatagcgagaaaagggaaaactactctaaggccatcgaaaggaaaggggaatga

SEQ ID NO: 31287 - DNA, 345 bp, Zea mays
  Peptide Sequence Number=SeqID_74662
atggcacttgttggtgtcgatctggcgccaaacactaggggtgtatcgcctgtcggtgctccctacggaggcgaggacggtccgtggcatagggtcggacggtccgcgaccttggcgcaggagcggatcctcctctgcatgctttcggatggtccgcgcctgaggacggaccgtccgtggtggcgcagagggtcttcttctcctcgaagaaccctagaactcgcccccgggagagatcccctcgagggggagagttccaaggcattgctccgggtcgtcaagccgtccggtgcttctctaatcgacgtagagtcgaagagagattgttgtggaagactaaactag

SEQ ID NO: 31288 - DNA, 285 bp, Zea mays
  Peptide Sequence Number=SeqID_74663
atgaaggaggcgatgaaccactaccacacgcggggctcctcgcgcggcgacggcggcaccactaccgagcgcgacctggtgttacagtggggcaaccggaagcgcctgcgctgtgtcaaggtgcagcgccgcgacgaggctgccaccaccgcggccgccgagaaggccgccatcagccagtgccgcgccgtagctgcccatcaccacccaaccggccacacccaccaacaccaccgtgttctcaggagctttgataggtcaccaacatttggcagccacctctaa

SEQ ID NO: 31289 - DNA, 454 bp, Zea mays
  Peptide Sequence Number=SeqID_74664
atgaaacccgagagcagccagttcgccagagccagcctggcgcaccggacactgtccgggtgggcgccgctggggagggacagagcaggggccgcgtgggggcacgcgcgaagggccgccagggcacgcgtgggagcgccgctagggggccacgaggggcgcgcggggagggcaggggaggaggccacgagggggcgccgccggggggccacaggggagcgcgtcgaggggtgcgggagagcgctgccggggccgcgaggggagcgcaccgaggggcgcgggggagcgccgctggggccgtgcgggacgcgcgccaagcacaatgatattgtgcgcattgctaggaatttcatcatcaagatgaacctcttcatgagacaaatcaccatcaaggcgtccccgcggaatagatcaaatgccaataagtcaaatgtggatatgatattaatcccgg

SEQ ID NO: 31290 - DNA, 1041 bp, Zea mays
  Peptide Sequence Number=SeqID_74665
atggaccgtgccccaccgcgcggcgcgccccgcgacgccgtcggtcagcggtggctcggcgtattcgccttccaggccgcgctctcgaccgccgcctcggcgctctacctcacggtgttctcgagcggccgccgccacccgctcctcggcgtcccctccggcctcctcgtcgcgcttgctccgttcctcgcctgcgctgccacggggcctctcgcgctcgcgttcctcctctccgcgtccccgcacccgcggcctcccccactgccgcggcgcgcgctagcaacctccctcctcgccgcggccggcgcgctctccgtgggcgccgcggcggcgatgctacccgaggacgccgggtgggcggccgtcgctgggctcgggttccgaggcgccgtgcttgggaccatcttcgccgcgcactattttgtccgtcggaggtggttgctccagttccccgtcgtgcagcgacctctattctatggattaaagatgggtctcctaccatctggaaacagggctctaaagttatcaatccatgccttcttgcttttccatttcctagttttctttcttccctggcaattcagaaagggaggttctgttggaagccaaatacttactgaaatcagtattttaatagtgactgctggtgtttccttctgtttggaaataaactatcattttgtccaggttgcacatacaaggaggtgcagtttcgctccacctcagagcactgccgctgcagagacaaatcccactgaatttattctggaaactttggaacaaagtgatccacaatcattgatacaatatcttgcttaccaagatttgtgtgtggtatctgagtgtaacttggaaccgtggcgcagagctgctttctttgaggaatctggtgaaacttatagaagaattgtgacagcttgtttgaagccacttgaggagtttacttcaaaaattgctgaagcccttgaaggtttttctagtgatcagccagaattgatgctacactttttcagactctttagtgcatttgatgattcccag

SEQ ID NO: 31291 - DNA, 201 bp, Zea mays
  Peptide Sequence Number=SeqID_74666
atgggggtgcggagagaagaggcggcggtcgcgggagctagatatgccatggcagcggctagggtttgcaagacggagattgccaggggagactggaagcaacagggcggcggcggagtttgggaggccgtgagcagagtgatacatggcatacgtgtcgctgactcatgggacccgctggtctgcctggctaaaatttag

SEQ ID NO: 31292 - DNA, 282 bp, Zea mays
  Peptide Sequence Number=SeqID_74667
atggcactgcaggggcggcggcgcttggtggcaggggcggcggcgcttggtggcaggggcggcggcgttggtggcagtgggggcggcggcgcttggcagcgtgggggcggcggggcgcggcccggcgacgtggtggcgagcgtgggcgcggatttgaactgcaggtcacttgaaacttggaaaaccgtgcatgcaaaaatgatattcatgctacatagcacaagttatgaccgatttcaggagcggaccgaaaacttcgagcaccatgttcactcaacatga

SEQ ID NO: 31293 - DNA, 1137 bp, Zea mays
  Peptide Sequence Number=SeqID_74668
atgccgcctgttcgccgagtccgccgcttgcatcccgccgcaagcccgtaccccaccgaccggcgcgcggaagccaaatctgatcacgccagtgacggcgcgcctccggctccagccactcttctacccgacgacgtcctcttcgccatcttctcccactcctcaggcgccgccgacgtcgcgcgctgcgacgcgacgtgccaccgctggggcagcgtggtggccgcccgcaccgccgccatctaccgtgccctggcggtgccgccgccgcccgccacgttccttccccacctcgcgctcggcgtcttcttcccgcagcacaagaacgctcgcgcgggggcgcggctgcgcttcgtgcccacggccgcggcattgtcctccagctactcgcggcggctcctagcaggcccgatcaccaccggcagcgccgtcgtcgacttggagttggacttggaccacgcccgccccgtcgcgtcgcgcaacggccgcgtggtcctccagctccggcgcgccggctgcctcacgctctgcgtgtggaacccctccacgggggccgtgtccgtgctcccgccgctctccggcgaggactaccccggaaccgactacgcgtgcgcgatcctcaccagcgaggacctcgccaccgggccgctgtccacctcgccgggcttcttccgcgttctcgtcgtctacgagcgccgccgccgcagcttcaccacgctacggtgctactcctccgacaccggcggctggggcgcagaggccaagaagcccggcgacaagatcagcggccgtgtgctccggcagctccgcccggccgtcgtgctcggcggcgtcgcctactggtccatgcgccgtgccgcgttcggcgtgcggctcgacggtggcacgtcgttgtcgtcaccggcgacgatggacgtgtgctcggtgccgtaccagcttaagctgttaaggctgaacgaccacatggtgggcgtatcaccggaggacgggagaatgcgcttcattgtgatgggcttcttcgcaaggaaactccttgcaattgatttatttacctcaaggcttcgtcaggcctccggtgatcaaattgatgacgacggcatcatgatgtggactagcatcggcataattcgcctataa

SEQ ID NO: 31294 - DNA, 1788 bp, Zea mays
  Peptide Sequence Number=SeqID_74669
atgccgtcctcctcttcttccgctgccgctacgccgccggccggttcctcgctgccggccgccgcctcgtcggaggagacgctgagcagtttgatggcggaggagttgcgcgccggcgattctgttgatttcggcgtgtcgcgaatgtcgtcggcccgcgtggaggatatgcagcggttgggctacttcggcggcggagttgtgcgtgccccagggacggagaaagtccccgagccggagggcgagttggttgttttcgaggcgtttttcgccgccggtctccgcttgcctgcacaccggccaaagaggcagcgggggtctgcgaaggctgcggcccccagcggaggccggccgccgccggcggcgaagtcgggcgtccctgcagctagcaaggcgccggaggcaacggcgaaggcggtgccgccgtccggcggagtggcggaggtcacgaaggcggcgcgagcgttgccgttgtcgggcaaacgtgtcgccgacttcgccactgatattagtgtggaggactatcttggtgggtcgggcgagggccaacttgctatggttgcgcctgccgcggcgaccacgacggctgccgcagtgccaaaggcgaagggcggggctctcagcgccgggggcgaggtgtcagccctcgcggttgtcatggatgaggcgggcgctgcgacccgccggctgaaggaggcgacagaggcgctgagtcaggtggctgacttcgccagccgcactgcgtcgggggccctcacggcagctgtggctgccgaagtcgagagacttcggacacaacatgctgacgccgtccgagagaaatcggcagccgacagcaagtgccgcaagctggcggacaaggtggccgccctggagggagaaaaggctgacctccggcgccaattggcgggggagaggagggagaccaacgaggccctcgccaaggcgcaagcttcgcaggcggaggccaagctggcccgagcggagggaaacattgccagggagcgggccgagcagctgcaggagcggctcatcgccctggagagccgcgtggagcgggccgaggccgcgatgcgagcggaggccgaacggacgcgcacacagcttgtgagcacatatcgtgagctgggtgcgcggactggtgccttcgaagtgccggaccgagagtccgggcttcgctgcctggaatgggtgcaggaagaactgcaggaactccccgctgtcgtgggggggtttatgtcgtacgcctccctggtcacctgcgagggggcgatgaacgcgctctcccgcgaagggtgccggcacttcgaggtcttcgaccaggcggatgaagattttgatcgagatgtctataaggttgaagacctcgtggtgaaggattctgccggggccctctacgaccggatgtggggtccgcacggtcgcgaggtggtcagggagcgggcggagacggcgatggctcaggcgttgcgtggcgagcgggtggacgacttcggggcgttgaacagcgcgctgcctgacccggagccgacccctgcggaggccgtgtccggggtcgccctggagcctaccccggagaccgcggaagacgcaccggatgcccccacatccgcagcggccggcgaagacctgcccccgaaggtggccgaaggcgcacctgatgcccccgcggctgctgcgccgagtgctgaagatcccgcggcggtggcggcggaaacaacagcggaagcggcggcggagccaatggcggaggcttccgcagcgccagggccttcgcaggtggtgtag

SEQ ID NO: 31295 - DNA, 1131 bp, Zea mays
  Peptide Sequence Number=SeqID_74670
atggcggcggcgccggcgcccctgccggcgcccgtcgcagactggtgggagcgcgtcaacggctcgccggcgtggcaggacgggatcttctggaccctcgccgtcctctacggtgccattgctaccgcctcattcatgtgcttcaatgcatttgacgaggaagctgacctcgatgttcttgaccatccagttctgaatttgttctattacctgcttgtggagattctcccttcatctcttgtcctgtacattctaaggaggattcctgcaaagctacggctatcccagtatcaccccggtgtctcttggacggttcaatgtgacattgtgcaacagttcatgcttgacgcccaacctcaggatgaggatcccgtgcctccatacccccatgatggtcaccagctccctgttgagttttttggtatgggacagccgatgcccaacttccattttcagttcgacctcaatattcctcctgaagatggaatcaatgctgaggaaaatgttgttgccaatgctgatgatggctgggacccttggcctattgagcaggctcaaccccctgtgccatatgttgtaccaaataatgttaacgctgcgaacaatgaagaagagcagttcagctaccagttttcaggtcttgaggatctcccttctgacgattcggtgggctattttaacgacatcattatccctcagggagtccagctccagcaggaggaagccccggcgccggctgaagcggttctcgccttgcctgctttccctcctgacaacataaatttggagggaaacaatgtcgagggacaggacgatatgcaaattgaagataacatcaatgtgggcctcatgttacacttggatcaagccgtccctgatcctgctcttaaagatttcttggccagaaagcgttcctcctcttgggctgatttgttccctgacaatgatggctcagtctctgttccaaagatttgggctgctttcttcatgggccttttaatgaggccagattcgtttgattgggccaggaaattccttttgtccggagctatctcggcattcgtcgcacccagcatgggacatcatttcaatcagaatcccccctccacccagtcaggattcccctgctaa

SEQ ID NO: 31296 - DNA, 1131 bp, Zea mays
  Peptide Sequence Number=SeqID_74671
atggggagcgcccgcgttgccttcgtcttgtcgttggaggagcgcaaccttacggagatgggcacccttcagccatcgctcggcttcaaggattttcatcaggcagcccggctgcattccctcatcgatgcttcaaggatcttcatcatccttgctagggaggagggcgaggcgagccggggcctgccttcgcgtgggctggtgtcctgctttttcctccggcatctgggggtggaaaccatcctccagctctgcggaggaggcgtcctccagccatgcgggggaaggcgaactgctgctgcctggccagggtgcggcattccgtcctctgtccgggcgactgtggtcggccgcaccggagggtctcacaacacgtcgtacgccgcgagggcggtggctgccgtcgttggtgctgaggtggtggcagccagagaaggtttctccgccgacgagatcgtcggcgccaccagcggtcggacctccagcccttcggccttggtggcttgtcctcgcccctcgtgtggggacgtgggtgagggacctccagcagcagcgtttgccctgaggccgtcgctgcggctgtcttgccgtccgagacggaggtcattgacgctgctgcagtggtcagcggcgagccacccggagtttgtcgtcccacaggccctccggtgtggaggttgttcatacccgcgggagtggaaccggagttccatttgtaatggcaccttgagtgtcgatcagcggcggctggagctcggccaggtcgtccgctggcgggaccaaccccggagtcaggctgccgaggccatgagccgggctgatgtcctcgggggacagctggatgaggctacggagcggccggtcgagatccttccgcccgcgtcgccgtccgaggccgggccagattcctccgaaggtggagacaacgctgaaggtgctgctgctccctctgctgatgacttgttcgtcggtagcagaatcgtttatccgagcgagagttacttttcacggaaggtgatgagtgaggattctgttatcgatatagtcgagaaggcacgaaaatcgttctggcagaaaaaaaacgaggtatatgaacgacttgaaaacatcttaagggtaaaagcgacgtag

SEQ ID NO: 31297 - DNA, 360 bp, Zea mays
  Peptide Sequence Number=SeqID_74672
atgccacctgccagggtgaggctgacagcaggtgagtccagcctcaggcgccacaggaagctccgcctcgcccgaccccagggctccgcccccgcctcggcctcggaaggtgcactccgcctcgcccaaccccagggctcggcctcgacctcgacctcggaaggtggtctccgcctcgcccgaccccagggctcagcctcaacctcgacctcgggaggaatcgcgtcctcgcccgaccccggcctcggcctcaggaggagtctccgcctcgcccgacctcgggctcggactgaccacgccgtagggggtcgtgttgcttatgtcctattttacttgcttcctctgattgccaagccatag

SEQ ID NO: 31298 - DNA, 951 bp, Zea mays
  Peptide Sequence Number=SeqID_74673
atggtagcaaacctgattgcctccattgccttcgttgccatattcaatttgccaggtcaatacttccaagatgtgaatagtggggaagacattggtgaggctcaaatagccaagcttactggttttcgtgtcttctgccttatgaatgatagggaccatcagtccttcatcgacccccttctcaccatcttcgcttggatcagaggatggggggatcattcacagcagaacatcccaaacccgagcggatctcgacggctgttgcttttgcaccagagaggggaggagaggcttcacgcctccaagaggcggctggggaggtggattagaggtggaggtggtgagggcgccaagcgcatcgtagagacggaggacaggaatgggtgcgggatgggagagggtccgaacgacgctggaactcaggcgggcggtggcatatggagacgagaaggcggggtgagggcaagggtggagggcagcgctgatggcgtgggcggaggaggcgagatttccgggggggacgagggcgagaaaaacagcgccgctcgcccctctctgactgttgtgccacccgccagggtgaggctgacagcaactgagtctagcctcaggcgccacaggaagctccgcctcgcccgaccccagggctcggcccccgcctcggcctcggaaggtggactccgcctcgcccgaccccagggctcggcctcgacctcgacctcggaaggtggtcttcgcctcgcccgaccccagggctcggcctcaacctcgacctcgggaggaatcgcgtcctcgcccgaccccggcctcggcctcaggaggagtctccgcctcgcccgacctcaggctcggaccgaccacgccgtagggggtacatcatttaccctacccctagctagctcaggctacgggggaacaagaccggcgtcccatccaggctcgctccggtaa

SEQ ID NO: 31299 - DNA, 246 bp, Zea mays
  Peptide Sequence Number=SeqID_74674
atggagttatccagtggatcagcggggaagctgaagctttcaaagaaattcatagtgattgaggagatttttgtgcctttgctgccaaagctactaccctcggtgggaaattttactccgagatatggcataagggcggacgagaagtcgctgatgaagccatcaaaaggaacgaaaaggaatcacatgatgcttcagaagcaacgaaaagggctaaagaagctgtcgagcgggctaagcttatag

SEQ ID NO: 31300 - DNA, 285 bp, Zea mays
  Peptide Sequence Number=SeqID_74675
atggcgcaccggacactgtccggtgcgccagccacgtcagccggccgttgggttctaaccgttggagctctgacaggtggggcctctgggctgtccggtggtgcaccggataggtcctgtagattgtccgatgaactatctccccctccggagccatatgatccagagaccgacccgttcctgaaggaggcattcgagactatgaaaattgccaatgaagctattgatgaagctgtcaataagctgttaaacgaagctgccgagaaggtcctgaaggaagactag

SEQ ID NO: 31301 - DNA, 531 bp, Zea mays
  Peptide Sequence Number=SeqID_74676
atgggaaatcgatggagatggcccatactgcgggaggggtgtgaaggttccccggctcccgtggtcaaccctcggcacgcaccagaggccaaacgccgacgaatcgaagtttccccagcggaggacctctcccgcacacggcagcggtggtggcttgattccttaggacgagagccaggtgcccacatatttgtacccgaggctaggcctgaggacgaggtccgaggctggagtctggtatcccaaccacatcgcgacgagtcccaacaggttcccggaatcgtgtgcgggtctgttgcggtaatctgcttcacgaacgtgatgatcgggcggcccccactcgtcattggtccaagcaggtgcccgcgctcagcgatggagaccgaggagtgggcctcggtggttattggttggggcgttggtttctgggctggggtggtgcggctatctgggccgaggtatgaggaaaccggcacagggggcttcggcttcgagatgaaggtcttctctcatgacagggtgaagatgtag

SEQ ID NO: 31302 - DNA, 1446 bp, Zea mays
  Peptide Sequence Number=SeqID_74677
atggtgaatgggggtggcgctgacttggttttggcctgctgctgcgtgacctcgaagcgtgtcttgagctgcttcgacacgacgccgacagccaggaagccggcccatgccaaccctgcaccgattccagaccgctgcgtcaacgacgaggctatccagtcagtggagtccgcgacagccgcgtgcttcggcctcgccgccgccgccgcctgctgtggctgcacttgcatggagtgccgctgtttctgtgattccggctgctcgctggacgatggcgaagccgaggaaaacccgcaccttggctccagatccgcccgtagccaccgttcggcttccgtggcacccaccggcgtcggcggtccccacatccgttctgatctcgctcgctgcgctcctcatccacgtgctggacgtgctctagcactgccagattttcagcttggcactctctcgtttaattatttgatgttctgtgcttgcaggctggaattgaagttctcccacaggggtgacacatacagaaaatctgtcaccttctggtgggacatcaaaggttctagaagtgctgatatctgtgatacatttgatatgataaaaaaaccgggggagctcattgtttctcctaaggttgaaacagctccagttcgcaatgcaaaaacagttccttcagaagagagtgctgtatctcctggagttgctgagggtaaggcatgtgcagttgctgatcttagctcattgatagcttctaaagaagctgggtctcaaaatgatattgacaatgacaggccgaaaacttctttgtgccatgctgattccatgaaaataaaagttagtgatgaactaccagtgaagcaatggacatactgtgatcatatgtctgatttacacagttctttcacatctgcaaataatgatatagccaaagaaatgaatgaagtgctatttaaatcattgcctactgatacatctgcccttgatttgttggcatcaagtgatcttcttagccaacagaagattgatttgattggcaaagaaagacttggagtacgtaaaaccaggctgaggttgaaagagcagattcttacaacgaagttcaaggcatatcgtcacttgtggaaagaggatgtacggctactttctgcaaagaaacaacaattgaagtctaataagcgcattgatcagaataaccgaacatctcaaattggatctcagaggcgacacttttataaccgttcacgattagccatgaggcaacgcttttataaccgttcacgattagccatgcctggacgccggcgaagtgcagctctagatgttggcgaagtggaggacaccggcgagtcggtgcttctcgacgtgcgcgagcgcggcgttctgttgcacgtgagcctcagcatcggcggtggtgaagttgtcctcgggcttgaaggcgaggttgcaatgtag

SEQ ID NO: 31303 - DNA, 528 bp, Zea mays
  Peptide Sequence Number=SeqID_74678
atgcgcgtcggtggcggcgacgtcccgcgactgggcgacctggtggtgaccgacctgcagggccgggtggccggcagtgacggggaggcgttcgtggacacgctcgacgacagcaagcggctgctggcgctggtgatgagctcccggccgtacaccaggggcatgtgcgagggtgttgagcatgtggtgcgctccatgaggcccggcggcaagcggtgggtggtcgtcccgccgggcctcgcgttcggcgacggcggcgccgacttcggggaggagcatgtccagatcccgcccggcgccagtgggtgccacggaagccaaacggcggctacaggcggatttggagccgaggtgcgggttttcctcggcttcgccatcggcagcgtcctgcgtcccttggttgcggcgggacttgcggcgtgcgggcgggcggatgggcgtagggcgtgcgggagggcggttcgcggtgttcgcggcgggattgcggcgtgtgggctagaaggcgggcgggcgggctggcgggcgtag

SEQ ID NO: 31304 - DNA, 276 bp, Zea mays
  Peptide Sequence Number=SeqID_74679
atgagctctagcgacacagggtcaagcgacgaacgtgttcgacgtgcatacgtgagccgaaccgaaggcgaggaatccatgaatcgaagttcgtcgataagcatcatggaggaatcagcgacgttgctgcacacacgacgcgacaacgaacgacaacaaccagcatggagacccgacgcgactgaggaaggggttcgacggttcgacgacaccggcgaggtcaacgacgagccaaccaaaccaaaactccacgacgccgaccagtacacgggttaa

SEQ ID NO: 31305 - DNA, 462 bp, Zea mays
  Peptide Sequence Number=SeqID_74680
atgcaagacgctgcacaacatgcactttcacagtattgctcgttgttcagtggggtagctgacggcctcgacctgaagtactaccctcacctctcgaccggcagtgctggaggtgtgattgtctcgcctgttggtgaaggcaatcccaggctaaacatcatggtcaacttggtcgccgtgctcaacaccgagatggaccatgcccttgacaagttgagcaaggttcgggtggaggttctgaaattgcgtgctgagcgcgtagcgcaccactatttggatggtggttctctcgcccctgtcgggattcaacacccttaccgttcgccgccctgtggtcgcttcgattatgagtcagatctaatttgtgtgtgcttcctacagatgtctgagaacaggcgccgaggtgcaaggcatgctcagccggagcagcaggcaccccaggaggaggcagctcagcagtag

SEQ ID NO: 31306 - DNA, 375 bp, Zea mays
  Peptide Sequence Number=SeqID_74681
atgaccgtgacagatacatgggttaccggggttcccgccatcgatcacctcctagacggtatagaagcccacccagaggaagagtgtcatcgccaaggcgtggtaggtacaggaggaggagccgaagcgcctcacgcagccctgtctacagggaaagaggaaggggaggtggatacagcaaaagccctatacggagcagttcaccccctgccaggaaaccaaggtcacatggtgaccgtgcacgtgaagcatgcaagtgatgagaaatctcagtccgcgtccccagctctgtcactgtctggtagccctaatcgtggaggcaagaaaggtttggtttcctacggggatggctcacctgattcagctgggaagtag

SEQ ID NO: 31307 - DNA, 72 bp, Zea mays
  Peptide Sequence Number=SeqID_74682
atggtgagctcacatacgcaagttgtggggaataatgttcatgaattcaccaaagttactaggtataagtag

SEQ ID NO: 31308 - DNA, 588 bp, Zea mays
  Peptide Sequence Number=SeqID_74683
ctccatggcttggatggtcttgtcctcacccccgtaggagggcgggggcgagggcctcttctccatggcgcgcatgctgaggtggtcgccaccgctgaggaggctgctcggcgcagaggtggttgccgccgctggcaagtcgtcggtgcagaggtggtcgcctctgctggcgagccgctcggtgtagaggtggtcgcctccgctggcgagccgctcggagcagaggtggccgcctccgctggcgagccgctcggagcagaggtggccgccgccgttggcgagccgtcggtgcagaggtggtcgccgctgctggcgagccgctcggagctagctacccatgcgaccctactggacccgccatctgacactagccatcctttgatacatgctcgagacctgcacggcccacggtacgggaccaggctgagcggctacacggctccggaccaccccaggagacaggctttcgggtacgggactaggctaagcggccacacaggctccggacccccccatggaacgggctcccgttctttagaaccggcccccaggctgtcggaccctcctgctttcgcagagaggtcctaa

SEQ ID NO: 31309 - DNA, 429 bp, Zea mays
  Peptide Sequence Number=SeqID_74684
atgtcccgcgcccgcgcctataaagcccgctcaggcgtcgactacactcttccgcgcacgctcaaacctcaccggagctcagttcaccgtagtttgcccgtgcgcgacgtgtccgcggccacccgagccactgccgccgtagaccggccagcccagcccttcccaaccctgtccaaccctctgaggcgagtgtgcacgccccagggaagctccccgagcgaggaatcgaagcctgcgtcgccggagaggccagtccacggtcgccggagttcacaaccctgccggaactgtaaccttgctgacggagagtacgtcctcgtgccggagcaaggagctgctcaggaggtagccccagatccagcaccagagcctgcaccagaggacctgcctgccactgttttggaaggcaagccccgattttatgcataa

SEQ ID NO: 31310 - DNA, 426 bp, Zea mays
  Peptide Sequence Number=SeqID_74685
atgggcaagagcaagaaaggcgggagttcatcacaccactccggtgacaagcggaagcgcgagccgagtcccccctccgaggacttcggtgactctgagtactcggaggaggagttctcctccgagtccgaggggtcgccagcctacgcttctcccccggggatcgtcgctgaggtgtggatgtacatccgggccgtcgagcgctccagactcgagggctcggatgagtctgaggtctccttggatgaggaggactcctccgacttgttcgaggaggggagcggtggtgacggtgatgaggagggcgacggcaagggcaacggcaacggcggcaagggcgacgccgacaccggcaagggcgacggcggcaccggcaaggacgacgacggcagtggcagggccagcggcaaagcgccgctggcttaa

SEQ ID NO: 31311 - DNA, 504 bp, Zea mays
  Peptide Sequence Number=SeqID_74686
atggggaagcctgtcccatcactcctcatgctcctcctccgccgaggcggggtcccactcgacagtccaacccggtggcaagatggacgaccaagtcactccagcaaccatgtcctccaaagaacattgaccgcacttgtacccaccataaccggaatgggagaccacgtctcaggtcgcgtgaggagggcaatctgctgccaggttcaatcagttatccgcacgttaatcctaattccaatttcatctcatagaccacgcatccccatggattccgtgttccacagaccagcatcatatgatatgaaagtggataacaatcatttttctgaccttgcgcgagtgctagaaaaatcactcgatttctaccgagaatccttattagcaaagcactacctcgacctactaattagtatcccttctcaaaggattcctgaaaatctggcaactaagggttctcaacatcttcctacccctagtggcacattcttcctacaattttag

SEQ ID NO: 31312 - DNA, 474 bp, Zea mays
  Peptide Sequence Number=SeqID_74687
atgcagtacaatggatcaagcagtctcattagctgcgagaagcagacgattcgaatcgagttttatccttgcaaggcagatcctctggtgcaggctctggtgctggatccggggctacctcctgagcagctccttgctccggcacgaggacaggctatctgtgcattgaatcgaaaaatggcgcagtggcttacccggtccacgtgcgccggcggggttctgaactccggcgagcacgatttcgctattccggtggtgcgggtcctcggtttaagccttggcaagctttacggcctcccagggaagctatccgaaggcttggatcgagcggaggagggcgggaaaggggctggccatggtggttgccctcgggcggctttggcgggtcgcggggaggtcgccggagctaagggcgagctcaggggagttaggggtggtacggaggaggcaacggggaaggcagccgggcactag

SEQ ID NO: 31313 - DNA, 819 bp, Zea mays
  Peptide Sequence Number=SeqID_74688
atgacttcccacggatcctcagacgacgggaatgcactgtcccacactgacgggcttgcacgagagggctttccccgcattttgtgggaggtacttcagggggccggatacacgacacctcctcagtacgcggtgcagcagttcgagaagcaccgagtgccccgctgtagggtgaggatgaccctggagcctcatcccctgcagctaggctggcgttcactggactctgagtcttttggatactgggctgaggacacgattgaggcgattgctctgcacgggttgaccactttctacggattccatcccttggagctgtctacccaccctattggcttgttccccgcagaaagggaggacgacccaatgtggaaggatcgggtggagcacgccaaggacatctgggctatctacccaggtcatactgctcacttgaccgtgcggtgcatgaatgccctgtaccgtctgcaagtgatgcgtggtgaagcaatgtcccacctgatggcactgttggaggcaacaaagatcaccctgaacaacagagaggagcttctgtcaaatgagatccaagagctggaggaattagtgggaaccagggagaacaccatcgaggttctcgaggatcagcttattaacacccagcagcagcttgccgaggctaatgagcacctggatatgcatcaccaggagatccaggatatggaggccaacgaggacgtcgacattgagggaggagaggagcctgcctccagcttggacactgctggctcagggagaccaccttcccccgagtcgagtgttgcctcgttcgcccactag

SEQ ID NO: 31314 - DNA, 510 bp, Zea mays
  Peptide Sequence Number=SeqID_74689
atgaacaaactcaccggcattcgagatgccattacgaacggaactccggttccccctccgcaggtacgaacaaccccactccgagggggaaggcctgtggagcaacggaaggtcgacgaacggcgtgccgtcacctgctccagcagcggcgacgacgacgacttctgctctggggggtcgaacagcggcagcactgaccctagggcggatgctgctgccaggaggcccccgcccacgacaaaactcgtgaggcaaggacggacagaaggtcgtagagttggagggaccgggaaagggggataccccgaaaaggatccttctctgcgaaggaaccgggctccgagcccccccctactgatcaggggttcgaagactggccctccgaagggttcaacagtcgcctcagatcgcgtgggcccgacacccactactggtcaagggttcgaaggcgagccccccgaagggttccatggccgcctcaggctactcgggctccgcgcccattactga

SEQ ID NO: 31315 - DNA, 318 bp, Zea mays
  Peptide Sequence Number=SeqID_74690
atgacgggtgggctcggcgacacagcggcggctgggcaagcgcgcgcaggcggctgggtgtacgcgcagcagcgcgctagggcaaacgctcgcagcggcgtgggagtgggccgagcaggctgcggctgggccgcgcaggagagcgcagcggctaacccccttaacaggagcgttgatatgcacttgatgaagatgttgccgactctgatcttgactgatttggagaagctggaggttgccaaaaggacaggtgcaagaggaaagaataacgagaaaaggggaaactactctaaggccaacaaaaggcaagggaaataa

SEQ ID NO: 31316 - DNA, 1530 bp, Zea mays
  Peptide Sequence Number=SeqID_74691
atggttctgacgcacgttcacgaccttgacgaggcatccgccgcatcggccgtcgtcttcgcctcgagatacgtgcaggacccgcttccaagcaggtatgagctgggagagaagtccgtctccaaggacgcggcgtaccagatcatccacgacgagctgctgctggacagcagcccgcggctgaacctggcgtcgttcgtgaccacgtggatggagcccgagtgcgacaagctcatcctcgagggcatcaacaagaactacgccgacatggacgagtacccgaaccggtgcgtgaacatcatcgcgcggctattccacgcgccggtgggcgccagcgagaaggccgtcggggtcggcacggtggggtcgtcggaggcgatcatgctggcggggctggccttcaagcggcggtggcagaaccggcggagggcggcggggcagccctgcgacaggcccaacatcgtgacgggcgccaacgtgcaggtgtgctgggagaagttcgcgcgctacttcgaggtggagctcaaggaggtgaggctgcgggaagggtgctacgtcatggaccccgacgaggccgtgcgaatggtggacgacaacaccatctgcgtcgccgccatcctcggctccaccctcaccggcgagttcgaggacgtcaggcgcctcaacgacctcctcgcggccaacaacaggcgaacggggtgggacaccccgatccacgtggacgcggcgagcggcggcttcatcgcgcccttcctgtacccggacctggagtgggacttccggctgccgctggtcaagagcatcaacgtcagcggccacaagtacggcctcgtctacgccggcgtcggctgggtggtctggaggagcaaggaggacctccccgacgagctcatcttccacatcaactacctcggcgccgaccagcccaccttcacgctcaacttctccaaaggcacgcatgcacggccagatcatcattatccactgcccagccccagctgtgcccctgtcctgacctctcgaattctgcgcagggggtaccgcaacgtgatggagaactgcatggagagcgctcggacgctgcgtgaggggctggagcgcacgggccgcttcaccatcatctccaaggagcagggcgtgccgctggtggccttcacgttcaaggccaaggacgaaaccccgctggccttcaagctgtcggcggagctgcggcggttcggctggatcgtgccggcgtacacgatgccggccaacctggagcacatggccgtgctccgcgtcgtggtccgggaggacttcggccgcccgctggccgagcggttcctgtcccacgtccggatggcgctggaggagctcgaccacgcggccaagggcgggcccgtgcccaagatgcggctcaccatcgagctcggccctcccgccaggggctccggcgaggaggcctccgccagggtcgtcaagcgggaggccgtcgtgccggtgcatcgcagcgtgtcgctcgccggcgggaagaccaagggcgtctgctag

SEQ ID NO: 31317 - DNA, 840 bp, Zea mays
  Peptide Sequence Number=SeqID_74692
atggcgcactgtcctcttctagcgcaccccgcgcgagccgctctgcaacaacttatcagtcgcttgctgcgctgccactgtccctctcccggccccagccccactcgcgttccgcagctgcagcagagcctgaccagcggagcggcggcgcgaggtcagtcagccatgcagcttttctctggccggagcaaggaccacaagatcggcggcggaggcggcaagtgccatgccgtggagggcacgacgacgcggcacagcaagggtggcaagtgccgcgcgctgtgctgcggcgcgtcctcccggctcagcgtgtcgtcctcgtcggcgtcgtgctcgtccgccgccgacgcggcgctggagccgccgacgcagccgcgcggcctgtccaggctcgcgcacgggatggtccaggcgcggctgcagtccatgatcgacgcagccgccgaggccggccggccgccggtggcccgccgcccggatgagctcgccgagcgcgagcggcgccgccgcggctttcctcgggcggcgtgggcccgcggcggctgctacgagaagagcgtccgggagcaggcgcccaccaggcggacgtcgtgcgtcgtgctgctcgcggaggaccggaggacgcacgacccgctggaggagttccggcggtccatcgcggaggtgatcgccgccaagcggatggccgagcccgcggagctgcgggcgctgctcaactgctacgtctcggtgaacgcgcgcgagcaccgcgccgccatcctacaggccttccacgagattaataaacgaaaattagctaatttctatgagcagacgataaaagataacattatcgattaa

SEQ ID NO: 31318 - DNA, 426 bp, Zea mays
  Peptide Sequence Number=SeqID_74693
atggacgagtggattcgccaagccgaggtgtgggtgcgccaatccgagagctggatccgccagcagcccccggagcagatctatgtcgcggccacggtggtcgccgtcacaatcctgctacttatcgtaggtgccaaaggttcacacttagccaataaaagaccaagtattgggttcgacaaaagagcaaagggacaaccgaaggcacctctggtctggtgcaccggactgtccggtgtgccaccggacatgttcggtgcaccagaggactccgacttcaaactcgtcaccttcgggaaattccagaggcaactccgctataattcaccggactgtccggtgtacaccggacatgttcggtgctccaaggaagagtggcctccggaactcgccagcctcgggaattcacttcagctgcttcgctaa

SEQ ID NO: 31319 - DNA, 510 bp, Zea mays
  Peptide Sequence Number=SeqID_74694
atgggcgcacgggagcagcggtccaaacgccaatcagactctggtcccacccgcaggcttgcatcctcccctaaggcgggaccgggggccactgtcgatacccaaaatcatgggtaccctctcctacagcatgaagacaccgcacccatgcgatgtcccttagccacgcggaggaccgcgcctgaccccaccggatgggcaggccaaaagaccccacgtggcagggaaaaacaccacaccctagtaaggccggacccccacagaaggacaccggacccctatatacaagtccggagccttcgagaagcttcccctgcacgccaaggatacacatacctcgagcgacatggcacaagaagattgcctcggcaacaaccattagaggatccaagctctatattcgttatgtccctgggcccacatgccggggcccagtccttttgtgcatgccccccttcagctataaagggggaggcatacgacgttacaagaagaggctctcagacctag

SEQ ID NO: 31320 - DNA, 630 bp, Zea mays
  Peptide Sequence Number=SeqID_74695
atggaacgctgcgcagaggcgagcaagaagctttgcgagctggagcagaagcgcgtcagagagggagcagagggaaccgccatggcgagcgcgcaatttgtggaggctgatcagggagcgcccaccaggggatccgccatgggaacgagcagaggtggaccatggacgtccacggccgggcgaacagggaagcttgagggagctcgacggccaggagaaaaatgccgagcagagagggactggggcgagcaggcacctgggcgcacgaccatgaacgagggggagcgcgggcctatcgagctgaggaagtaccacgcgcagggaaatgctccatgtcgaggggggctcagccggcagagggagaccgtcgtgcagaggaagaagatggccagcagaagaactctggcgcgcgcagggaggagccatggagaggggcgtcgcgagctggggcaaccaggaagaaacgccgggcatggaaatgggggccggagagagctacgcgcgggagttctagagaagaacagcggagggaggagatgggcactggcggcctggagaagaggagcaggggcgcgggtggccagggagaacgacgacgagatttgtaggaatccaggtgtggcagcttga

SEQ ID NO: 31321 - DNA, 480 bp, Zea mays
  Peptide Sequence Number=SeqID_74696
atgagggagaggagttgggcgaggggtttgcagctccgcgggtgcgcgacgtggacaccaaaaggggcggttgggcgggttgttcctatgaggaagaagaacagtgggttgggcgccactgacagatgcttgagaccgatcaatgcaattcttgaggatttcctggacttgtggattaggacctacacacgctttcggtgcgccactctgatcttgttggttgatgttaatcgcattgtcttcattggggagaggttggagaatgccaatctgacaggtgcaagaggaaagattatagatagaaaaggaaagcatagatggattaaagagagaaaagggagagcacccaactacctaactctatggcacacagctagtgaacagatgccattgcagaccaagggccacaacacatcaacactcattccaaagaagcaaattagtcatagcagaaggacaaacatcatgagcacacagtaa

SEQ ID NO: 31322 - DNA, 387 bp, Zea mays
  Peptide Sequence Number=SeqID_74697
atggggaagcctgtcccatcactcctcatgctcctcctcagccgaggtagggtcccactcgacagtccaacccggtggcaagatggacggccaagtcactccagcaaccatgtcctccagagaacctgtaaaaattatgccacaagcaaggctgagtatactaatactcagctagacttacccgtgaccgcacttgtacccaccataaccggaatgggagacctcgtctcaggtcgcgtgaggggatatgtccactgccgggttcactcaggatttaatgacattatgctaaaagaaactaagtcaagaagtaacttagggtttcttagtcatgcggggctttcagtgggttatgcttattactttttaggcttaggttttcattga

SEQ ID NO: 31323 - DNA, 747 bp, Zea mays
  Peptide Sequence Number=SeqID_74698
atggggagaggagcaggacgactcacttgtgcctacacacgactcgagctcttctggtcgcagatcgagggggttgtggcgggtgcagagccgcatggttgtcgttccctcgcatcacgccaggggatgtggcggatgcggatctggagccgctcggtcatggctcccgagcataatgccgaggccgaggaggccggggggggggttgcagcgccaatgatggggtctggggaggcgctgaggacgcgaggatgggcggcaacagcgttcgtggtagcggcaagcgtggtggggatggcgaaattggcggggctacacgcgccaccgcgtccgcctcctcctggcagaggggcgcgtgggtttggctatcgtgagcagacaagcaagcagccgccggcaagcaggaagcagcctattcagcagcgcagccgagtcgaagcatcagcatcgaccagcgagcgagcaattcgacggctaggaaagcaacaagcaagcaaggctgcaactgcaaggcagcaagccagcaaacaactgcgccgctgcgcgtctgcgcagactgcacgcaccgacacaccggaggcagcgactggatttggaggctacccagcagcgattggatttgtcgatttggagccgcgccgcgcaggaggccggccggccgggcaaggcaagcaacacaggttttttaaggctgcaaggcaagcaatgcagtcaacaaaccgggcagcgacgcagcgcaggaagtag

SEQ ID NO: 31324 - DNA, 1365 bp, Zea mays
  Peptide Sequence Number=SeqID_74699
atgagggggctgtcagaaagagaagaggctctgataatgagagggagtagtcaaaaagagaacaaatcgttcgaaaacccgttgggaatgagggggctgataataaggcagtttgctcttccatctatcgcacaacgccacatcttggctggtctggcatcagcagttggcggtctgagtgcaccatatgaaagagcatcacgtattcatgaaagacatgtagtgaactggttgtgggctgtaggctatcatctgtttggaccattctcgaactcctcccagatcagtcaaattcttcaggatgtagcactgagaactacaatttatgctcaagtcgatgctgctcttcgcaaaaataagagacacatcagaggtcctacatgcaattcagcctacttttattcacttatttcctcaaatgcacagaaatttgtccaatcttttgcatcagagcatcttaagacgccattaggagaacttgtgaaaggtaataaaaacaagttcaccactgagttatgggtagagaaattctataagaaggtaaccaatctaccggagccttttccccatgatcttgttgagaagttagaagaatacctggatgggaaggcatcgaaaaaggtgaaggttgtagaaaagggccctaaaaagggcacgatgaaagcccaacttgctaagagagattcctgcttggacattatccagaatccactattagatcctgacggtcgttcgatctacgcaccagtcgtcttatcccacgtcctggcccaaattcattgcgaccccagaagttctgaaagctatacgcccgcccccgtcctcccacaactaacaaaacccggctgccgaccaatcaggctagatatacgaccgaacgcgccgccccaccaacgaagaaatctctcctcacggcggaggaaccagcgttcgacagcgatctgcagcactcctgttctccccatgatcccgacacgcttcgtctacaggccacaggtgatgacggatgtgatgttgggttctagctcgttgtgggagacgggcgcgccgccacacgacatgctcgcagagtcagccgtgatgtacgcgacgatgctgtcatcgcagcagcagcagatgacgcgatcggaccggcaggcgatgtacgacgctcctgttctccccgaaatcccgacgcgcttcgtctacaggccacaaacggcgacggaggtgatgtcgggttctagctcgttgtgggagacgaccgttgtgggggacagatatcccccaagttcactagaaggcgaaagggcctcgcgcggggccttgggtcagttacctcgcaaggccatcccttcatgggccgggcaaaagctactagcgtaa

SEQ ID NO: 31325 - DNA, 459 bp, Zea mays
  Peptide Sequence Number=SeqID_74700
atgtatgatagaaaagaaaggggcacagccatacaaagctacggcaacaccaacctttcagaaaagaaaggggcacagccatacaaacctgatggcggtggcgggcgacgcgctcaagacgaacataaggacgctgggcccgctggtgctgccgctgtcggagcagctgctgttcatggcgagttggcgacgctggtcgccaagaagctgctaaaaatgaagaaggtgaagccatacatcctggacttcaaactggcgttcgagcacttttgcatccacgccagtggtcgcgccgtgctggacgagctggagagcaacctggcgctcacggactggcacatggagccgtcacggatgatgcttcaccggttcgggaacacgtccagcagctcgctctggtacgagctggcctacaacgaggccaaggggaggatccggcgccgccaccgggtgtggtag

SEQ ID NO: 31326 - DNA, 222 bp, Zea mays
  Peptide Sequence Number=SeqID_74701
atggacttcatcaagtttgatgtcggcaacgtggtcatggtgaccggtgggaggaacaccgggcgtgtaggagtgatcaagaacagggagaagcacaagggtagcttcgagaccatccatgagcaatgggtcctgctggggtgcttgcttgaggaggagcagtttgtgtctgttgagtctgttgcccggaaccgccacgagcaggtgtactttgagtggtag

SEQ ID NO: 31327 - DNA, 510 bp, Zea mays
  Peptide Sequence Number=SeqID_74702
atgcgcaggggtagacgtgtgatgctcgtcttgacaagcgaggatatggcgcccacctcgcgcaatggctggtcggggtttgcgcaggggctatccgagggtgggacgaggttgctgctgtgcaggatgccaaccttgagggccactggctgctccgatcgtgggaggacgttcggcgatggtgactcggccacggtggccacgaccgaccaggctacgggcgcacggggcacacgaggcgcccatgctggcgtggctgggccacacccgctgccggggagaaaggggagaggggtggctgggctggctcggccaagccccggccatggcaagcggtcgctagaccgagcgcaaatgaggggagaggaagaggggacggagagaggaaggggaggggctcaccatgggcggatggagacaaacagcatgggcgacgcggcctccggcagacggcgtgataagcgcgacaaggcaccaatggcaagaggagggcgtggaggggaggcgtga

SEQ ID NO: 31328 - DNA, 390 bp, Zea mays
  Peptide Sequence Number=SeqID_74703
atggcgagagtagcgtgtaccatccttggcaagaggctggatggtggtgtatctgtgctctcggtgaggaagcagcaaacttttgttgcttttgctctaaggtggtgccaaaggaagaagctcaagattgaagcctcgagaggatgttgtcctccttttaaaaacactttactgttaagcgggaggggtttttgcctcccaggtggagttcatcacttccaaaagcagtttgcacatcttgaggagcatcatagtgagaaggagaaagaggttctacactgcaaagagagcatgcttctttaccaagtgtgtttgaataaggatcacctgaacgcgtgcagtccctggccctggctgttgagtgtcctggcgggcagcaagattttataa

SEQ ID NO: 31329 - DNA, 213 bp, Zea mays
  Peptide Sequence Number=SeqID_74704
atggcggggaagaggccacaaatccacagacagagaggggagaacgacgagaacgaagaagaagtagtggttgaagaagaagaagttgcaccaccaccacctgaagacccacctgccgggaactgcttttattttgatatttgtggagcagaacccgactctcctataacacaaggcaagcccggtgcatttgccacctccttgctattttaa

SEQ ID NO: 31330 - DNA, 375 bp, Zea mays
  Peptide Sequence Number=SeqID_74705
atgtcttctgtagatggctcgtatcaggtgcacttcaccacggtagcagatggccttgacctaaagtattaccctcgccgttcgactgacagtgctggaggtgtgattgtctcgccagttggtgagggtaatcccaggctgagcagcatggtcaacttggtcgccgtgctcaacacagagttggaccacgcccttgacgagttgggcaagatgtctgagaataggtgcagaagtgcgaggcgtgctcagcctgaacagcaggcaccccaagaggaagcagccccgcagcagcagttgccaccaccacttctgatgaccatagagcagatgttcttgatgcagacccaagcagtccaggcaattgttagaccttag

SEQ ID NO: 31331 - DNA, 474 bp, Zea mays
  Peptide Sequence Number=SeqID_74706
atggacaaggacaagaaaggtcgaggttcaccgcgtcgctccggcgacaagcggaagcgtgagccaagtcctcccttggaggacttcggtgactctaagtactcggaggaggagttttcctccgagtccgagggatcgccggtctatgcttcccccccggcattgtccgacgactcggacgactcccaggggatagctgccgaggtgtggatgtacatccggtccgtcgagcgcgtcgggctgaagggttcggatgagtcggaggtctcctcagacgaggagaactcttctgactcatctgaggaagggagcggcggcgacgatgaaggcgacaacagcggtggaggtggcggcggcgacgacgacaatgacgacggcgatggaggcagcggcggcggcaggggcgacgacgatggcaagggcggcagcggcagcagcagcagcaaggccagtggcaaagcgccactggcttaa

SEQ ID NO: 31332 - DNA, 213 bp, Zea mays
  Peptide Sequence Number=SeqID_74707
atggccaacgtgctacagaggatcccaaggctgctcataaccgtgagcacggctgatataccatttcctaacactctgcagaggtcgcacactttacccacaagtcgtgattcacattttgcctggggttctagcctccccattgatcactaccaaggtgacctagcagggtttcactgtgtagcctttacaaagttttcccagaggacatag

SEQ ID NO: 31333 - DNA, 105 bp, Zea mays
  Peptide Sequence Number=SeqID_74708
atgtcgttaatggggctcagtttatgtggctcgctctgccaaggtaaagaaggtgtcgaggcggatctccaggagttccagtacttcgacgagttcgaggattag

SEQ ID NO: 31334 - DNA, 138 bp, Zea mays
  Peptide Sequence Number=SeqID_74709
atgggtaaaaccctaagtacgcaagtactcagcaagacttacctgactaatgaaaagactctcaaggatatgctgaatataaacgccaggggtgttacagaaggggtatcagaagacaagaagttcatggacatataa

SEQ ID NO: 31335 - DNA, 1194 bp, Zea mays
  Peptide Sequence Number=SeqID_74710
atgcaggcggcatgcaactgcaccacggggatgcaccctttcgacttcaacgcacccagcatggaggcccaggcccacacatcatgcgagcggaagcgccggtcaaatcgtctgcaggctcatgtcccctcctggggcagcaggagagccctctcccacggcgtgaagatgacgcgcccgtgttccgttcctcgaacggctcacgcaacggctgccccgcgaaccactcgtcccatcacattaacttcgcggcagggcaggcgacacctttggcaggcgaagcgggcgacgcttcacctccgccatgatgaccgcatcaaaaaagggaccaggaaaggggatactccgaaagggatccttctctgcgaaggaagcgagccccgagccctcctactgatcaggggttcgaaggctggcccctcggaagggttcgacagccgcctcagagcactcgggctccgcgcccactactggtcagaggttcgaaggctggcccctcagaagggttcaaccgctgcctcaggccactcgggctccgcacccactactgatcaggggttcgaaggctggccccccgaagggttcgacagccgcctcagaacatgcagagcgagggatgactctgggtacgtccgatacatggccgaggctcgggctacgctcccgagaggctcaggggctgctctcgcaaaccctgctccggccaaaccattgacagtgtcaacataccagcccgagaacttggaacctgaccatgcacccgggctacgaccagtcaaggctccgtccacccaagggacgcgatctcgcctcgcccgagcccagcctcagacaggaacagcagacccaggcttcgcggagaagcaaccttggccagatcgcctcgccagccgactgtatcgcaggagcattcaatgcaaggatcgcctgacaccttatcctgacgcatgctcctcagtcgacaaggccgaagaaaacagcgccgcctgcactgctccgactgctgtgccacccgccagggtgaggctgacagcagccaagtccagcctcaggtgccataggaagctccgcctcgcccgaccccagggctcagactcgacctcgaccccgaaagacggtctctgcctcgcccgaccccagggctcggactccaccttgacctcggaagatggtctccgcctcgcccgaccctag

SEQ ID NO: 31336 - DNA, 1026 bp, Zea mays
  Peptide Sequence Number=SeqID_74711
atgcatcgcgcccttccgccttccgagcccccggatgggaggcgcccgtgttgtcttcgtctcgttgtgggaggagcgcaacctcgtggaggttggtaccttttagccatcgctcggcttcaaggattttcatcaggcagcccggctgcatcccctcaccaatggtcacccaagacggtgaccaccagtttgatggtggggagaagcaagccgggctgcggcctctgcctcgccctcagcttcaaggatcttcatcatccttgctggggcggagggcgagctaagccggagctctacctcccgtacgggccggcagaccacctcctccttcagcattcaggggagagggtgctcaccggcctagcggagggggtggacttcggcaacgtggggccaattggccgcaagcgtcgtcagctccagcatgcctggttcgctggctcagctggctctggcacaacttccggtgccacctcccaccgctgggcggagcgtggctatctgcccgccgtacgggcggttgttgcgtcgcgcgcaccgggggaccgtccaagacgttgtgcgctgctagggcggcgttcgtgttcttgggttgtcctacccttgctccggcatgacgcctccgtgcggaggtcggtgctcgcctgtccgggaggattcgagcggggatctgccggtgggcgggtggacaccaccgtcggagctgaggtggtggtagctagagaaggcctcatcgccgacgagatcgttggcgccatctgcgctccgggcctccagctctttggctttgatagcttgtccttgcccctcgagcggggacgtgggcgagggccttgtcgcagcagcatctgccctgaggtcatcgctgctgctgtttggccacccggagcgaaggtcgttgccgctgctgcaggagtgggcggcggtgagccacctggaagttgttgtcccgcaggccctccgatgtggggggttgttcgtacccgcgggagtggaaccggagttccgtttgtaatggcaccttga

SEQ ID NO: 31337 - DNA, 249 bp, Zea mays
  Peptide Sequence Number=SeqID_74712
atgtcgtgcgcgttcgacgactactatatcgagaattatggcgtcatcttggcgctggaggtgacgcagaggaggatcgacaatagtgaccagttcgtcatcctcgccaccgtcaggtcactcccgcttatgatattaatgttccaaatgtttgaccatttccagcatttgcgtaatgaggactctagggagaagcctcgtagtgagaccctgaccattcacctcggaagtgaatacgggtctagctaa

SEQ ID NO: 31338 - DNA, 159 bp, Zea mays
  Peptide Sequence Number=SeqID_74713
atggccgaggctcgtgcagtgatggcaggcggaggagagctcgccggagctaagggagggatgttggccagtgagggtgagcgcggagtgaggcttatgggtttcactgactggatcaagagatatggaggggtgaagttgggtttgtctcactgctga

SEQ ID NO: 31339 - DNA, 261 bp, Zea mays
  Peptide Sequence Number=SeqID_74714
atgagaaaggtactagaaaataatgaagagtggatgcaaatattttttctagtccacttaagtaataaagaacctaggaaaaataaaaggaaccctagtccagaacaaattcaagattgcaatctcgctgacgaagagtacgtgctcatccctgagcaaggagctatccacgaggaagaccaggagcaagctcccgagactgctatcgaggatctccccacagccccagcaattgaaggcaagccccggttatatgcataa

SEQ ID NO: 31340 - DNA, 357 bp, Zea mays
  Peptide Sequence Number=SeqID_74715
atggtgtccgcgtcttctccgatcgacggcgacacaacgcaatcaacgcggatgccgcaggcacggccgaagacgacgcccaccgtcaccaccctctgccggtccgcccactcctcaatcgctccaactcagctgcgattcttcgaccagatcagggctcaccgccttggcgtacaatgcctcactgaccccgactgccgtcgtgcagtgaccgcacttgtacccaccataaccggaatgggagaccacgtctcaggtcgcgtgaagggatatgtccactaccaggcagatcctctggtgcaggctcgggtgctggatccggggctatctcctgagcagctccttgctccggcatga

SEQ ID NO: 31341 - DNA, 411 bp, Zea mays
  Peptide Sequence Number=SeqID_74716
atggtgtccgcgtcttctccgatcgacggcgacacaacgcaatcaacgcgggatgcccgcaggcacggccgaagacggcgcccaccgtcaccaccctctgccggtccgcccactcctcaatcgctccaactcagctgcgattcttcgaccaggtttgcagaggtggatggatgggctgcctgcgaccctgttaccccatatagggatggcactgtcgatcgtggagcaacggactccgcaggcgccggcgcgagtccgccattcgcggcaaggttgtttatcccgcggctgacagcttgggcccgtagtacagcgagacacagcacacacggacccagcggaagcgatggcgtggggtggctgacctcgggggcccatccgtcagcgggatcgggtgtcctcaacatgtga

SEQ ID NO: 31342 - DNA, 393 bp, Zea mays
  Peptide Sequence Number=SeqID_74717
atgctggtagactacacaactttactcgatggaccaagtgtgttggttgaaggcccgacgcagcagggtgtcaagagcgtcatggaagtgacacccgcgagcggcgtcacgagtgatgggtctagtgatccacccctccggttctggctcctccgaaagctccatgtcgtggctcgaactgccagcagcgtcgtcatcgtttccgtcatggtctcctccagcagccgggatgccctatggtggtgcagggggcatctctggctgaggtgcaggggaaggcggcctcctaaactccacctcccgctgaggcaagggggaagagtcctgctgctcctgctcctgctcctgctcctgtcgtcggcgctcctgttcctcgtgcaggcgacaatgtag

SEQ ID NO: 31343 - DNA, 426 bp, Zea mays
  Peptide Sequence Number=SeqID_74718
atgggcaagaacaacaaacgcaagcgcgaggaggagtttggtgactcggagtactcagaggaggagttctcctctgagtccgaggggtctccggctcccatccccctgcgtgagtcgtctgacgactcagacgactcccaggggcttgcagcggaggtctggacgtacatccgggccgtcgagcgctccgggctcgagggctcggatgagtcggagtactcctcggatgaggaggactcggacggcggtggcgaggacgaggacaacgacgacgacgacgacgacggcgaaggcggtggcggcggtgacggtgacggcagcggcagaggcggcagcggcggcagcaaggacggtgacggcggcggcagcaggggcggcagcggcggtggcggcagcagcagaggcagcaccagggccagtggctaa

SEQ ID NO: 31344 - DNA, 1233 bp, Zea mays
  Peptide Sequence Number=SeqID_74719
atgaccgttaacaaggcccagggccaaacgattcctaatgttggtgtgtacttgttggaaccagtgttctctcatggccagctttatgttgctctatcaagggccacagctcgatcgaaagtgaagatacttgccattccagtcattgatgagaagaagaagaagaactgggtggaaaagaattcaacgataaatggcgcaacatacacaaagaatatcgtttataaggagcaacaggctgggccatcaatgatcgaggtgtttcattcacatttggaccttatctaccaagcacatcaggttcataatggttctgcttggattgcccccctagaattcagggaagctgtctcaaacctgatatttgttgttgctcggtatcctgatttacctgaactttgtgacctaaggcacatattcacagagagatatggaaattttgttgagcattttgttagccaggagttcattcggaaacttgacagtacagagttcactaatgaggaaaggttccaagtcatgcaaaattcagggctaagagctcagcgcctagagaatcaaggacgtccagtgagtcctcttagtggtaacactagcaaaaaggctccttacactaggctgaatgttgtaaacataaagaatcctactgagaaacaagcaaacaatggtttcttgcatgataaaccgcaacatttagctgatctaggatacccggtgcagaaaggacaaggagacccagagagggcacttactatgctgcctccttatgttgaaccaaagtctaacatacaacctgtgaatgatgatcctgaaaagcaaactccaagtggttacagaaagcccaacatccctggacaaactgatcacttggagaacaaaaatgtgcttcgacctgtttctgtcagaaggagaactgcaaagctgccagcgcctgttgatgcttatgttgaggtgcctaacaatgcgaaggtcacaacccaaacacccaaaagtcacagaagccactcaagcaggaggaatggttctaaagatgaccagaaccggaaatgtaatgggactgatgatgttgcagcacagaagcgtcaacaaacagactccactagccacttcagtacttcacagatcagcctctggactatagctaaagagccactattgttcaacatcacaattttactcaatacgatcatgggtaaagcatataacaccaccaacaacgacatcaagatgtga

SEQ ID NO: 31345 - DNA, 114 bp, Zea mays
  Peptide Sequence Number=SeqID_74720
atggcggtggaagaaaactttagttccatcatatgcagtgcagtgcaggtgcagccgccctcctcagtggatcgcgagaaaggatttggttctcgcagtggtccgcaagattag

SEQ ID NO: 31346 - DNA, 606 bp, Zea mays
  Peptide Sequence Number=SeqID_74721
atgcgagatcctcgcagtcgtatgcgcatgtctagatttgtgtctgccgcgtgtaaacaaccatgcccgcacccgcctccaccggatccgcgactgccctacaacatatctgcgcgctcatgcttgaccccctctaaatacacgcccagttgcatgaggataaaatcactcagagctgcacagaaacccttttccaaacctagctccatcaccataggcaatcctactgtcttcgatatacttgcaacccttaacaggttgttcgatgactatcgtgatgaagatttttatgggctaccgcggaagtacaatattgtcgctcgggtagaagttaaatttcctattgaaccacgttatcgagacaaccaacatttcattttgtctgacatcaacggatccaagatcaaggccatgacaagttcatatgagacggtcaaacacttcgatagtttgatcaatgaaaaacatgtttacaagatgcataatgtagagttcagcattaatttagacatagacataaacatttttgaattacaaatgtaccttcaactggaaggagatgatagtacaagcgtgacgcaaaaagcgaatgccaagtcagcgtga

SEQ ID NO: 31347 - DNA, 591 bp, Zea mays
  Peptide Sequence Number=SeqID_74722
atggagcaccgtcccgggctagaaaggttgctggagactacccatctagagcttgacgggaagctgttcgtcaacacgcagcaggcccctacctggcgcgccaactgtcggtcgagcgaggcggaggctcctccgaggtcgaggttgagtccgtcttccgaggtcgaggctgagtccgagccctggggtcgggtgaggcggagactgtcttccgaggctgaggctgtgttcgatccctggggtcgggcaaggcggataccgtcttccgaggccgaggctgtgtccgagccctggggtcgggtgaggcggagtccgtcttccgaggccgaggctgtgtccgagccctggggtcgggcgaggcggagtccgtcgtccagcgtcgaggttgagtccgagccctggggtcgagcgaggcggagcttcctatggcgcccgaggttggacttagttgctgtcagcctcactctgtcgagtggcacagcagtcggagcgatgcaggcggcgctgttttcttgtcaggtcggtcagtggagcggcgaagtgactgcggtcacttcagctctgtcgactgaagagcgcgcgtcaggataa

SEQ ID NO: 31348 - DNA, 147 bp, Zea mays
  Peptide Sequence Number=SeqID_74723
atggagagatcgacgttgcatctcttctatcttcgctttaagtccccaactccactcaagggacacgatctcgcctcgcccgagcccagcctcgagctaaggcagccgaccccggaggattcacgtctcgcccgagggcccccttaa

SEQ ID NO: 31349 - DNA, 603 bp, Zea mays
  Peptide Sequence Number=SeqID_74724
atgggcgcgattaaggtcaaggctcagtccactcaagggacacgatctcgcctcgcccgagcccagcctcgggcaaaggcagccgaccccggaggattcacgtctcgcctgagggcccccttaagcaacggacacaccttcggcttgcccgaggcccagtcttcgcagagaagcaaccttggccagatcgccacgccaaccgacccaactaagtccaacctcgggcgccataggaagctccgcctcgctcgaccccagggctcggactcaacctcgacgctggacgacggactccgcctcgcccgaccccagggctcggacacagcctcggcctcggaagatggactccgcctcacccgaccccagggctcggacacagcctcggcctcggaagacggtctccgccttgcccgaccccagggatcgaacatagcctcggcctcggaagacagtctccgcctcacccgaccccagggctcggactcagcctcgacctcggaagacggactcaacctcgacctcggaggagcctccgcctcgctcgacctagggctcggaccgaccgcgtcacaggggggccatcattaccctacccctagctag

SEQ ID NO: 31350 - DNA, 570 bp, Zea mays
  Peptide Sequence Number=SeqID_74725
atgaccgatgagagcctcgtgctcaacctcctacgtggtctgagtcctcgcttcgatcgcgtggcgcccatcctcacccgcatgaagccgtttcccacctttgcggaggccaagaacgacttgcttctcgaggagcttcgcctctccaccactgcaaccaccgctcccgccacggcgctctacggcgcacctcgggctaccccctccgactccgggaggttcctcttcacagcactccagccccaccgccctctggagctctgcgacaggcttctggctttgggggggctcgcggccacgatcacaagggcgaacgcagtggcggtggactgtcgggcagccgtggtggcttttcagcctcaacaaggtcttctaccgctctcggggtctccgacccagcccatgtgggggccctggactaatgggtgggacactcagtccctcaccagctccttctccatgatgacgttggccccacccacctcggtctctaactgggtggcggattctggcgcctccaaccacaccaacccggacgcagccaccccgggcgtgattgagagcacctag

SEQ ID NO: 31351 - DNA, 429 bp, Zea mays
  Peptide Sequence Number=SeqID_74726
atgggcgtgcctgacttctgcgcgcgctggcgcgcatttaatgcgtccgcaggtagccgttggcgccgaagtagccgttgccccgctgttacaccggacagtccggtgtacaccggacagtccggtgtacaccggacatgtccggtgaattatagcggagcagccgtcgcgaattcccgaggttgccaagttccagagccgcgtcctcttggagcaccggacactgtctggtgtacaccagacagtccggtgaattatagcgcgccggctctgaaaattcccgaggctgaggagtttgagttggagtcctctggtgcaccggacactgtccggtggcacaccggacagtccggtgcgccagaccagaggtgccttcggttgcccctttgctcttttgctgaacccaatacttggtcttttattggctaa

SEQ ID NO: 31352 - DNA, 2343 bp, Zea mays
  Peptide Sequence Number=SeqID_74727
atgacgactgttggaacaggcagggccggtcagagcagcggtcgagatttagttgaagagttcgtggcgtacggggtctggcccttggcgtacggctgggcgctgggcgaagtatgccctcgccagatgccctttcacggaggaagggtggtgcgaagtcctgccttcacactgaatttgcgaaaccgtgacccggccgcctttgtgcgtgatgcggagggcttggcggtgcggctcgtggggcgttacgtgccgaggacggaaggccagcgcagctttgacatccgcgggtcaaatgaacgtttgaacagggtcttcgaattaaatcaactgccgtacgacggttaccctggtcaagacgaagcggaccgccgtgggaagaagccggcggtggagactggaggcgaccctgcgctggtggccgccgcctcctcgaaaaagagaaaattagtgatggacaaggatcgccaaggcgcggcgcgaaaacgccaggcgactgtgagggttcacgaagcccggccgaaaaggcagcggggaacggcgaaggctgaggcctctggcggaggcaagccgccgctgccgacgaaggtgggcgcctccgcgcctggcaaggcgccggagacgacggtgggcgccggaggccccaagctgtcgaaggtggtgccgtctgtcagtggggtggcggaggctgcgaaggcggcccgatcgctgccgccgcctggcaaacgcgttgccgacttcggcaccgagattgatgtggaggattatcttggggggtcggacgagggcccgcttgctctagttgtgcctggcgcggcgatcgcgacggctgcgccagcgccgaaggcggggggagagacccttggcgccggaggcgaggtgtctgccctcgcgctggtcagagacgaggcgggcgtggcgacccgtcggctgaaaggagcgacggaggcgctgagtcgagcgacggaggcgctgagtcaggtggctgacttcaccagccgcactgcgtcgggggcccttacggcagcgttgtctgccgaggtcgagagacttcggacgcaacatgcggacgctgtccgtgagaagtcggcctccgacagcaagtgccgcaaactggcggagaaggtggccgcccttgagaaggagaaggctgacctccggcgccagctggcgggggagaggagggaggccaacgaagccatcgccaaagagcaggctgcgcaggcggaggccaggctggcgcgggcggaaggcaatattgccaaggagctcgccggagagctgcagcggcggcttactgcccaggagagccgcgtggagggggccgaggccgcgatgcgagcggaggccgaacggacgcgtacgcagctcatgacttcatatcgcgagctgggtgtgcggacgggtgacttcgaggtgccggagcgagaggccgggcttcgctgtctggaatgggtgcaggaggaactgcaggagctccccactgtcttggcggggttgatggcgttcacctccctggtcacctgcgaggcagcgatgaacgcgctctctcgcgaaggctgccggcactttgaggccctcgaccaggtggatgaggatttcgggcgtgatatctttgaggtcgaagaccccgtggtgaaggaatccgccggggccctctatgaccggatgtggggttcatacggtcgtgaggtggtccgggcgcgggccgaggctgcgagggctcaggcggagcgcggcgagcgggtggacgacttcggggcgctgaacagcgcgctgcctgagccggagacgacccctgcggaggccgcgactggagtcgccccgggaccgaccccggagactgcggaagatgcaccgggcgctcccgcatctgccgcggccggcgaagaccttcccccaaaggtggccgagggcgcgccagatgcccccgcagctgctgtgccgagcgctgaagatccagcagaggcagcggcggaggctcccgcagcggccgggccttcgcaggttcaagattttgggcctgcgcacgcaaccgctaccactgagtttttggcggcttcgaccgcggaagatggaaatgaatgtggtgggtctgtttctgagttttttgatgttactgactctgggagctcggttgagtggactgaggagtcgtcggaggaggacttggattattttgcggccttggacgtggctgcggcggaggctgcaccacatgctgcggacgcgccaggcgtgcccggtcctagcaccgggcaccgacgacgaagggcggttgcaaagcgtaggattagtgcggaggacggggctcggcttcgcgttagtagggctggccggtag

SEQ ID NO: 31353 - DNA, 451 bp, Zea mays
  Peptide Sequence Number=SeqID_74728
atggttggccggccacctcttctctcctccgacgagctcttcccccttctccctctctactacagggctacgctggccacgccccctacacccgcgcgcggcgcgaccccggggctggccctcatggccggagaccccacgccgccgccgaactcagccgggtctagtcccgccggcgccctgcccgcgtcgcccgtgcctcccccactcgtgccgctgttgagtctggtcgccccggccacgctggcgctcgtcccgcgcccccctacgccaccggcaccaacctcgcccgtgccgccgccaggtccggtcagcgctggcctcgccgacgtccgccccacgctggtctcccttcctctagacgcgtcccagacagtcgtgctcagccccgacgacgccctgccgctgcccccggtttttcccagtggcgccattggcacgaccgtctaca

SEQ ID NO: 31354 - DNA, 288 bp, Zea mays
  Peptide Sequence Number=SeqID_74729
atgaaaagaagggaaggtgttttttcgtcaaagactcaaaagcgcctcgttcaggagccgattgacgacttcgtccataatatcttcagccatctttttaatttcgtcgtctcctttcggctgagggcctgttgggggtcttcggcttccgaaggtaccttcggacttatatcaaagagggagaacctcaaaagatacgaaggttggcagtgccgaagctgtgaagcaggaaagcttcggcatgttcgcagaaaagggaaccgacttaaagatgaaaaggccatttag

SEQ ID NO: 31355 - DNA, 366 bp, Zea mays
  Peptide Sequence Number=SeqID_74730
atggaggcgtggaatggtggtccagcatgccccaaagattatccgcttgctggcaatgaagacgacggcaaaagaggtttaggaggtgatcaagtccatcaatgttggtttgaagcacgcacgcaagtctacgctgcagcagctccaaagggactggtagttgctctcgttccacgactttgtgctccgcctgggatgatgagctccctcgacctctatggcaagggcatcaccgagcagcatgcagttgaaaagctcatgtgtgtcgtcccgaggcagtacaagcatgtggtgattgcaatcagcaccttgctcggcacagcggacctcaattttagaggtgaccgacaatctgaaggcggttga

SEQ ID NO: 31356 - DNA, 360 bp, Zea mays
  Peptide Sequence Number=SeqID_74731
atggcgcaccggacagtctggtgcacaccggacatgtccggtgccccagccacgtcaccagtgccgttggaatctgaccgttggagttctgacttctgggcccgcctcgatgtccggtggcgcaccggacatgaactgttcagtgtccgaatgaacgactcaaatggagctattctttttattgaaaagcctaaacctagtgatgctttctcaataaaggagaggtacatacaaacgaagtggtcatgtgagcaacatgagcaaaagtctcatcataatcacacccatgttcctgttgttaaccacgggaaacaaaatgagccttataacgctcgaaagaaccatcagagcaggtcttaa

SEQ ID NO: 31357 - DNA, 1317 bp, Zea mays
  Peptide Sequence Number=SeqID_74732
atggacagaaaagataagaggatcaaccaaagatgcagaggaaacatcagacgaaggccgatgatagaaaggacgagtctcattaaagaaaacatcccgagaaatccgcatccgatgaaccactgtatcccaacaatgatagcccttatgctcaacgcggtacccaaggaagacgccctcagtggactgtgcagtcaacttagcgctcaaaaggaatgccaccctgaagagaagaaggctgatattagtcaactaggtggaagtagagatagcctcagcccaaaagtgaggtatgtggacaaactgctttttgccagagatcccgatcagaataccattaatattttggaagccataaggaaaaatgatgtgagagcagcatatcgaattcttgcaatagctgaagtcagtgctaacatgacatatgatgctttgagcaaagatgtccatcatgttcagccagtgacagacaagatgttacttgatccgatttcttgtgagataattcaggactctggaaaaccagaaggctgtctacaaggttgttctttattgcactttgcatgcgaatacggttatcctataatggtggagcttcttctactttttggcgcggatattaatatgcaggatttccatggccgaacaccattgcatcattgtgtccaaaagaaaaatgatgagctcaccaagcatctgctgaagaggggtgcgagaacgacaattaaagatggcggaggtctgactgctctggagagaagaatggaacttggagcgataactgatgaagacttattcatactatttgtgagctcaagattgccatttttctatgaatttaaagtggacagcatctcacaaggttatcatgtgcaggcaatcacagtattcgattctttgagtatggttattgagacccaatgtcaatggtctgatggtcgagaaaaatgtggcgtcagacgggacgagtacactattcaccaagagggtctcattgtcagtaagacagttttgatcatttgctctgtttgtagttatgaggttaaacaactaacaaatgtgaccttcataggcgttgtaatccatttattagctcttagatgcttctcattaagaagtcatttgaacttggccgtattgttcctgctaattgtgatccttggtgttactgatgaagccaaagagctggacaaagagttgcggcagataaccatgaagaaaaatcaagttgtacgcatacaagattttaattttatattcactgaagatgtcaacaaacaaaatagacaagcagtcgcattgcttgccatgtgctaa

SEQ ID NO: 31358 - DNA, 624 bp, Zea mays
  Peptide Sequence Number=SeqID_74733
atgttgtcatatggtaatgtagcagcagagagtaacagatccacaagttctgttgattctttgtctattgaagataacaagagttcagagggacatgatgatatattcaaccttctgaggaatatccctggaaatgacagttgtgcagaatgtcgttcccctgatcctgattgggcatctctaaacttgggtattctgatttgcattgagtgctctggggctcataggaatcttggagtgcacatttcaaaggttcgatccttgagactagatgtgaaagtctgggagccagtaattatggatctcttccatgcactaggaaatgattacgctaattccatttgggaagccctgcttccaaaagaagatcaagggaggggttcctgggtgtcatgtcatccttctctcttccatggttccacctgcaaagaaaatgaattccatgggctctctattattgataaatataatagtgttggtgctaccttccctgaaataccaattgctgaaattccgatggcggcaacacaaattcaccacatcgctccttcggaggtgatggcagagctgctccttgcatctaggcctgaagatgaagcaggcccaagcaggagtgccgtctaa

SEQ ID NO: 31359 - DNA, 405 bp, Zea mays
  Peptide Sequence Number=SeqID_74734
atgaacgagatatatccggcttatagccgtttccccgtcgcacgaaggctccacgtctcttcaagtgcttgtgcaagcaccgatgagatggcctgtactatggctgaacaggtgagctcgaagccttgcttgaagcagcctggtcctacgccgaaggggcaggagattttgatgtccccacagcgtgaggggcagtgtgacagggaagcactagaaggaataccatacaactcaaataatacatcatcccaacaatttgtgaatcaaacaaacttcaacttaaaatatggagcgttgcacttggatctgacggctgatatggcgtaccgcttcatcgcgctaggattgaatccagaccgcaggatctggatcgttcggcccacaatagagcccctagagttttaa

SEQ ID NO: 31360 - DNA, 213 bp, Zea mays
  Peptide Sequence Number=SeqID_74735
atggcgctccacaagctctatgacgacggcggccccccagctctcttacggaagcaggacgacgtcagcagggactcgaccgctccaacagctgtccctccgccaggctccgccgcacctccgacagccacgacatcacgccagcagggtgcccagatctctccggctgccacattggcattttttcccccagttgctgagccccgaccataa

SEQ ID NO: 31361 - DNA, 621 bp, Zea mays
  Peptide Sequence Number=SeqID_74736
atggacgttgtagtgatcacaccgtcacgagagctgagcaaactacaacctgcaagagctacacatggcatgcttgaccacatcatggtggagaatgcaagtgttaaagttgcattgaatcgcattgccgttgtttctatcctggatgcacataccctgcgtccacacccccatggtgcacgttatgtcgcgcccccgcatccgcctgcggtcgcacgccgccccgcatcccgccggcagcaaccatctttgctgactgatggctgcaaatatttcttcacgttgtctgtaacccttggtatcatgtttgcctatttgctcggcttgtttgttccttggaggcttcttgcagtaataggaaccttgctctgcatagtgttgatatctggccttttcttcattccggaatctccaagatggctgcatggactccttccagaccgccaacaacctcgtccgcacccaggcatcagcaagacaacacaacagttggatggaatctatgcactctttgcagtattgaggcttgctgttgttgatacaaaagcagatggtgccattctgaaggagaaactgtggacattgattgctcaaaatgaaccctcgttaatctctttatag

SEQ ID NO: 31362 - DNA, 288 bp, Zea mays
  Peptide Sequence Number=SeqID_74737
atggctgctttatcaatggaggacatgatagattggatgcatggtggaggcagagtgggtaattattttatatgcgctaggctcaatattttgaaaacatccatttcatctaggtcatcagatataatggcgaagaaggatgagaaaaagcaaaaggcagagagcaatatactacttgaatctatcgagaatatggaatatgttgttacaatagatgtgcttcatgaggtcttttcaacttttggatttgtacagaagattgctatttttgagaagaatgacttttaa

SEQ ID NO: 31363 - DNA, 510 bp, Zea mays
  Peptide Sequence Number=SeqID_74738
atggatgtgtcggggaccacaattaggggtacccccaagactcctaaactcggctggtcaaagctccgcccactcaagggacacgatctcgccttgcccgagcccaacctcgggcaagaacaacagacccaggaaaacaacgccgcctgccctgctccgactgctgtgccacccgccagggtgaggctgacagcagccaagtctagcctcaggcgccataggaagctccgcctcgcccgaccccagggctcggactcaacctcgacctcggaagacggtctccgcctcgcccgaccccagggctcgaactcaacctcaacaccgaaagacggtctccgcctcgcccgaccccagggctcggactcaacctcgacctcagaagacggtctccgcctcgcccgaccccagggctcggactcagcctcgacctcggagggagtcaccgcctcgcccgaccttgggctcggaccgaccacgtcacaaggggatacatcattaccctacccctag

SEQ ID NO: 31364 - DNA, 444 bp, Zea mays
  Peptide Sequence Number=SeqID_74739
atggacctgggcagacctattgacgtagggtctagagaagggataaacccagtcaagctttctcaaagtacggagaggctgcttaaacccgtgacctggggatcacttgatgaggcatatgcaggggatctatcatttgcagattctctgcaagcatttggtgctggtctggatgatcctattagtgttgccattggagggcccgtgatgtccaagtttactactgctttcagggagcttgggacatacaaggaactccttcgttctcagtctgagttttcatttttgaactcaacacaagggcttgctcctcttgagcacatgcttagtgatcgcctgtcacagttcattaacgtggatttaaatggtgtgaaggtgggcctgctgagggcaggccaatattcttcaccatacaacatagtaggtataattgccgtcctataa

SEQ ID NO: 31365 - DNA, 162 bp, Zea mays
  Peptide Sequence Number=SeqID_74740
atgacgcatttcctcagcggcctcatcaatcttcttctgaagatcggcaagatgaagcatcttctccttcttcctctggacctgttgatgaatggcttcgaggtcactcgaaacttgaaaaaccgtgcatgcaaaaatgatattgaaagggaaataggctaa

SEQ ID NO: 31366 - DNA, 459 bp, Zea mays
  Peptide Sequence Number=SeqID_74741
atggaccttacgctggccggggacaaaatctctttcaatgttcctggctgcctgttgatctccatatatggtgattgcgccttgggggcctcagattttcatgcacatgtagagcccgtgtattgctgcctcaaaattattgatggatcctcgccccatgatggcattgtagggatagacaatgttgactatgtcgaagaaaccatgcaagaaaatgatgtctgcctgactgccattgtcgacaagtactttgtgcagatcccatcctgctacccagcagttgagaaccatgacgtcggcatggggcacgctacggaggtcgatgtctcttgcattgaaggtgtgggtgacaactctttggttgtcagccagttggttcctggccattctgtcttttgtggccttggtttagggcagtccctagtgggatgtgtcgagtcttcgcaatggaaaaggtaa

SEQ ID NO: 31367 - DNA, 741 bp, Zea mays
  Peptide Sequence Number=SeqID_74742
atggaagaaacacacctccacgtgttcgacgccttctgcccgcgccagagcacgctcgcgcgcgcccccgcatgcccagcgccgcgcccgagccaagccagcgccatggcccgcgcccgcgcttataaaaccctcccagacttagattgtacccttccgcgcaccctcaaacctcaccggagtctagctcgtcgccgtttgcccgtgcgcagcgtgtccgcggccgcccaatccctctgtcaccgtagaccggccagtggagccattcccaaccccgtccagccctcggagaagactgtgcacacctccgtgaagctccccgagcgaggaatcggagtttgcttcgccggagaggtcagtccacgctcgccggagctctcaaccccgccggagtacgtggaccgggtaatccactcaaccatccttcgattccttgtgcacatggtcgctatgttaccccgtgaagctcaccatgccctcggattgaaccagttcgccgtggtttggccggtatactcgccgccgatgagaacacccgcctgcacgcgtggaccgggcgattccggccatccccgacgtcaagtcgtacctcgacgtgaccgcgagagtctccccgagccaaccccacccttcaccggacctccctcgccgccggaggtagccccagatccagcacccgagcctgcacgagaggacctgcctgccactgctttggaaggcaagccccggttttatgcataa

SEQ ID NO: 31368 - DNA, 882 bp, Zea mays
  Peptide Sequence Number=SeqID_74743
atgggccagatcacaccggctgcagcgaaggcctcgagcgaagggtggcgtctttgccttcgccccaacacggacatcgggatcaaggacgccaccaccaaggcggtggggttggcagcgtccgttcgtgctctcgtctccaccatgattgggcttggggtttcccctgccaccctattcatggaacctagaggatttgggttcatccaatactttgatcctgaggatgcttctgatgcaaagtaccatatggatgggaagatgctgcttggaagggaaattgctgttgtttttgcagaggaaaacaggaagaagccttctgacatgagggccagggaaaaaataagtggcagaggtcgttcttatgatgggaggttgcgctcaaggtcacctgggttgaacgattatcctaggggtagatcacggtcccaaaggcgaagctactcgccagcacttaagcgaaagcactattcaaggcagggggctgaggggccgcacgcagggggcgccggggagccggccgcgcagggggcagagggggccatgggtaggggcactggggagtcggccgcgcgtaggggcgccatggagacacgccaccggggccggggggccgcacgccgtgccaaggaggcagggcggggccacgcgccgcgcggggaagccggggcgggactgcgccgccgcgccagggaggcgcgcagggacgcgcgcgagggggggctgggggaccacgccgccgggaggccggggagccgcgcgcaagggctccaggggcacgcacacacagggaagaggaagggggcgcgtgcagggaagggaaggggaggaagagagagggagaggggaggggagctcacgtcggggatccaaatccggtga

SEQ ID NO: 31369 - DNA, 516 bp, Zea mays
  Peptide Sequence Number=SeqID_74744
atggccttgctctccacaatggaaacatgctctgcttccgccttgaactggggctgcttgactgctctgattattccggacaggagaagctttttggaaaaacaggccaagcgcggaccgtccgggcccctgcagcggaccgtccgtgacagaagaatgaccctcggacagaaccaatgcaaaaacacaagtttccactacagactgtccggaggaaaagcgaagaccgtccgagccctcgagcggaccgtccggcctcaggcgcggaccgtccggtcgccgttgatctacaggggcggaccgtccgcaccaggagggcggaccgtccgtgctcagcagaatggcccaacggctaggaagtggttggtggctataaatacaaccccaaccacctccattgataacatccaagcattccaaccttcaacattcaatacaagagctagcaacccattccaagacacattcaaagccatcatctctccaagtttcacaattgagaaaagagatcattag

SEQ ID NO: 31370 - DNA, 1326 bp, Zea mays
  Peptide Sequence Number=SeqID_74745
aggaactggggtgtagttcgcttcgccgtcgtgccgtcaatggggctcggtgtatacggctcgctctgccaaggtggtgatgaggatgatggttatgattatgcttatgtaatggccgctggccctctattctccgtcgtgtcgctgttcgccgaccacgctgtccgccgttcgccggagctgcgccgcgccaccacgttgtgctcagccgtcgtccgctgtcaagctccgtgcctgctcgccttccctgctcgcctcgacgccgtcagccgtacctccatccacctccacgcaacaagtaacagcaaggtgaacacgattgaatctgggtttgggaagcttggggccttacgggcggcggtgcggctgctgtctggtgttgtttcaagccgagcagctagcagcagccggtcgccggcaagcaagcagccaggcgcgcagcggcccaggcaacgcagccgccagccgagcaggagcagcgcgcgcccgagcagcaagcaggagcggcacgccggcaagcaagcagctgcagcgcgcgcgcccgagcagcgagcggccgagcgagcaagctgcaagcagcaggccgccgactggctgggcaagcaagcaaccaaggaggcaatcaggcaagcaattaagcaaagcaagagcggccagcaagcagcgattcgagtcgcgcaacaagcaagcagaccagcgcaggcgcagcaagcagcaagcagccatttggagagcctacaccaccgcctgcacgaggagcaggagcgtcggcgacaggagttggagcagtcgagctcttcttcctcgcttcagcgggaggtagagtctgtgaggagctactctcttatgcccccgctggaggcaccccctgcaccaccactgggcgtcctggccactggagtagctgttggaggagaccccgacgacggaggcgacgacagcagatcgagccacagcaccaacctttcagaggagcaggagccggagggatgggttgctcgacccatcactcgtgacgccgctcgcgggtgtcacttccacgatgcgctcgacaccttgctacgccaggcacttgaccggcatacctgcacccgtaccgctcacctcagcgtggacaccatgcttatgatgtcagacaacaggcgcagaggaggaaggcgtgctcagcaggagcaggcaacaccgcaagatgaggcaccccagcagcagctgccacccctgcccccgatgacgatagagcagatgttcttgatgcagactcaggcagttcaagccattggtcagactctggccgctatgcagcagcagcatcagcccccacgttag

SEQ ID NO: 31371 - DNA, 483 bp, Zea mays
  Peptide Sequence Number=SeqID_74746
atgggcaagagtaacaaacgcaagcgcgagccgactcctccgtcggaggactttggtgactcggaatactcggaggaggagttctcctccgagtccgaggggtctccggctcccgtctctcccccggcgtcgtctgatgattcagacgactcccaggggattgccacggaagtctggacgtacatccgggccgtcgagcgctccgggcttgagggctcggatgagtcggagtactcctcggatgaggaggactcggacggcggcgaggacgaggacgacgacgacggcgacgacgacggcggtggcgacggcgacggtgacggcagcggcaacggcgggggcagcggcggcgacgacgagagcaagggcagcaccagaggcagcagcagcaagggcagcaccagggtcggcggcggtggcagcagcagcaagggcagcaccagggtcggcggcggtggcagcatcagcaatgccagtggctaa

SEQ ID NO: 31372 - DNA, 720 bp, Zea mays
  Peptide Sequence Number=SeqID_74747
atggacctcttcaatgaagtcagcgtccagcagcttctggacctccttacggatgaagtcctgccgctcaacggattgtgtccgaggcttctaactcatcggtttggcatcagggtggatcttcagatggtgctcgatcacctccctagggatcctaggcatctgcgacggttcccatgcgaatacgtcggcatttgcctggaggaaggcgatgagcgtgatttcctatttctcctccaaatcacccacgatgcgagtggtctgggaggaatccgtgctgagctggagggtcttgatggggacgccgtctgccccagatggttgcaccttaggcaccttggcaggcgtcttggtacaggaaatcgaggggtccctccccccgtcatccgagcgagcagcttctgccaccagggcgtgcaacttctcgacagctgcaagtgcagtggggcggtcgccccgcatggtgaggaccccaacaggggacgacatcttgaggaccaaatacccataatgggcaatggccatgagtcggtacagggtcatcctgccaatgatagcattgaaagggaggttaagctccgcaacatcgaactggacgttctcagtgcggaagttttcctcagtcccgaatgtaaccgggagtgtgatgctcccaaggggatacaccggttgtgggcccactgcggagaacgggcgaaagggtcccagtcaggatcctag

SEQ ID NO: 31373 - DNA, 477 bp, Zea mays
  Peptide Sequence Number=SeqID_74748
atgcaggcggcatgcaaccgtgccaagtgggcacgccccctcgactccaacacgcccagcacggagatccaggcccacgcgtcatgcaaccggcatgccggttgctacgtgcgagcaactgcaccgccactcgcgccactaccgcgcctcctcgactgcggagtcaataccgcgactcgaggcaaccctgcagtgccagccaagcgcgacaatcaaatgcggacaggcggcgcctcaggcgggagaagcaagcgacgcttcgccttcgccataataaccgcgtcgaaaaaaaggctccgagcctccctactgatcagaggttcgaaggctggcccctcggaggggttcaacgaccgcctcagatcgattgtgttctacgcccactactggctgaccctcaagggtcatagtcgcctcagacacagagcgaggatgacctggtacatcgatacatacagctcgggctacgctcccgag

SEQ ID NO: 31374 - DNA, 468 bp, Zea mays
  Peptide Sequence Number=SeqID_74749
atggtccagatcgtcgagcaccatgacttcgatcccaaagacttcctgatggaggaagaagctgcctcttccacgccacgggcctccacctgccctgcgcctagtgctgctgatgtgcgctctgcgcggcagcacactcctgcgcaggcgtccaaagcgtcaagggctacgcctggggccttgtctgcagccagggaattgttgtgccaccctcctagctccacggcctcgccaggggccatgaagcagtggcgtgacgatgtcgaccgcctgctcggcatggcgcgttctggctcagccaggcccaggcctcggtcatcccgacgtcagcatgaggcgtcagcgtcagtgcgctcaccctcagtgagggctgcaccgactgaggacctacgggcggagctcaaccgcaggcgtgcgggagaggacgctccagtctctctagagaggcctgatgacctgcgggcataa

SEQ ID NO: 31375 - DNA, 465 bp, Zea mays
  Peptide Sequence Number=SeqID_74750
atggagactgtcaccacactcttcgctctggtcaacaagtgcgccaaaaccgccgagggccatgcatggcactcagcgccactgaccggggctgcccagatgggtggctcgggtgccgtcactaaggacggcaaaaagaagaaaaagaaccacggccacgagaagccgttgtctgccgttctggtcgtagcagttgcggctgggggccggagcgagcgcaacaagcgcccacggcctcgccacagtgctgcagagtgtcacgagatcatcaagctcatgaagcgcgtcagcgagcgacgcgagcagacctccagggatggctcccctcctcgccgccgacctggcaaggaaagggtcgacagcggtgaggtggccgcgggagaaccggacctcgggtatcagtcacccgagggggtcttgaaggatgttttcaccggagactccgactctggtgacaataactag

SEQ ID NO: 31376 - DNA, 1284 bp, Zea mays
  Peptide Sequence Number=SeqID_74751
atgcctcgcgaccagatggtgaccaatggttttggagcaaaaagggataatgcaggggcaaaaaaatctccccagcaaattcagaggctggagaagttttactctgatgtacagtatccaaagccagaggaaatgggtgagtatgcaacctgtgttggtttgacttacagtcaggtccgtatatggttcaaagagcgaaggagaaaagagaggaggatggagatgggagccattgggtctcagatggaaaggcaatttagtgcacgttccagtggacctagatgcagcagcagttcttcgttttgtaaccaagctcccatctatgacatttcacgttcagagtcggacacctggggtatgagcacggcaggagaggaaagtaaaattctatcacaagttctgtttcccaaggattatatcctgagcaaaattttccgcaaggatggtccacctcttggtagtgaattcgaccccctcccccaaagtgcacatggctgtatcagagacactacatgccatcattcctctgagaaccaaagaactgtgaagaagagaaagatcatagagtcaactaaccagagatctgatgtgtatgagaatactgctcctgtgaggaaacatggaattggcaaaggtctaatgacagtgtggcatgccatgtattcccataacgtgaaatgtcaaagcggtcgaaatttcattgatgaaactggttgcttgaggtctcttagaccgtttgacgattttgatggattagaagatcgcgataatggaaggaagactcaagtaaagtctcatttgtttgataaatttgaatcaaggtatgacacggaaaaatatagtcaaaggagtaaagttctggtgccgtgtaagagagttactggtccaaaggtgcatcctccaatggcttgccatctttcagttgatgaatcagaatctttagaactacagactgaactagtgactttagtggatgatgaggagctcgagctcagtgaattacaaacagatttacttgccaagtttcctccacaaagtttgaagatgaaaaagctattctctacaaaaccttgggagtcatcacctgaaatggtgaaaaagctttttcagcagacacgaatgaatagtgcactggccttagcgtggcctgggctgctcaacgccatgtgccctaatgtgccatggcgctcttcaggtctccttctgaagcatctggatgaagttgacaacaagaatgatttaccctgggtgcatctcatctggaacccctactacacaaattga

SEQ ID NO: 31377 - DNA, 132 bp, Zea mays
  Peptide Sequence Number=SeqID_74752
atgggcgttgccgcgttgtggggtcatgtgcatagacctgatccaatgctctatgacaagtcagaatggctacctaccaggtcaggggacaaagagtctggtgtgcatcggaccatgcgcacgcagacataa

SEQ ID NO: 31378 - DNA, 873 bp, Zea mays
  Peptide Sequence Number=SeqID_74753
atggcggctccggacccgcccatgtggtggagtcgggcgctgctgtggacccagagagttcgggctccagcttcagcaccttacgccccactccatccttcaagtggccatcttcatccacttccgtggggtggcccctgcacctccctcttccgccatttcttcgtgttggtgaagtctgggaaggctaaggaccacctcggcgcctactacttccagacgaggtcgaattcggctgacgcctacatctcctccctcggcggcgcgaggtgggaaaacttgcgcgccgacttggtgatcgtcagcaccgaggccaacgaccgcctcgcgctaccgagcgacggaccaacactcgaccggaagcaatggagggccaagccgtccctcgcgctagagttcctgcccatgttggacaggatcaaggccttggcagccggtggcctgacctcgatgcatgtggtcggcgatttcctgaagctccggggcatcccggcgctgtgtgatgatccggggctgagaacgacgatcctggccacgctgccgactctcgacgagagcggcgtggaagttcgacagaccagtggtcgggacccccttcgtgggatccagatccctagtgtaccagttgggggtccccagcccgccggtgcgggctccagagctcccaccgtggcccctagccctttggacaaaggtaaaggggctgcaagtagctcctccgccccgggtggcaccggggggtcggaggaagagaggcgatgccggctgcgtcgcgccgatgggtcgcttgtctcggaccccccttgtttcggacccatccagaagcgccagaggactgctggcggggccgaggaggctggctcccaggcctag

SEQ ID NO: 31379 - DNA, 648 bp, Zea mays
  Peptide Sequence Number=SeqID_74754
atgcccgccggcgggtctggctctcagcagcaggcatctgctgggagcggtgttggcgaaccgccaacgactaccgcagcctcaacgacggcgacaccgtcgagtacaccgtcggcagcagcggaggaggtcccatctgcgcccactcctaccgtcgcgggtgacatggggggcgcgtccagctccatctcgccgcccatttcggaggagatggagaagttcacctttgagcggtccgaactcatgcgggaccgtaaagattacaagaaggacctccagagggtgtacgcttgggagttggaggcaagtcggaaggagaagaggttggccaaaagggaggaggccttgaaccagagggaggatgtcatcacagagctgagtgccaagctgaaagccatgaacaaaatcctagaagagcagcggacccagcagaccgcagctgtggagagcctgcagaagctgcagcaagagctcaacgacaaggccagcactgccgccctcgtcgaggagaaacttaaagcgaaggagcaattcttggagaggcgggagacagacctcgccaggcgagagaaggatctcgctttccgggaagagatgctgactcggcgaggcgagatgctggccgaacatgagctcgaggcagagtag

SEQ ID NO: 31380 - DNA, 1116 bp, Zea mays
  Peptide Sequence Number=SeqID_74755
atggcaagcccacatatattgattggagaattaatcctgacagattatccggactcctcgttgttgggggaagtacatgttggtcttctcaagctactgttgttaaaggctgaaataggaagtgatggtgtatttgttccacgatcttctaaagactgcagatttctcagtttcctgaactttgttagggaacaagaattcgatgccaatgtttggatcagatcgttgaatgctcttacatgggttgagatacttcgtcaagtccttgttgcttcaggctttgggccaaaacagcatttgctgaatcaagaattctttaacaaggagaaaaatcaaatggctaaatatggtttacgtccccgcacactgaaaggagaattgtttgcactgttgtctaaggcaggaagttgtgggttaaaggtttcagtactagccaaatcatctgagattattgatcttaatgtttcgagcccattagaactagagcagttgatatctttagctctctccagtgacatcacattatttgagaagattgcaccttctgcatatcgtctccgtgttgacccccaaattaaaggggaagaagattctatgtcagatagtgatgattctggaagtgttgatgaggatgaggatgctagccgaagtgatgatggatctgatggttcccaaaagttaaaatttcttgagaatgaaagcagacttgctcgaaggaaggagaaaaatgcacatggaagtccaaataaatgtagtgaaattgatgaaagttattcaggtgaaaaatggcttttggcattgatggaaggcgagtattcagatctaagcattgatgagaagttggattgtttggttgctttaatagatgttgtttctggtgctggttctgttccaagacttgagtctaacaccctcgtagtcgaaactctagccacgatagatgttcagaccggtccaaaactccgcgagcaccaaggacaaaagatttttggtgaagctgtccgcaaattgcgagctcgtcgggatgtggagaacacggatgtccccgacaacaatgcgctcacggatgaagtgaagattgaactcaacatgctttctgtgctggtgctagactga

SEQ ID NO: 31381 - DNA, 324 bp, Zea mays
  Peptide Sequence Number=SeqID_74756
atgggcatgcctgacctctgcgtgcactggcgtgcatttaatgtgctgcaggtagccgttggcgccttgcagcgtagcagccgatgcgaattcccgaggctgccgagttcagagccgcgccttcttggagcaccggacactgtccggtgtacaccggacagtccggtgaattatagcgcgccggctgtgagaattcccgaaggtgagaagttcagtttggagtttcctggtgcaccggacactgtccggtggcacaccggacagtccggtgcgcccgaccagtcggttgtccctaggctcctttgtttgaacccgttctcttga

SEQ ID NO: 31382 - DNA, 558 bp, Zea mays
  Peptide Sequence Number=SeqID_74757
atggatcctaagggtgcaaaaggttcaacacaaaccaatcaaaagaacaagttaggtctcaagagaaaggagcaagaaggaaaccggaggctgccctggtctggcgcaccggacagtgtccggtgcaccagggtgcttcagctcgaactcttcaccttcgggtttcccaggcgccgctctgctataattcaccggacatgtccggtgcacaccggactgtccggtgtaccagcgaagcaacgactatctgcgcacaacggtcgactctgcaaagtgaatagtgcaaatcagatgtcagagcagacggttagaggggcaccggactgtctggtgccacatgaggacaaagcctccaacggtcgaccagctccaagacctaacgggaggatgacatggcggcgcaccgaacaatgtccggtggcgcaccggactgtccggtgcgcccttcgccagcagacttcaccaacggctagattttggttggtggctataaataccaccccaaccggccacttcaaggtgtgggagtccaagcaacattccaagtcatctagttga

SEQ ID NO: 31383 - DNA, 429 bp, Zea mays
  Peptide Sequence Number=SeqID_74758
atgactaagttcacaggatgcgaagagaattggaccaaggcaatgaggatgcaacacctcaaaagaagacataaaaagatgcataggagtccaatactcaagaacaaaagaagcccgaagaaatcagcgaagaaatccaagaagtgggctgtcagccaagcgcctggtggcgcaccggacattgatgtccggtgtgcaccggactgtccggttaagaaaaatagaaaatgtgatttaaataatgaaccagagggcacccttatttttgttaggatacttattcaagactgtaatcttgctgacggagagtacatcctcgtgccggagcaaggagctgctcaggaggtagccccagatccagcaccagagcctgcaccagaggacctgcctgccactgctttggaaggcaagccccggttttatgcataa

SEQ ID NO: 31384 - DNA, 648 bp, Zea mays
  Peptide Sequence Number=SeqID_74759
atggcgcgagcacttgtgttgtgtttttacagtggggggggtggggggggggggggggtcgggtcactgcttttgtaccaccaccttgcatttgccagtggaatatttagctacctttgcaacgtcatagtaggccgtagacgtgaagcctttttacaccagtgggctttggtgcgagactccttttcccccccctgcaggtcaaccgtgaagaaggaggtgacacagacggtggtggtgaagccagggtggaggaaagggaagcaggtggtgctggaaggcatgggggacgagcggccggggtgcctgcccggcgacgccatcctcacggtgtccgagaagaggcacccggcgttcaagcgggtgggcgacgacctggtgctcaaggcggaggtgccgctggtgggcgcgctcaccggctggtccttctcgttccgcctcctcggcggcaggaaggtgagctgctcgttccaggacgaggtcgtccgccccggctacgagaaggtgatcgccggcgagggcatgccggtccccgggcagaagggcgcgcgcggcgacctgagggtcaagttggacgtcgtcttccccaaggagctcacccccgagcagcgcgccggcctcgccgagatcctcagagggtcctgctga

SEQ ID NO: 31385 - DNA, 1653 bp, Zea mays
  Peptide Sequence Number=SeqID_74760
atgtcaccgcccaggcccagctgcatgcagttgcagccgtgtttgccgtttagcaactgcaactcgtcgtcgtacaactacggacagacgtacgcgcttgttgcgttcgtccacgacaagggcatgaagggcgcgctcgacgatttcaaagtgatgctcacgaggaacgagcccatcaccggcctcgccaaggtggtggcggtcctcgtgatcttcgcgctcggcgtcgtcgccggcctgtgggtgtctgccggggtccgccggtcccagcaggaaagcgtcgacccgaggagcaccgggttccatggcggcggcggcggcggcatctgctgccggcccgagcccaaccccgacttcgaagagttcgtggccccgacgcgcctcatgcacgacatgacggacagggagctgttctggcgcgccacgctggtgcctacggccgccgccaggtacccgttcgagcgcgtgcccaaggtggccttcatgttcctggccggccgcggcgtcctgccgctggcgccgctctgggagcgcttcttccgcggcgctgggcacgaggagcgcttctccgtctacgtccacgcgccgcccggggtggcgatcaacgtgtccgcggactcgccgttctacggcaggcagatccccagccagaaaacgtcgtggggctccgtgacgctggtggacgccgagaggcggcttctagcgaacgcgctgctggacttctcgaacgagcggttcgtcctcctctccgagagctgcataccggtgcacaacttcacgacggtgtacgactacctcgtggggtcgcgccacagcttcgtggaggcctactaccgggacgacagggggtgccggagccggtacagccggcgcatggcgccggacatcacgctgcgggagtggcggaaggggtcccagtggctggagctcagccgcgacctcgccgcgagcgtgctggcggacaccaggtactacccgctgttccggcggcactgcacgccgtcgtgctaccccgacgagcactacgtgcagacgtacgtgagcctgcggcacggcgcgcgcaactcgaaccgcaccgtcacgcgcgtggagtggcccgcggggacctcccacccggtgacgtacggcgcgggggacgccacgccggagctggtccggagcatccggaccagcgcggagccctgcgcgtacaactcgcgactgacgtccacctgctacctgttcgcgcggaagttctcgcccgacgcgctggcgccgctgctcaacatgcaggccgaggcagcagagcccactcgcaccaagttgctttgcagcctagtaccaaatgccaccaattggcatggaaccaaccaccagcgcaacagggtcgattttggttgtgcttcctcatcaacgaacagcgggggcccgaacaccaactacttccagctcctccgcttcgcggatccaacaactgagagatcattgcattcaattcccgcactttgcactcgaacgcaggcagcggtggtaggtgctgtgctgctgcgatggacctcgactcgcgcgggtaatcctcctcctgctgaaccacttgaggcaggtgatccatcggacaacctcgcatctgcactgcaccagcttcctgccaagctgctgccagccagcaggtga

SEQ ID NO: 31386 - DNA, 276 bp, Zea mays
  Peptide Sequence Number=SeqID_74761
atggcacttggcaccacagaccaggggttgccccagacgggtggctcgggtaccgtcgctcgagacggcaaaaagaagaagaagaactgcggcctcgagaggccgccgtctgctgcttcggtcgtcgcaaccgtgactaggggccagagcgagcgcaacaagcgcccacggccgcagaggggtaacagtggctcatgccctgtacaccccaacagtcgccacaacgatgtggagtgtcgcgagatcatcgagctcgcgaagcgcgtcagcgaatga

SEQ ID NO: 31387 - DNA, 762 bp, Zea mays
  Peptide Sequence Number=SeqID_74762
atggcgatggcaggcgggcggaagcagcggtcaagttgtcagcaagctcacgtcccctcctgggacagcgaggaaaccctctcccacggcgggaagacgacgcgcccgtgtcccgttcctcgaacggctcgcgcacgcacaacggtcgccccacgagccactcgtcccgtcgcattaactccgcggcaggacaggcagcacctttggcaggcgaagcaggcgacgcttcacctccgccataatgaccgcgtcaaaaaaaaggctggcccctcggaagggttcaacagccgcctcagagcgctcgggctccgcgcccactactggtcagaggttcgaaggccggcccctcggaagggttcaacggccgcctcaggccactcgggctccgcgcctactactgatcaggggttcgtaggctggcccccgaagggttcgacagccgcctcagacgtagagcgagggatgacccaggccaagtccggcctcgggtgccataggaagctccgcctcgcccgaccccagggctcggactcggcctcggccccggaagacgacgaactccgcctcgcccgaccccagggctcggactcggcctcggcaccggaagacaacgaactccgcctcgcccgacccgaggctcggactcgacctcggcctcggaagacagactcgacctcgacctcgaaggagcctccgcctcgcccgacccagggctcggccgaccacgtcacaggggggcatcattatcctacccctagctag

SEQ ID NO: 31388 - DNA, 1050 bp, Zea mays
  Peptide Sequence Number=SeqID_74763
atgcagcccagctacatcccctcgccggcggtcacccaagatggtgacctccagcttgatggtggggagaagcgaaccgggctgcggcctctgcccctccctcagcttcaaggatgttcatcatcagtgctggggaggggagtgtgccgagttggggtcggtccctgcgtgggcggcggcccgctccttccctcagtgatgggggggaagggcgttcgccgttcgtggcgtcggcagctgccgcgtgcccggctctctgagccgagtggcttcggagccactcccggcgccgccttccgccacggcagccggaagaggtttctccgccgacgagctagccggtgccgcccacggactgacctccaatcctacggccttctgcccgtccttgcctctcgagttgggggcatgggcgagggcctcatggcagcagcatccgccctgagttcatcgctgctgctgttcggccctccggagcagaagtcgtcgtcgtcgccgctgctggggcaggcgacgacgagccgttcgtcggtcttctggtgctccgcaggccccccaatcgtgtggggttgttcgtacctgcagaggtggaaccagagttccgtttgtaatggcactttgaatgctggaacccctcggccgcccttcgatgagccaaagccggaggtagcggtgtcagctcgggcagaggcagagttggctcgaaaagaagacttggtcggccagagcctggccgggtcgtccactggcaggaccgatgccggtgttgagctgtcgaggcctcaagccgggctggtgtcttcggggaacagctggccgaggcctcggggtggccggccgagccgtctgctcgagccggattcctggagaagaccctggcggcgatggcccgggtgtggtgctgatgtcgtccttcagagtggggatcctccgaccgtgtcgccgtccgaggctaggtcagaccccgccgaaggtgtagctgacgccgagggtgctgccgcccccttcaactgtcgacgtccgagcctgcaggatcgagttgtcttgtag

SEQ ID NO: 31389 - DNA, 210 bp, Zea mays
  Peptide Sequence Number=SeqID_74764
atgaacaagctggtgaagagtgcccacatggatgcaaacacaccgcttcatcagtttgcaaagcaaatgatgaagctcctgcatagtaggaagatgaaagaggccaaagagtcactaggatgcatgggtcaaaaggatacaactacattgtttatgtttgaaataagagttgcgagggcatacactagagttgtaatgacaaggttctag

SEQ ID NO: 31390 - DNA, 219 bp, Zea mays
  Peptide Sequence Number=SeqID_74765
atggggagagtctacaataacatatccactggatacccgatacccggtggatacccgatgggcatgggtacgggtacagtttctcgcccgattggcttggatttcttcatatgcgaggctggatacaaggccagggcagatgtggtggctaccacgagctttaagaagctcgtcgtggacatgtactacgagacgcacatccatgccatcgtcacttag

SEQ ID NO: 31391 - DNA, 174 bp, Zea mays
  Peptide Sequence Number=SeqID_74766
atgaacgaagatgaagctgagagcttcggtattatgattgacaaagcatctaatgaattgcgccatatgatgctgcaaggcgaacaaccagaagaccaatatcaccagaggaaccttcactccgaaggggggttggcggccaagaaaaggggaaaaaagggggcgaccactaag

SEQ ID NO: 31392 - DNA, 303 bp, Zea mays
  Peptide Sequence Number=SeqID_74767
atgctcttctttggtgggcggagcggatggggacgggaggatgaggccggtggagggggctgtgaggaggcaccggagggaggccgccattgtggaggtagaggtggtggtggcgcgacgagagaggtgcacaaggaaggcggctgccatggtggtggtcgtcgtcggtgttggagaggagatctgagcaccacggtgtcgaagaagctgaattctagtcctaatgtttgccatccctatttcttggattgggtaagttgtagccacctaattggagcagaaatgaaattatacatggtttga

SEQ ID NO: 31393 - DNA, 1344 bp, Zea mays
  Peptide Sequence Number=SeqID_74768
atgacgaaaatccttgaagccgagcggtggctgaagagcgccaatctccacgaggccgcgctcctccaacgacagcaagagcaaggcgacgctcgtgcaccccatccgggggctcgaaagatctcctcacttgcaccccttagcatcacgggcaaagtctccaccgacgtgctccagggttcccccccctacgacacgggggatgggccccatatgtcgtgtttactgactcgagacgcgagggaggcaaaccgccgcacgcaaggcgtgaaaccgccctgcggttataagcgttccctcatcctcgccggaaccagcggacgaaagggcgagccgcctcacaagggagcatgcaaccgcaccacagttgtgcaccctttcggcttcgtcacttccggtggacctgcacgaaggcccggtcccacctatcatgcaatcggcacgacggtcactacgtgcgaaggaactgcaccgccacctgcgccaataccgcaccttctcgactgcggaaccagtgccgtgactcgagacggccccgcgcatgacccaacagtgctaactgggcgcagtggtcacggggcaagcgacaccgttggcaggcgaagcaggcaacgtttcacctccgccataaaggtcgcgtcaaaaaagggactgggaagggggatatttcggaaaggatccttccccgcgaaggaaacaggcccccgggccctcctactgatcaggggttcgaaggctggcccctcggaagggctagcccctcagaagggttcgacaaccgccccagagcacccgggcttcgcgcccattactgatcaggggttcgaaggctggcccctcggaagggctggcccctcgaaggggtttgacagccgccctagaacacgcagagtgagggatgaccctgggtacgtccgatacatggtcgaggcttgggctacgctcccgaggtaccctaggacatttccgagaccagcgggaacgactcgtaatggaatcccactggagggaggcatcgagccctcggaccctatcaaaaaggggccgggtccagcgaatcacctgcaggaaaacagcgtcgcccacccctgctccggctactgtgccaaccacccgggcgaaactgacaacggtcgagttcagcctcgggcgcaacaggaagctccgcctcgcccgaccccggggttcggcctcggcctcggcctcgggagaaaatcttcgcctcgcccgaccctagggctcggcctcggccccggccccgagaagaatcacatccttgcccgaccctgggtctcggccccagcctcggcctcggaggcagtggcggaggacgaaaaaaattag

SEQ ID NO: 31394 - DNA, 174 bp, Zea mays
  Peptide Sequence Number=SeqID_74769
atgtcggctcggatagaggctttcttggcgcgagagcgggcggcttcccaggccgagaagggccgatcccggagccaagccgtcgaggccgtgagccgggctgagatcctcgggggacggctggctagggcttcggagcagctggccgaggtgcttgctcgcatcgtcgtctga

SEQ ID NO: 31395 - DNA, 537 bp, Zea mays
  Peptide Sequence Number=SeqID_74770
atgattgccctagcagaagatgcagagaagcgcaaccgtaagctccatgtggatctcaccacatctcaagcccaagcaactgccttggaaagtcgtgaagtcattgctgttgaagccctgaagcaagccagggatgagcacatccagaagttgatggaggcctacttgattcttgaaggccacccggtctctattagaggagagaagaaggcttgggaactctcggaaggagccatagtcttggaaggaataccagtcttccctcaggctatggataagcaagagcaccccaaatcctcccaagatcccccgctagagttgtttgagcccctcaccatgaagaagattccagcaccctcccttgagatcaaagaagaagctacaagcaccccaccagcaccaccaccctctaaggagctacaagagccagtcccgcttgaagaagagttcgaccccgtcctgccatctcagtcgccgctagaagaagtcatcaacatcagctccctcttgacccatccaggagatgtctcagattaa

SEQ ID NO: 31396 - DNA, 885 bp, Zea mays
  Peptide Sequence Number=SeqID_74771
atggcgcgggcatctgccaccccctgcggcccctcccctccggctcaggcggcgcagccgcgaccccctccctttctcggtggctcacatatgccccgacctgaccctgcaagggccttccccgccggcgtcccactcgtcggcaatcggcccccctacccgctcctgcgctatgcagctcccgtcgtcgcgctgtccacctcatccttgattgcgtcgacgcccagcagcgcctcctatcttcatgcttctctcgctgccggcgcccctacccggctggacccgccctgccacgcgcctccctccttcgtcgccttcgttggtttcgtcgctgccgcggccttcccggccggatccacgttgctgcggccatctcggcctgatccaccatccctttggctagatcgccgtcttcatggctggatccgtcgctgtcgtggcttttccgaccggatccgccgataccccttcttttctgccgcgggcgcgaccaccttgaccggcgtagacgcgtgcgctgtcgtcggcctccctggcgaggctcctcgacgaccgatcgcggaacgaagcaagaaggccctgaggctgctgctgctcttttgttatgtcgccctgccgaccgttgacgctcgaacgtcgacccctcccgaagaacaggcttctgccgcgtgtctcccgaccgcgaccatctcgacttcggctacttcggcatctaggggctatcgtcttcttggagcacacaccagtctctactctagccgcaacattcgcaccatcacgacgctgcgactgcggcaggatttcaacccgtcggctcctaccttcggcctctactccagtctcatcgtgtgtggtgcccccgttgcgactgcggggggatgttag

SEQ ID NO: 31397 - DNA, 387 bp, Zea mays
  Peptide Sequence Number=SeqID_74772
atggaaattttcaatgacatcgcacaactgaaggcactaagaacactttttaatgttgcacatcgattacacaatgtccttggtccttcttgggttctggtattggagacactttcagcacttgatagagctattcattctccacatgcttcaactcaggaagtatcagcttctgtttcaaaactttcaagagatacatcgggacagtacagtgatttccatattctctcttctttaaattctcaggagttgaaccgatatgggatcaaattgctgctcatcatcttgaggatggttactgatgcatcagaaaaagacctcatctccttaggctttcagcatgatatgatttctctgtgggagttttcccctggcatagctccttag

SEQ ID NO: 31398 - DNA, 363 bp, Zea mays
  Peptide Sequence Number=SeqID_74773
atgggcaagaacaagaagggtggaagttcgtcgcaccactccagcgacaagtggaagcacgagccaagtccccctcggatgactttggggatcgctgccgaggtgtggacatacatccgggccatcgagcgctccaggctcgagggctcggatgagtcggagatctcctcggacgaggagaattcttccgactcatccgaggaggagagcggcggtgacggcgacgacagcgatgacgacgacggcggtgatgacggcgacggcgacggcaagggcgacggaggcaacagcgacaagggcgacgacagcggcaagggcagcggcggcagcagcaaggccagtggcaaagcgccactggtttaa

SEQ ID NO: 31399 - DNA, 603 bp, Zea mays
  Peptide Sequence Number=SeqID_74774
atggccggaatggctcaccggagttactccggcccgcccgagaccttctcaccgccgttctaccctctctgcccgtggattcatggcctcttccccgccattgagttcgtcggggcgttctctccctctctgcccaactctagcgaccccggagccaccccagcttgcgccagcctcaactctggcgaccccaccgccgcgaagaggaacagcgccgcctgcagccgtccgtctccctggtctgatccccttcgtccgattcagatcgcacggcttagatcacggataacgcttcgcacacgtgcgcctgacgccctggcctgcctgtcagcgcccaagccctctggcgctgggcccgctctatcagcgcgctcccccccctctgtcgctgacactccctggcccacctgtcagcgctcacccgctcgtgtgcgcgcgccctcggccgcagatctaatcgcagctgttggttttagatctgacgacaacgagcagtccgaggttcctgagtgtgttgttggagacctccctgagcagcaacctggaggtgatgctggcaacatggatgacttcgaggagttccaggaatatgacgagttctag

SEQ ID NO: 31400 - DNA, 420 bp, Zea mays
  Peptide Sequence Number=SeqID_74775
atgggcaagaacaagaagggcgaaagttcatcgcaccactccggcgacaagcggaaccgcgagccaagtcccccctcggaggacttcagtgactccgagtactcggaggaggggttttcctccgagtccaagggatcgccggtctacgcctctcccccgatccaggccgtcgagcgctccgagctcgagggctcggatgagtcggagatctcctcgaacgaggagaactcctctgactcgtccgaggaggagagcggcggtaacggcgacgacgaggacgacgacgacgatggaggtgacgacggcggtgatggcgacggcgacggcaagggcgacggcgacggcggcaagggcgatggcggcagcagcaagggtaacagtggcagtagcaaggccagtggcaaagcgccactggtttaa

SEQ ID NO: 31401 - DNA, 267 bp, Zea mays
  Peptide Sequence Number=SeqID_74776
atggcttgggcgagtgcagcatcacgctggcagcagcttggaggcgagcttcatgctcggctgcgacctgggtcgcagcgtcgtcgaggaggggtggctgttccagaccagccatggccaggggagggcgctgcctggatggcgcgcagaggggagaaaagggcgcagccaagaggtggcgcgcagggggagggaagcggcgcagctagaggactgcgcgcgagggcagcggaaggaggatatgaacttgaactcgtgataccatga

SEQ ID NO: 31402 - DNA, 189 bp, Zea mays
  Peptide Sequence Number=SeqID_74777
atgactgaggccaccatccatgctaccgctgtgttcgtcgctccctatgcgacgatcaacgccaagaatcacatcccggaagcctaccccactgatcctgcttggggcatcgcagatgcctgcgtccacagctggctcctcggctttgctgggccagatgtcgtcggcctcgtcgcggcaccaaactag

SEQ ID NO: 31403 - DNA, 774 bp, Zea mays
  Peptide Sequence Number=SeqID_74778
atgtccggtgccgcaccggacatgtccggtgccgcaccggacagtccggtgcgccagaccagggcgctctacggcgtgtcctctgtcagccagccccgagattcgaaggtggtcgtgattgccatggacataattggattagcagtggaggcgggagaaattgtggagttggagaacaccagacatgaggaagaaatcaaggacatgtcaaacatagctctagtcactataaccgatggaactgtcactgctaagcaaattgaaaatgagttcaagcaagacccatcatccacttggagatgtgagaagttgagcaagaaggcttcacaaatccagctggatggtggtagcaagaaacaagtagatgctacacaggatctttatcagcatgactatgatagcttgaagtttggaagcattgatgaggtgaaaatccggaagataagttctattgaggctaatagagatatagtcatggctggccaggctggggtgcacaaggaaggcaagtctggacagctgggacaggggaaagaggaatccagcaaaactaaagaactgacaactatcctggaggcaaaagaaaaaggaaattcagtgcaagagctgtttcactcaaccctgtgcatggttctcaaaatcctccagaggttaaaaaagtcaggaagagatcttatgtctgatttctgcattattatcatattggacagggttgtggaaggacggagaagctgtgcagctccatggggcacaaacgctgagggtggtggctag

SEQ ID NO: 31404 - DNA, 504 bp, Zea mays
  Peptide Sequence Number=SeqID_74779
atgaacacgaaactgccccagagctaccttctcgtgaacgaagtggatgtcgattttgatgtgcttcgtgcggcggtgatggactgggttagccgccatggggtgaagctggtgcagccgctggtggtggtggaggtgcagcagccacaggagccacctcgtcgttggccggtgctgttggaggctgggcacgtcgagcgtaggcgttgccgaagcgctgacctcctgcaagaggagccatcagctaccccgctggaggcccttgagcgcccagctgtggcccgcccgcaggggagcgcctggggatcatcctcactgctggcagtgagagacggaggagtgcttgctggtgacgccgaggaggtgaggtcccgcatcagaaaatcaagtgacaacggcatggagcccgccgatggtgcagtcgagaatgggaacactgactcgtcgaaaatgacatggcacgagataatgatgcagcgagtggacatgtcaagacagcgatag

SEQ ID NO: 31405 - DNA, 282 bp, Zea mays
  Peptide Sequence Number=SeqID_74780
atggacagtgtggtcctctcgtggatcctcggcacactctccgttgagcttcaggacaacgtcaaggacctctccgtctctgagtactgtcgtcggatgaagggcatggaagactccctacgggatattggcgaacttgtccccgaccgcatgctcgtcctcaacctgctgcgtggtctcggtcggcgatatgaccaccaaaggccttcatcaagcggaatgcgttgttcccctccttccacgatgtctgcaatgagctacttctcaaggagctcaccatag

SEQ ID NO: 31406 - DNA, 960 bp, Zea mays
  Peptide Sequence Number=SeqID_74781
atgcctcgagtctttttcccctcggttgccgtggctgatcgggtgattggcgaggggcaatctcttcatgtccctccgctcaggttgcatattcgaaggtggtcgcgtcaggcgttcgctcctggaggtggacagccgcttgtgcctgttgacgttgaacttcgtggaattcctgcgcatctctgggggattgaggctgctgaagctgttcttggtgctttctgtttgattcatggttttttgcctggcttggtcaaggaggaagatatgtctgttctcagactgaaagtatggtgccggtcacctgtgctgctgccggcggtggtggatctccttgctgaagagccgatggtctgtggagaggatgggagctgggttcctagcacgttggtgttctctgtttctgtggtggttcttcattctgatggaagttcagatttcggtgtggatccccctgcgccacccccttcgggctttgtcgacgaagatagtgatcatgagcatcatgtggagcggccggggcgccctgcgtcttatgttcgggttccaattcatttgcgtctgggtcagcgcagtcgttctgggcaggtggatgacatggggggggggtcagttgatgctccggctctcccgattgtttcggttgaggagcgggaggcgcctggtcaccctccagttttgggatcagttgatgccctggctctcccggaagtttcggtggcagagctggaggcgcctggtcaccctccaatgtcagcgttggatctggcagaggatttgggggtcagttgtcaggaggactggtcttcgcatgttgttatctcaccggctgggccttgcttagacaatcctttggtgggggcccttatgaccggcttggcagaggctgtctttgctgggcagcatggtcccgggtcctcctatttgctgactgatagtcgcctagaggggggggggtga

SEQ ID NO: 31407 - DNA, 1517 bp, Zea mays
  Peptide Sequence Number=SeqID_74782
atgacggtcacgctcccgctcgcgccctctggccttccccctcctgacgcctcgtttccaccccccactggcccctcgccggctcctattccaagaccggcgaccatccctctcccctcgccgacgtcgcaggacccatcccctggtgttcagagcggcggacgtccggaggagctgcgctacgcgccgtgtcctccttcctctggcctctcgccggctcttactccaagaccggcgaccactcaacttccctccccgacatcggaggattatccccttggtgttggtgacgtggggaagaaatcctatagagaggctctgttttctcccaggcctgctgcgtccagggacgttggtggttgggtgacggtggttcgtcggcgttcgaacaccttgaagtccctccccagacctgtcccggtggatttgcgcggaagatgcttcaattgtttctcgtctgagcaccgtgcggctgtgtgccgtaatcgcgtgcggtgttttttctgtcggttgccggggcaccgtgtgggcgagtgcccgcgccggcggacggaccctcccttccctggacgctctctggtgtggcgacctgtggctatgaaaccttcggagaagaatgtctgtggtcgagatttggctgtggctggcgggtctggacctgtttcaatgattggtgaaggcgcgaagaagaggactcgccgtggacagaggaagaggaagtcgggcgctggggggcagttgccccatccgcctgccttcggcctggataagccggtgagctttgtcgggcgttgtggaagaattgatcgggctgaggaggaactccgtcgtgcactgatcgtcagtgttgttggcagggaggattctggctgcgccgtggaggtgcgtgacgcgatcgcctcgaggttttgccttgaagcagggtcgctccgcatacgtcgtgttgcgcctaattctttcctagtcttcttcccctcggttgccgtggctgatcgggtgattggcgaggggcaatctcttcatgtccctccgctcaggttgcatattcgaaggtggtcgcgtcaggcgttcgctcctggaggtggacagccgcttgtgcctgttgacgttgaacttcgtggaattcctgcgcatctctgggggattgaggctgctgaagctgttcttggtgctttctgtttgattcatggttttttgcctggcttggtcaaggaggaagatatgtctgttctcagactgaaagtatggtgccggtcacctgtgctgctgccggcggtggtggatctccttgctgaagagccgatggtctgtggagaggatgggagctgggttcctagcacgttggtgttccctgtttctgtggtggttcttcattctgatggaagttcagattccggtgtggatccccctgcgccacccccttcgggctttgtcgacgaagatagtgatcatgagcatcatgtggagcggccggggcgccctgcgtcttatggtcaggttccaattcattgcgtctg

SEQ ID NO: 31408 - DNA, 1392 bp, Zea mays
  Peptide Sequence Number=SeqID_74783
atggcgatgcggcacaacaacggagggatgggattagtcagcaagcctattgagcaagctagtcacatgaatgatgatgttcaatcatgtgaaatgactgaagaggcaaacagcaagcaagttcctccaaaactagttgattatagtatacttttcttttcagttttctctgtcctccagaaattgggttcagatgatcgtcctgaggttcgaaattcagctgttaggactctcttccagactctcagcatccatggccaaaagctttctaaaagtatgtgggaggattgtctttggttatatgttttccctatgttagagcatgtttcccacttggcatctacctcatctcgagatgagtggcaagggaaggaacttggaactcgggctggcaaagctgttcatatgcttatccatcacagtcgaaatacagcacaaaagcaatgggatgaaaccattgttcttgtacttggtggtattgcacggcttttgcgttcttttttctcttacctccaacaactgagaaaattttcttctggttgggtgcttttactcagttttataaaaaatagcatcttaaacggtagcaaggaggttgctattgctgccatcaattgcttgcagacgtttgtcggcgcaaactgtccaaagggcaatttggaatcctcgtatgttaaatctgttcttgatatttatgaacttgttcttcaaacttcatctaattttaagaatgactccactgataaagtgaagcaagaggttctccgtggtcttggtgatctttatgtccaagcacaatctctgtttactggtgacatgtatctaaggcttatggcaattatgcatctgatgatcaagactaccttgaatcctactgattatgatagtgaactgggtagtattcctgctgtacaacgaggtatattggaaatcattcctatgctacgcccaacagttgtattgtctcccatgtggacacatctgcttcttgagctgctatgctatcttaatgggcacgaaggccccctccagaaaaataatgaacaaacgcccgatcataattctcaagcactggtagacggtgcaaagcatgctcttgttgaaagaagcaatctcaatggcgggggtacaaaactggatatggtgggatctggttggggcattctatttgtagaaaaacttgtaccaatcattgccaaccttttcttggaggctccaccaaatgaaaggtttagtgtctctcctgaagtcattcaaggtcttggaagtgcgtccactctaacaggtctaaggttcgaccccggttgcggtcattctcacatgggctacgatgtcgtgtatgggtggagcagaggtttaggggttttctcaacttgtttaaggtcttcttag

SEQ ID NO: 31409 - DNA, 444 bp, Zea mays
  Peptide Sequence Number=SeqID_74784
atgacagctctttatcaggatgactatgatagcttgaagttggaagcattaatgagtcctacaatgataaatgagtatggcttaaacttgtgcaactctaagtgtgatcctttagcagctattgaggctaatagagatatagtcatggctggccaggctggggtgcacaaggaaggcaagtctggacagctgggacaggggaaagaggaatccagcaaaactaaagaactgacaactatcctggaggcaaaagaaaaaggaaattcagtgcaagagctgtttcactcaaccctgtgcatggttctcaaaatcctccagaggttaaaaaagtcaggaagagatcttatgtctgatttctgcattattatcatattggacagggttgtggaaggacggagaagctgtgcagctccatggggcacaaacgctgagggtggtggctag

SEQ ID NO: 31410 - DNA, 270 bp, Zea mays
  Peptide Sequence Number=SeqID_74785
atggacagtgtggtcctctcgtggatcctcggcacactctacgttgaacttcaggacaacatcaacgccgagtcccccgcgttctccacagcgctctacggcgtgtcctctgtcagccagccccgagattcgaaggtggtcgtgattgccatggacataattggattagcagtggaggcggtacatttcgtgggcgcaaggatatggaaacagaggatgggaaaaagaaaggaacaacaacatgaatgtagaggtcatgaagaggcttaa

SEQ ID NO: 31411 - DNA, 528 bp, Zea mays
  Peptide Sequence Number=SeqID_74786
atggcagaggcatgccgaccttttattgtaggaaataaccgacatgcttcgaagtttggcgaggctggaaggaccggggtggccaaggcggaggttgcgcacaaggtcagttgcaaccagaacattgttaaggtgataaatagaggtgggggaggagagtgtggatgtgccacgacatgtgatgggtatggtagtgccattgccaaccgtgatgccggaaggaggggggagatgggacaggagtatactagccgaagacgatatgtcggctgtggcgccagtgtcgaggacataagaagacccctggagggacatctgattcagggcggctacgaggccagcctgatcccagccgcaatgctctggcggggttggaacggagttgtcggagaactgggcgggggcagtgtgggcctgggcttgagtgaaggcgctgaggatgtcagggttgccaggactgtgccaggctgggtttgtccccggcgggcgccaaggctgctgatgcaccctgacagtcaaggggggtag

SEQ ID NO: 31412 - DNA, 189 bp, Zea mays
  Peptide Sequence Number=SeqID_74787
atgactgaggccaccatccatgctaccgctgtgttcgtcgctccctatgcgacgatcaacgccaagaatcacatcccggaagcctaccccactgatcctgcttggggcatcgcagatgcctacgtccacagctggctcctcggctctgctgggccagatgtcgtcggcctcgtcgcggcaccaaactag

SEQ ID NO: 31413 - DNA, 462 bp, Zea mays
  Peptide Sequence Number=SeqID_74788
atggtgatatggaggcccagaaatgtttgtacaacgtgtggtgaaggaaggcggcggtacgctgtacacacagtatgcagattggagcctcatgaaagtgaagctagaggcctgtggtttgtgggacaagtcgagcatgacaatgccgattgccagatggagcggatgactgttggtgccatcctctctgtcataaccgtggagatgattccaaaccccatgaaggggcattggcttgccggttcgaagcagaggcatgataacaagggcatctccaagtctcctcagctggcggcaatgcgtgacgttgctcttgtggttttccttaatatgcttgtaaaagttacccgtcaggacttaccattatggcatcagatacttgtccttgaaattttaaggggtttttgtgttgaagcctgcactctgcgcttgctgtttcagacatttgacttggtttgctaa

SEQ ID NO: 31414 - DNA, 1545 bp, Zea mays
  Peptide Sequence Number=SeqID_74789
atggaggcagtccttcctggtgggctgaagaagcgtactcgtcgtggacagaggaggaggaaggttgtcggtgttgtttctggtcaggaggtgtctgttcattcgcctggagggcctgctcgtgttgtgaagttccttcgtcgctccagggaggttgatcatgccgaggctgacattcgtcgagtgctaatcgtctctgttcttgggccagggagctctgattgcgccgcggtggtgttggagcagctcgcctcaagggtttcgcttgaagctgacacgctccacctacgacgtgctgtgtcgaactcattcctcgtcttcttcccctcggaggagctggcttcgcgtgccatcagtgttgagcagtcgcttttcgttccccccgtccggctgcacctcaggcgttggtctcgtcaagccttggcctctggaggggcagcctgcctctgcttatggatatcgagttggaaggggtccctgctcacctctggggggttggaactgctgagctcctgttggatggaacctcttgttgttggggaggatggatccattgtccctcgcactttggtttatcccatttctgtgagggtgattactcctggtgattggtcggcaggggacatgtctgaggtattgcctcctgttgtcgaagatgaagatgacagggatcagtttcagcagaggcggcgcattattgggcatgatcttttagctcggccctcggtgcattcgaggcttgggccgcgaacctcttcttcgtcggctgctgaacctgtcgaggacgcattacccccggttgtgttggctgatgagttggctgtgtctgggtctgttgcccctgttgacgcagaatttttcccatgtgcttcggttgaagagttgttggctcctgggcctgttggaccagttgatgctacaattctcccaaatgacttggatgggtctgttgtaccatttattcctggtgatgcggttgtagagttgacggcgcctgggtccgctgatccagttgatgctgaaattctcccgagtgccctggctgctgttgattccaatttgtgtgctgcagacatacaagttgcttctagtcctttctttaatctgcttgggaggccgggtccttcgctgaattgctggttaagtaccaagccgcggtgcttcaaggtctattccaggaggaagaagacactggtggttgaggaatcggtgatatcaccccaattgctggaattcagaaacgatctcgtgttgccgacgactcagctgttgcctactcctctgattgctaagcgcagaaagacaataccaagcaatttcaagccacggcgtagcaggagggttgcgaagtttccccctgagttgggctctgaatccgctgctaaagtgtgcagatttttgggtttctgtgatgagcaggaaaatatttctttccaagatgctaggaagtatgctagcttgtttgatgctgccctgtccaacgatcatattgctgccctggcggctctgtttggttgggaggtgccccaggtggtgcaggcctga

SEQ ID NO: 31415 - DNA, 1281 bp, Zea mays
  Peptide Sequence Number=SeqID_74790
atggcggcgctggaggccgatctgcgcgctctctccgctgaggcacgccgccgccaccccgctgtcaaagacgccgccgagcacgctatactcaagctccgatctctatctgccccaagtgaaatagctcaaaatgaagatatactgcggatgtttctgatggcatgtaatgtcaaatcagtgaagttgagtgtcataggactatcctgtttgcaaaagcttatatcacacgctgctgttgcatcatctgcgctgaaggatatactagcgactttgaaggatcacgcagagatgactgatgagattgttcaactaaagactttgcaaacgatgttgattctctttcaatcacatctacatcctgaaagtgagagaaaccacttctcacacaagctgctggataaaaagctatcctgtttagaggtttgtcttctttttcaacttttttatgaagatccagagatgaacaaggttgccactggtgctctcatcagcagagagaaaagccatggcctaagcttggcttattttctgcggcaacacaactgctggcattgggtgatcatgttgcacgtgcggctcccaatctcgttatgcaggaatggtgaggttgtgtgccatcactcagcttggcaggaacactggaacggtgatgaggggaagggggcgcatgcgcggatccgctgccagcgagctccatggctgaccacggagcagggagccagatgtggaggggtggtgcagccattggtgacagatacagaggacgacacggtgaaggagtcgcacagcagcaggcatgatggtagaggagccgagggagtcttgctgccagagaaggctagcaccattgctgcttggtgtgggagagaaaaacagtactccgccattgcagaaaaacaagaacaagtaatgcatgaaagaaaggtttctgatcagcagtcagcacatttgcgtgcctctcatgcaagattgagagcatgtcacaagctcttggaatatgcctttacctacttgaaagcaatcgatcttctgacagtgtccgcaatacggcagcagctacgtttagacaagcagtggcattggtcttcgataatgttattcgtgctgaatcacttccctccgattcagattgctttacatggcagatcgctaccaagcaactctggggatcctaccatcatgcagaatttgagtgatgttggaaagcttgggctccgtctgctcgaagacctgacagctattgctgcaggtggatctgtatgtgcgaacaatttctga

SEQ ID NO: 31416 - DNA, 312 bp, Zea mays
  Peptide Sequence Number=SeqID_74791
atggcggccgacaacctgcccgccggcggcggaatagacgacgtcttccccacgtggtggaagaacaacattcgggcttgtcccatcccctcccccgctgacggaggaggaggcggggcaaccaaggccaagcagaaggcggcacctcgtcggctgtcgaacgagtcgacggcgtcggcgcctgtcacacccggctttaaggaacaaagccaggacgaagaggaggaaaggctgcgactcagctcccatttaacgggtgaagggggaagagtccgtgccgatcgcaggaaccccgtcggccgtccgccatag

SEQ ID NO: 31417 - DNA, 561 bp, Zea mays
  Peptide Sequence Number=SeqID_74792
atgggggctgggtcccatgcgtcatgcaagctggcccagggcagaagaagccaaaccgctgcgcgcgcggtgcgcgcaactacccagcggttacaagcattcctccacattcgcccagaccagcgggtgaaagggcagacagccatgcaggcggcatgcaaccgcgccaagtgggcgcaccccttcgactccaacgcgcccagcatggaggcccaggcccacacgtcatgcaaccggcgcgccggttgctacgtgcgagcaactgcaccgcccctcgcgccgctaccgcgcctcctcgactgcggaaccagtaccgcgactcgaggcaaccctgcggatcgggaaaggggataccccgaaagggatccttccccacgaaggaaacgggccccgagcccccctactgatcagaggttcgaaggctggcccctcggaggggttcaacagccgcctcagagcgctcgggctccgcgcccactactggtcagaggttcgagggccggcccctcggaagggttcaacgaccgcctcaggccactcgggcttcgcgcccactactga

SEQ ID NO: 31418 - DNA, 309 bp, Zea mays
  Peptide Sequence Number=SeqID_74793
atggcgagctcgtcgtcgctcgccgtcccctccatccctctccctctcccgggcgcctataaaaggaaccgcccgagccctgtcctcaccacaccagctctggccaactcctcctccttcccccgagtgaatcaagctagcaccgccgtgcttcccccgtcactctgttcgattaaccagtgcgcgaagctccgcaacacactcacggtcacgaggcacccctccccacctcctattgcacccggcatcctcaccggcgacctcaccgccgtggacacccgccaccacgccacggaccagccgccatag

SEQ ID NO: 31419 - DNA, 643 bp, Zea mays
  Peptide Sequence Number=SeqID_74794
atggaggcccaggcccacgcgtcacgcaaccggcgcaccagatgctgcatgcaaacaactgcaccaccgcttgcgccaccaccgcgcctcttcggttgcggaaccaataacgcgactcgaggtggtccagcgcacgaccagcagcgccagcctggcgcggcggtcaatgcagccgaaagtgggccggcagtaatgacggtggcaggcgggcgggagcagcggtcacgtcgtcggccagactcacgtcccatccaggggcagcaagagaaccccctctcacggcgtgaagacagggcgcccgtgatccgttcctcgaacggctcgcgcacgcgcaacggccgccctgccaaccactcgccccgtcgcattaactccgcggcgggacaggcggcgcttctggcaggagaagcgggcgacgcttcgccttcgccggaccgagaaagggggataccccgaaaaggatccttccctgtgaaggaaccgggctccgagccccccctactgatcagaggttcaaagactggccctccgaggggttcaacagtcgcctcagatcgcatgggccctacacccactactggtcagaggctggcccccgaagggttcacagtcgcctcagacgccgagcgagggatgaccaggg

SEQ ID NO: 31420 - DNA, 453 bp, Zea mays
  Peptide Sequence Number=SeqID_74795
atgcaggcggcatgcaaccgcgccaagtggacacgcttctccgactcccagcgcgccagcatgaaggcccaggcccacgcgtcgcgcaaccggcgcgccggatgctgcatgcaggcaactgcaccgccacttgcgccaccgccgcgcctcttcggttgtggaaccaatgccgcgactcgaggcgacccagcggcgccagcctggcgcgacggtcaatacggccgaaaggaccgggaaagggggataccccgaaaaggatccttccctgtgaaggaaccgggctccgagccccccctactgatcagaggttcgaagactggccctccgaggggttcaacagtcgcctcagatcgcgtgggccctacacccactactggtcagaggttcgaaggccggccccccgaagggctccacggccgcctcaggttactcgggctccgcgcccattactga

SEQ ID NO: 31421 - DNA, 507 bp, Zea mays
  Peptide Sequence Number=SeqID_74796
atgcaggggcactccgtccccacacacatcaaccgtccccatcgattccccgtcagcagatcagggctcaccgccttggcgtacaatgccccactgaccccgactggccgtcgtgcagtgaccgcacttgtacccaccataaccggaatgggagacctcgtctcaggacgcgtgaggggatatgtccactgccaggtcctctggtgcaggctcgggtgctggatctggggctacctcctgagcagctccttgctccggcacgaggatgcgggtgtcctcgtcggcggcgagtataccgggccaaaccacggcgaactggttcaatccgagggcacggtgagcatcacggggtcacgcagcgactgtgtgcgcaaggaatcgaagggtggtggagtggtttacccggtccacgacggggttggggatggctctgctggctggtctaaggtggtagaggggttgggcggccgcggactcgctgcgcacgggcaaacggcgacgagctaa

SEQ ID NO: 31422 - DNA, 321 bp, Zea mays
  Peptide Sequence Number=SeqID_74797
atggaggccaagtcacaccatcaaccaaaatcaaggagtgaccgcacttgtacccaccataaccggaatgggagaccacgtctcaggtcgcgtgaggggatatgtccactgccaggttcactcaggattcagctgttagcaaggtcaaaaagtgcaattacagcagcactgtccagatttggacagattctgacttgcaacttaaaaaattcacaactgaagattcaggcatccaaacaaggtgatcctagactttctggaaagatcaccaaaaatagtgatccaagactttttggaaagcttagaaaaagccctacataa

SEQ ID NO: 31423 - DNA, 320 bp, Zea mays
  Peptide Sequence Number=SeqID_74798
atggcgaaaacacagcagcagctcgccccgcctctcaaagcagaaaacagccccctcccatggcgcgctgcagtagatgccgtggagcattccctccatgccttgcgactcggtttccttcctgcgttgaacagcacgccgtcgacgctcgtcgagtgtttgctgtttttgcgcagccccaacagcatcgtcgttcaccccggagagaaaccccgtgtttgcgtggaggaggcaagtcgttcaacgctcgtcgatgtgcgaagctatgcacaaatcggaatcaccgtcgttcttgcaaacgccgtttgggtttgtttatg

SEQ ID NO: 31424 - DNA, 171 bp, Zea mays
  Peptide Sequence Number=SeqID_74799
atgtggctcgctttgccaagggtggtttgccccttggagaggagtggtgatgaggatgatggttttgattatgcttatggtaatggttgtccacgttgcaaccactgctcaggtgaagatgaagtcgtggaggaggactttcaggagttccaagagtacgatgagttctag

SEQ ID NO: 31425 - DNA, 342 bp, Zea mays
  Peptide Sequence Number=SeqID_74800
atggcccagcccccttccctggcccatttcggccagcccacccgcgcccccctccccctctctttctcccccctcggcccacctgaaagggaaatgtgcctttgggccatttctaaaaacagagagaagaagaaagaagaagagttggctgtgtacagccaaaaaactgcttcggtctggggcaccagactgtccggtggtgcaccggacagtgtccgttccttccttactccgtatttctttgtgaatctcaagtgtaagggcgagaggctccaagttgtggagattcctcgcaaacgggatattgagaagaaaagcataacactgtggtattcaagttga

SEQ ID NO: 31426 - DNA, 267 bp, Zea mays
  Peptide Sequence Number=SeqID_74801
atggcgggggaaagcaagccgggctacggcctctgcccctccctcagcctcaaggattttcatcatcagtgctggggaggtccccccatcgggtggggttgttcgtacctgcagaggtggaaccggggttccgtttgtaatggcatcttgaatgccgttaaagttgttcattgtggctgtcggggcctgaacgtgtatgtatttttggcgcggagccgtgttttttcctcatttttgagcactaagactcgcctgttggttgtctga

SEQ ID NO: 31427 - DNA, 905 bp, Zea mays
  Peptide Sequence Number=SeqID_74802
atggctgaaaggtaccaactcccacggagtcgcattcctccaacgacaaggcggaaggattgcgggtgtcccccatccgggggctcggaaggtggaaagacacgatgcataagggagcgtgaagacatggtcgcctttcaagggggtcatcctccttttaaaggcgactctcccgacttgcgtccccagccatcatggactgagtcttctccaacacgctccaaggtcctccccctacggcacgggggctgggccccacgcgtcatgcaagctggcccagagcagaagaagccaaaccgccgcgcgcggtgcatgcaaccgcccagcggttacgagcattcctccgctttcgcccagaccagcgggcgaaagggcgggcagccatgcaggcggcatgcaaccgcgccaagtgggcgcacccctccgacttccaacgcactcagcatgggggcccacacccacgcgtcatgcaaccggctccgagcctccctactgatcaaaggttcgaaggctggcccctcggaggggtttaacagccgcctcagagcgcgtgggctccacatccactactggctggccctcgaagggttcacagccgcctcagacacagagcgagggatgaccatggaaggacagcgtcgcctgcgccgctccgactgctgtgccgctcgacaaagtgaggctgacaggcagtcaggcccggcctcaggcaccataggaaactccgcttcgcccgacccagggctcggacttgggctcagccccggaagacggcgaactccgctccgcccgacccagggctcggacttgggctcagccccagaagacggcgaactccgctccgcccgacccagggggacttgggctcagccccggaagacggcgaatgtgacagaacctcccaa

SEQ ID NO: 31428 - DNA, 198 bp, Zea mays
  Peptide Sequence Number=SeqID_74803
atgtcctcatcagtgaccgtcaagacctcccctacaccctcggccacttcaccggagcaatcacgccgccgagagtatgtgctcattcctgagcaaggagctgtccacgaggaagatcaggagccagctcccgagcctgccatcaaggatctccccacattcccagaaattgaaggcaagccccgattttatgcataa

SEQ ID NO: 31429 - DNA, 348 bp, Zea mays
  Peptide Sequence Number=SeqID_74804
atggcgcagagacttacccggtccacgttcgccggtgggcggaagaagtccagcgagggtgattcggggtctccggtgaggctctgccgggtccgaggacttggggagcttcacgggtctctggcgaagctaaccaaacagctggcgcagactgggagcgactggagtgagctcgctgcggtggccgaggctcgggtggcttggcgggcggtggcgcgtcgtgctcaaggcaaggtccggcgaactctggcttgggcaggactgagagcgtgcgggggagtacagccgaggccttggggctgctttataggcatggcgagggcgagggcgtgcgatggacttgactag

SEQ ID NO: 31430 - DNA, 237 bp, Zea mays
  Peptide Sequence Number=SeqID_74805
atgtcgggtgaacacggcaaaaaggagttagccaccagggaaaagctcgattctttgggaaagaagcatgaagccaagacttcgttaaaggaggccaagatatctgccgacaagcacaaggaggacaaggaagaatccgtcagttccattaactcacacaagaagaagggcgacaaaaagaaaaagaagatgaagaaggcaaaccaccattttttgatggtgaagactattctatga

SEQ ID NO: 31431 - DNA, 171 bp, Zea mays
  Peptide Sequence Number=SeqID_74806
atggcggtcagacacgggattcctgcattgcgcttcctagaagctgtagcaggttttctgatgttagtggaactagaggtgtatggggcccgtagaaccccgtggcagatgggtaacatgacttgtgggtacagggtacaacctctgcagagtgtaaaactggtatactag

SEQ ID NO: 31432 - DNA, 159 bp, Zea mays
  Peptide Sequence Number=SeqID_74807
atggggaagcctgtcccatcactcctcatgctcctcctctgccgagtgaccacacttgtacccaccataaccggaatgggagaccacgtctcaggtcgcgtgaggagtaaagtctgcgggcaggttcactcaggatttagaaatcattatgctaagtga

SEQ ID NO: 31433 - DNA, 546 bp, Zea mays
  Peptide Sequence Number=SeqID_74808
atgcaagatgctgcacggtgtgcgctttcgcactactgctcggttctcggtggggtagctgatggtctcaacctgaagtattacccccgccgtccatctggcagcacaggaggcgtgattgtctcacctgttggtgaggacaatcctaggttgagcagcacagtcatcctagctgccgtgctaaacacggagctggaccatgcattagacgagctaagtagggctcgtgctgagatcgccctgctacgggctgagcgcgcggaacgtcgtcacctggacgatggttcccccgctcccgtcgggactcagcacccggtggtggagaattctatactcttttcttatgctgcaagatttgcaagatcagttctgatgtgtgattgcattctgcagatgtcagagaacaggcgcaaaggaggaaggcgtgctcagcaggagcaagccgctcagcaggaagagactcaggcagtccaagccatcggtcagactctggccgccattcagcagcaacagcagcaggcaccacctcaacctcagatgccttag

SEQ ID NO: 31434 - DNA, 513 bp, Zea mays
  Peptide Sequence Number=SeqID_74809
atgacagaggaagttagctgcagaggccacagtatacttcacaatcttcggggcagcaacaaagcacttttcgaccgccagctccaagaggcacaggcaccaggggctttggaggaagatatggggattagcccaggaagatctactgcctattttgtggtgaggacaagggccatactacaagaatgtgccaaatcaccatccaaaagcagaaggagatcgcagaagccgaagcccggcaaagtcaaccgaagcaggtcctgcacactgcttcgtgtcactcaccctacataccagaatatgtgggtaatcatcctgcagcttctgttgcttcggctagtcagccacaggcttcttggccacaacttccacctccgccaccactacaacctgcctattcacaagacttacgaagctcaaaaaattgctgaagctcaaaagacgttcctaagggaatgcagagctacaaatcgcaatgcaagtttcaccaaagctacaaaaagtcgttcctaa

SEQ ID NO: 31435 - DNA, 144 bp, Zea mays
  Peptide Sequence Number=SeqID_74810
atggaggtggaaaacttgttggagaacgacgttggctgcccgactaccacaaccaagatggtgtggcgccttgagcgacaggttcaaggttgttcttggcacgacaagagcagcaacaacaggagccgatgtaactatcgctaa

SEQ ID NO: 31436 - DNA, 288 bp, Zea mays
  Peptide Sequence Number=SeqID_74811
atggagagtcatgatctccgggcagaaaggggatcacggcttgtgggtggcaatgagattgttggttctggttatgactatgatgctggtaggtggtattctttccgtttggaaagggttgtcagcattgcaaccactactcaggagaagatgaagtcgtggaaggcgacttccaggagtttcaagactacaacgagttctaggcgtgggttagcggcaacccccagtcggctgcctgtgaaggccgcgtttatctacgtttcttttccgcactttgatttattgtaa

SEQ ID NO: 31437 - DNA, 612 bp, Zea mays
  Peptide Sequence Number=SeqID_74812
atggacttgcacgagagggttttccctgcatcttgtgggaggtgctgcaaggagccggttatacgatgcctccccagtacgcggtgcagttattcgaggagcaccggggctgaggacactatcgaggccattgctctccatgggttgacgaccttttgtggatttcaccccttggagctgtctaatcatcccattggcttgttccccgcggaaaaggaggacgacccaatgtggaaagatcgagtggagcatgccaaggatgctaccaagatcaccctggataacagggaggaacttgtggtagacctatccactgagatggtggaaaaggacctccaggtggaacagatggccacccagatccaagaacttgaggagttagtaggagccacggagaacaccatcgaagttctcgaggatcagcttataaacactcagcagcaacttgaggaagctaaccagcacatggatatgctccatcaggagattcaggacatggaggccgacgaggatgttgacatcgagggaggagtagacccggagcctgcatccagcttggacactgctggctcagggagaccaccttcccccgagtcaagcgttgctcattag

SEQ ID NO: 31438 - DNA, 807 bp, Zea mays
  Peptide Sequence Number=SeqID_74813
atggccgttgctaatgtttctctagctgaaacgcctgaaagctttatgagcaccatagttgctccatctgtttcagtacttcctaaccgtatttcaggcctttgtgggattgatagtgctggattgcaaaatggctatttaaaggaccattttccaggtgatgcttacccaaatacagagaatatctctaaagcaagtgggcaaaaactctttaccggtgaaggacaattgtttcaacaatacagagaatatgagaaagagttagacggtgcatggagccacccagcagagaaggcagttcactcaaataggacaactcaaagcaatgaaatatatctcaatggagaatgtggacctgacacattcatggaaatgacagaaaactattggtgcatctcggactctaggaactcatgcagggagatatactcaaatttaagcacatccaatcagtgtttcgtgtctgattgtgatccttgtgaccctgagagagaaattgttgaaagatctgaacatacaccaaatagtacagtatcaaagccaacttcacctatttcagatgaatcttctgccaagcgtccagcaaaacgcctgaaggctgttatggaagagaagttatactttgcaaagggtgacattgagatgagagaggcaaagaccgttgcatgggatcagacaccaagaggggtcagtttaagttcaaggcgagagagaggggcttctatactttatggattaactgctgaggagcttggagatcatatgagtagtctaacaaaccagaatacttgtctggtgagtagataa

SEQ ID NO: 31439 - DNA, 270 bp, Zea mays
  Peptide Sequence Number=SeqID_74814
atgccaggggcacatccggccaatagatgggtccgggcactgggagcgcgtgcgcaaagcggtatcccgaggtctgggccgtgcgatcgagaacagacggttgagatcaacgctgggggtttgcggttgcggacggtgccgctcctgctcctcagcggtgaagtcaccggagctggggcgggtgtgggctataggggttccgaggtcaccgggttggccaggatcggcgataagaacccggcgaacacacttgtggggttccggccatga

SEQ ID NO: 31440 - DNA, 801 bp, Zea mays
  Peptide Sequence Number=SeqID_74815
atggcaaggaaggggagggtcggccgcaaggggaaaggggggccgcaaggggaaagggaggccgcacgggagaggggaaggagggggaagaggacgctggggaggggcgccgccgctagggaagggagagaggagctgcacgtgcgaagagagaaaacgaagaactctatggcaacaatggatgttacaccaaatgacgagaccgcatcaccgcaaggttcgttttcccatatcgctttgcatgcttccgctaatcatgatgacatgaaaaatgagatcgaggaggtggaagaagaggagattcacaaattctacatccatctcaacaaagacaacaaggtgatcttgatgaaactattgagaagaaatggtgaacaaggagagacgcttctcaagacggaaaaagtcctcatcaacacagaagacggcttggagaagatgaccaaagagcctaaggagctagtgagctctcatgatgatttggtcgaaaggtggtcaatgggtcgtaccgagccagcacggcccgagcccatcatgggtcgggccagtatagtcggcccgtggcacagcactattatatatcgtgccgggtcgggccaacacgtgggcctaaacatcggcctaagcacgacactaacactcttaattgggccatgccgggctgtgctcctaggtcgtactggtcctgggcctgtttcatatcagcacacagacacacagccatgggcccacggaccacggtcacaaacagacatgagaattcagaatatacatgcatacaggtgcaaagtgaagatataa

SEQ ID NO: 31441 - DNA, 486 bp, Zea mays
  Peptide Sequence Number=SeqID_74816
atgggggattcatgtatgatggcgtcgggtccccagtgggctggcagggagaaccataggtgctatctacgtgccatagtggtctttctagatgagaatatttgccaggggcacaccaattgctcactggagtggatgctcctccgccttggatccacgcaacgctcaactttaatcatcacctttggtaagccttacacttcgcatgagccccaccgtagtgtccatggcttcatcttcatccttcatataagcccacaacaactcctcactagtcgcttcaatggcctcaagccattcgtcatttggctcgctaaattgactcctatagcgataagtatatttcaggggtcatactttgaaggttatgtgctcttgaaccaagtctgtggtaccaatgtagcagcacacagtgttgaaggccatcagacatgcttgagctctttcagtatttacaatggtaggtctcgtaatgctgatgcatga

SEQ ID NO: 31442 - DNA, 177 bp, Zea mays
  Peptide Sequence Number=SeqID_74817
atggcgctacatataagtggtagtttttttgcacgggagttagaaaaatcttgcagagaaaaacacgatgaccttgacgcactggatgttagatgttgtgatgacccttatgcattctgtggaattaccacaaacttgaggtaccattttggaccacatcagtttttgagaatatga

SEQ ID NO: 31443 - DNA, 1164 bp, Zea mays
  Peptide Sequence Number=SeqID_74818
atgaaccgcctcaaaatctgcacttgtacccacgatctatcattgtgtgaaagcttgaagctggaacttgtcgccaaaagtatcgagtcttcagacctcaacttctcacgttacggtgacaccttttttgaggtggtttttgttggagggcgcactcagccaggcactgtaaaacctgaagaaggagaccgccacccttattcggtgttagattgtgcgtcacagcgtgaagcaattttgcctttcgtactctatatccagaaaacattgcgcaggaggccttttttaataaagaatcttgaaaatgttatgcgtaaattcctgcaatccttggagttctttgaggaaaatgagaggaagaaactcgccatattcacagcccttgcattttctcagaagctatcagggcttcctcctgagactgtgttccagccattgctcaaggataatcttgttgccaaagggatagtactttcattcattactgagtttttcaaggagtaccttgaggaaaacagcttggatgatttgattgcacttttgaagaaaggcaaaatggaggacaatctgttggacttcttcccatcagctaagagatcttctgaggctttatctgagcatttcaccaaagaaggtctgactagccttgttgagtacaacgaaaagaagatgtttgaggttaaacttaaggagataaagtcaacactgactgctatgataaatgatgaggctgcaatatctgaagtgattgagactgtcaagcagcaagttaaggatgctaaatttcctgatttagaggttattcgcatgttgtgggatgtgctcatggaggctgttcagtggtctgggaagaaccagcagcaaaattccaatgcagcacttaggcaggtgaaagcttggactgagcttttgaatgctttttgcacgagtggcagactcgaactggaacttatacacaaagttcagacacagtgctatgaggatgctaagctgatgaagctgtttccggaaatcataagaacactgtatgaccaagatgtcctagctgaagatactatagtcctttggttccgtaaaggttcaaacccgaagggcaggcaatcttttgtgaaagctctggagccgtttgtcaaatggctcgaggaggctgaggaggaagaataa

SEQ ID NO: 31444 - DNA, 369 bp, Zea mays
  Peptide Sequence Number=SeqID_74819
atggggtcctggagcttaggtagtggattttgggttgttggaagctcgaaggagaagcccactcttggaagcaattgcagcattctgttgagtgttgactgccctttctatattgagacattgtcacaattatttcagctaaacttgccaagaggcacgcggattaagacccgcaagcggaatattgcagctcctttggaccctgcatcattctctgatgcaattgttcagatctatttggataatggtggagacctggatcccactgcacacttggcgcctctagaggtctctattgtacatgtccaaaccaaggttttcaagtcgataagtcgagttgagtcgacaaggtaccgacttggtgactag

SEQ ID NO: 31445 - DNA, 282 bp, Zea mays
  Peptide Sequence Number=SeqID_74820
atggcgcagagggtcttcttcttcgcagcaaacctagatctcgcctcccgagagggaccccgtcggagaggagagatcataaggatctatcaagagcccccaagtgtcccatgggcaataacacacaccaatcagattcataggcacgtgttgcattgcgtcggcacacaggttttggaaacctccccatgtgggggagaggtcttcctagccattgcgggcctgccttcaccgcatcacatcggcactgcactgacccgcctgacttcaccaccaccctag

SEQ ID NO: 31446 - DNA, 423 bp, Zea mays
  Peptide Sequence Number=SeqID_74821
atggcgttcaactcacggtacagcctgagtcaagaagccatcgatggtttgttgacagttattggcagcctgcttccggaggatcacgttctgccaaagagcatactagacatcaagaactttacaaaaggtaacgtagtgacaaacagcgcacctgcaatgatgactggtgccgaagttcatcaacatatagatggtctcgtggtcagtccagaaggtgattttatgggatatgagagaagtgcaaaccaaagagaagccgaagtccagctcggtctggcacaccggagtgtccggaggtgcaccggacagtgtccgggcgagaggctccaagttgtggagattcctcgcaaacgggagaagactaagaaaggaaaaactgtggtattcaagttgatcatcggatcacttgaaaggggttga

SEQ ID NO: 31447 - DNA, 834 bp, Zea mays
  Peptide Sequence Number=SeqID_74822
atgtcttcttcctcccttatgcgtcgtgtctttccatcttccaagcccccggatggggggtatccgccgtctttccgcctcctcgctggaggaacgcaactccgtgggagttggtacctttcagccatcgttcggcttcaaggattttcatcatgcggcccgggcgcttccccccactggtggtcacccgagacggtgaccgccagttcctgggtggggagaagcaagccgggctgcgatcttggtcccaccctcagcttcaaggatgttcatcatcctcgctggggtgggggccgggctgagccggcgctctacctcccacgcgggttcgcgggtcaccccttcccgcggtgttcgagggagaaggcgctcactggccctgcgggcggcgcaaacttagacaacgtggggctgatcgacggcgggcgtcgtcacctccagcgtgtcggagtcgtcggcttggctcccggcggcccctcctgccggagggcggctgccgcgccggcgccctcgcgcagaggccggtgccccactcgtctgggaggatttgagtggggatctgccggggggctggtggcccccgccatcagcgccgaggcggaggcggctcgagaagtccccgtcgccgacgggatcactgccaccatctgcgccccgggcctccggggtaaccggccgagccgcctgctcgggccggattcccggagaagtccctggaccgcgtcgccgtccgaggctgggtcggatctcgctaaaggcgtcgtcgatgccgagggtgccatagcctccttccagcgtgaagacccgagcctgcaggatcagatcgccttgtag

SEQ ID NO: 31448 - DNA, 60 bp, Zea mays
  Peptide Sequence Number=SeqID_74823
atggcgactcctcggtccgaaggcacggtgacatatcgcaaggagcggcggtttttatga

SEQ ID NO: 31449 - DNA, 327 bp, Zea mays
  Peptide Sequence Number=SeqID_74824
atggccggggcagggggacggggccggggcgaggcggggcgccggggacgcgccggggcgggcgggatttggcgcgccacgcggggggaaaggggagggccgcaccggacgtccgcgctgagacggggccgcatgccgggctgcgccgacgagcgcgccgcgccggggcaggggagcgcgtcgggccgcgccggcgagcgcgccgggtgcgggacaagggagcgcgccgggcggtgccgagacgtcgcgccgtggggagggcgtcgcgtcgagcgagaccgaggccgggccatccgcgagcgcgccatggctcggtgggagtggtag

SEQ ID NO: 31450 - DNA, 414 bp, Zea mays
  Peptide Sequence Number=SeqID_74825
atggtgtgtgcggaccgcgtgggcaatcctgccgccacagccatgcccggcgatctggggtcccaaaccacaagccacaacatgctgtctaatcctaggaacatgttcaggtggcacgccgaaatcatctgctctttcgagaagacccacaaccatggcatccggtggaaggggttctcgcctgagggtactcttgacgaggtagatctctcggtgccctcggaagagcgccctagggctttgcatcaagaagtcaactatatgttggctcattcgcaccatcgtcactatgagtctgatgaatgcatccggacacatggccattcgcttcgtccaagagatcatcaaacatcggtactctccaacaggcctagttctgggaagtcacaaaggggaattccctttctagactag

SEQ ID NO: 31451 - DNA, 330 bp, Zea mays
  Peptide Sequence Number=SeqID_74826
atggggaagcctgtcccatcactcctcatgctcctcctcagccgagcaatcaacaacttttgccaagtcatcacatttccacttgttactcaatgtagcagcatggatcaaggagtctcattagctgcgagaagcagacgattcgaatcgagtttcaaccttgcaagtgaccgcacttgtacccaccataaccggaatgggaaaccacgtctctggtcgcgtgaggagggcaatctgcgggcagtttcactcaggtttgaggttttgcttagaggcaactgtagtggattaaggtttggattgcccttaaaggtcttagtagattcatag

SEQ ID NO: 31452 - DNA, 315 bp, Zea mays
  Peptide Sequence Number=SeqID_74827
atgggcgtgcctgacttctgcgcgcgctggcgcacattcaatgcgctgcagggtcaacttgaagaagggaagcaaggcaccaacgagtttgagtcgaggatgactcaaaaccaagaaatggagaatgatgagtacatggatgtaaactatatggtaaaggcccaatcaatcatagattcccatgctcaaggggagttcaattccagtttattcgcgaatcagttcacaggatgcgaagtggattggactgaggctctaaggatgcaacacctcaaagaagacactataagactcatagaagacattacaaagtaa

SEQ ID NO: 31453 - DNA, 255 bp, Zea mays
  Peptide Sequence Number=SeqID_74828
atggcccatgaaattataaagaaaagtgaaaaagacacccatgacgcccgagcagaagcaagacgagctgaagaagcagcagaacgtgaaaattgtatagctgaattatctccaccaccggaaccgttcgatcccctagctgatcctaaaatgaaggaagcgctggacatcataaacatggctgaatccattgtcgacgaagtcgtcaacaaattgctgaacgaagttgcagagaaagttcttaaagaggaatag

SEQ ID NO: 31454 - DNA, 477 bp, Zea mays
  Peptide Sequence Number=SeqID_74829
atggtggcagcggagcacgacggcattgcgattgaaaagctctcgagactcttcaagtctgtcctgggctttgaggtggacaatagcaccttcatggaggcccaaatcagggctacgttctaccccaagttcgaaaatgataaatccgatcaggagacaaggaccagaatgattgagatggtgtcccatgggcttgcaaacttggagtcggtcatattcttcatccccgctgtcgcgcactgcaggggagcttgggaccagcatcagctggcggaagaagaggatgtcgacacacttccagagcatcagctggcggaagaagaggatgtcgaccggcttccagaggacattcttcatccgaataaatgcccatatgccgattgttacgagatagaaagagagattcttcatgccttggaccaaactgatggagacagatccacagaagatagtgcaacacctagcggtgaagcctag

SEQ ID NO: 31455 - DNA, 654 bp, Zea mays
  Peptide Sequence Number=SeqID_74830
atggcgcggccatgcgtgcccagcgcggcgccctccccgctgcgcggcgttttggccccgcccggcgcgctcccgtcccccggccatggcgcgctcgcggtggccccggtctcggtctcgctcgacatgacgcccacgccgcggcgcgtcatctcagccccgcccgacgtgctcccctgccctgcccctggcgcgctcccctgccccggcgcgacgcgctcgtcggcgcagcccggcgtgcagccccgtctcggcgcggacgctcggcgcggccctcccctttccccccgcgtggcacgcccaatcccacccgccccaacgcgtccccggtgccccgcctcgccccggccccgtccccctgctcgggccatggcggcccggcctcgccggccatggcgcggccccggcagcccgcccgccccagcgtgccctgtcccgcccgcctcggcgtgccccgccccgcccggcgcggccgtggcgtgtcggccccgacgcggccttgagctcggcccggcgtgcctatggcgcacggccttgagctcggccagtgcgtggccccgcgcggtcggcctcggcatggccccgttgccgctcgcagcgcacaacacggcgcgtgcgcggctcggccccggcgttgtaactcggtggaactag

SEQ ID NO: 31456 - DNA, 1632 bp, Zea mays
  Peptide Sequence Number=SeqID_74831
atggcccaagaatgttccgatcccccgcgcggctggcgaagacttctatacgtcccgcatggcacgcgacttgaagtgatgaacaaggaccatcaagacgctgcgcagaagcgccgggccgtcgtcaggatggtggatcctgcgcgcgaggcgaagagggcgcgagggagcgcgaaggctgctgcctccggcagtagcaagccgttgcctgctgcgaaaccggctgcacccggacccagcgaggcgtcgacgggcgcgaagactgcagccgctggcggaaccaagcctcccccgggcggaccctcgaaaggacgggagccgtcatcacccgcgaagctgccttcgccggggagacgtgttgctgacttcggcacgaatatcagtgtcgaggattatgttgttggtaaagttttttttgatcggagatatgttgcagggtcgggtgagggacaattggttgttgtcccgccttcggttgcaaccacttcgccatcgacggtggtaagggcgaagggagccgcgcaggacccgtgggccgccttctgcgcgagcggcgagattctgacagccgctgccgctaaggacgtggcgggcaccatgtcccagcggctgagggaggtgtcgcagcagctgaagcaagcggccgacttcgtcgaccgtgttgcatcgggtgtcctgactgcggacgttgctgccgaagtcgagaggcttcggacgcagcatgcagatgctgtccgggagaagtcggctgcggaaagcaaaaaccgcaggctggcggagaaggtggccgccttggaggccgagaagacggacctccggcgccggctggcggaggagaggagggaggctaaccaggccgtcgctgaagcgcaggctgcgcaagcggaggctaaagtggcgcgggcggagagcagtctcgccaaccaacacgccgaggagtgggaggcgaggttcaacgccctgcgcgaccgcgtggacaaggccgaggcttcggcgcgctcggaagtcgagcggacgcacgcgcagttcgtggatgcgtaccgcgatctaggtgcgcggactgcagacttcaaagtacccgaccaagaggcaggccttcgcttcctcgaatggttgcaggaggagctgctggtgctcccgaccattgtgcagggtttcatgtccttcgcctccctcgtcatctgcgaggggaccctgaatgcgttgtcccgcgaggggtgccgacactacgaggtcttcgaccaatcagacgagaactttgaacgtgaaattttcaaggccgaagaccctgtggtgaagcagtcagcgggggcactcttcgataggatgtggggtccgcacggtcgggaggcggttaaggagcggtctaaccgggcgatagagcagatggcgcgtgtcgaggatgtcgaggaccttggagatctggtcggcgcgccgcccaaggctgaggtcaacccggtgccgccttcgagtgccggtgaaggctcctcggctgcgcccgtgcctaccgtggccggtgaaggccctttgccagcccctgcgccgacggccgaagatcccccgaaggtggtggctgagccgacagccgaagaccccacgaccgcggccgggccttcgcaggtggctaaatag

SEQ ID NO: 31457 - DNA, 501 bp, Zea mays
  Peptide Sequence Number=SeqID_74832
atggcgcctcctgttgacgtggtcggtctgttgtgccctaggttgggcgatgtggaggctcctccgaggtcgaggtcgagtctgtcttccgaggccgaggtcgagtccgagcccctgggtcgagcgaggcagagaccgtcggctgaggccagggctgagtccgagccctggggtcgggcgaagcggagcgacgccggcggcgctcaggctcgggctctcatctactgcgtcagcagcttcccctcccgcatctcgccagtcgcctcgcgctctcacctccggtcttccgcacactggccggtgaccctgcgtgcgtgcctctctctgtcctcccgcctccggtggatcctcaacggcgcccggccccggcggctgtgccgcgcgcagcctgaggcagcgggagccagcagccgctgctccaccaaggcggtcgcgctgctttgggatcgcttatgccccaaagcgaagcgttaccgtcctcttagcgcttcagcgcattga

SEQ ID NO: 31458 - DNA, 738 bp, Zea mays
  Peptide Sequence Number=SeqID_74833
atggcgcctcctgttgacgtggtcggtccgtggtgccctaggttgggcgatgtggaggctcctccgaggtcgaggtcgagtctgtcttccgaggccgaggtcgagttcgagcccctaggtcgggcgaggcggagaccgtcggctgaggccagggctgagtccgagccctggggtcgggcgaagcggagttcgtcgtcttccggggcagagcccgagtccgagccctggggtctggcgaaccgggacagtcggagcggcgcaggcggcgctgtcctcttgtcagaccggtcagtggagcggcgaagtgactacggtcacttcggctctgtcgaccggagggcgtgcgtcaggataaagctttgtgctgatgggggttaccagctgagatttaggagtcttgagggggaccagcctttctcggttgcgttttgttccggtgggtgcgcgcgagcgcacccgccgggtgtagcccccgaggcctcggaggagtgcccgggtgcacggttgggtcccaagttctcgggctggtatgttgacgttgtcaacggtttggctagagccggggcgccgaacatggtgtctccggtgagctgctggcgggtaatccgagtggacgcccgtgccccatttgttaggggtcggcaagaggcctggaggcacgctcaaaagtacctgcgggtgatctgccggacccagtcccctttcgacggggtccgagggctcgatgcctccctctga

SEQ ID NO: 31459 - DNA, 405 bp, Zea mays
  Peptide Sequence Number=SeqID_74834
atggtcccaccacccgtgtacctcccttccatgcccgtcctcgagcgtgcccgctgcaggcatcacgccgctgccacagacgtctgtcgacggcgaggacgaggcctatgcatccagcgggcgacgaccaccaacagttccagcctgtcgagcctaaccagagggccgaggagcggtccttcgccgccttctccgtctagatgctcccgcagttcgtgcatctccccttccatccctgtcctcgagtgcgtcgttgcatacgtcattccgccgccagagtctcctattagcagcgtggccaaggccaacgcctatgcagacggcggcggcgaccaccaccagctacagcctgtcgagcctaaccagagggccgaggagtggtccctcaccgccttctccgtctag

SEQ ID NO: 31460 - DNA, 255 bp, Zea mays
  Peptide Sequence Number=SeqID_74835
atggccgagcccctgccccgattgcagctccgacatgagagtgccgtgcagccaagccacttaggccccccacgccagtcttctggagggcctgcccgagaaaaggaattgcatttgtatgttctccaattgcagcgaagtgtcaccgaacttgctgaggaagtgcaaagattaaagctccaaaacaataagcttgagcatcagatcaatatattgtcaagaaaagatgaaaggtcgtcaacgcaagataactga

SEQ ID NO: 31461 - DNA, 348 bp, Zea mays
  Peptide Sequence Number=SeqID_74836
atggaggtggtgtttgggcggcgactccggtcgggtgccgagcaagaagctgcgccagtccccctcccccgcatgttgtcccatgcccaccaggtccttagtgacactagggcagcaatcttgagggagtgggaggcgcttgaggctgagtaccagcgcctcagcgactggcgcacccaactggaggagcgcactaagacggcgtcccaacagttcatctccgagtggtcccaactcaagcgagaccgcaaggagtacaagagagacctccagagggtgtgcgctagggagctggaggcgtcccggagggagaagaaggtgaccaggagggaggaggtcgtgacctag

SEQ ID NO: 31462 - DNA, 2542 bp, Zea mays
  Peptide Sequence Number=SeqID_74837
gcgcactgttcgccagcagacccagcaggcgcgccgcctgctggattaccttgacgccgcctgccagcggatgggacgggacacattaaatgctaagagggcacgtcgccccgggtctccgcctgagcgggaagtgaaaggcaaggcctggacacatgtcagcaccggacccctactcacgcaagggtcctcctcgttccgggaccttgctgaggttcggaccttactcggaggctccggacttatacgtataggggtctggtgtccttctatggaggtccggaccccacgatacatactgggatgtgttgctttttcttgccacgtggcgccctttggcctgcccatgcggtggggccaggcaccgtcctccgcgtgtcctggagacgtcgcatgggtgcagcgtcttcatgctgtagaagagggtacccctgatttagggtaccgacagtggcccccgggcccacctcaggagaggatacaatcctgttggtggggccagagtctaattggcggttggcctgctgctcttgtgcgcctgttgatgcagttgctgccggcccgcctatgcgaagctgaggggcgcataaccacggtgcaattgtacgcttcccgcgtggcggttcgacttttcgacgctggtttcggcgaagatgagggagcgtttaaacacggggcagttgcatgctcctttgtgcggtggttcaccttcctgaccactggttgcaccgagaatgaaggggcgcataactgtggggcagttgcacgctccctgtgcggtggttcgccttcctcatgcttcggatggggtgcgccggtgttttctggagaggtctgcgtcagggccgccccctccggcgacctcaccgccggagagctcgcgctcgtggtgcttcaaggattttcatcatgcagcccggctgcagtcccccgccagtggtcatccagaaggatgactaccagccttgtggtggggagaagcaagccgggctgcggcctccctcctgcccttagcttcaaggatgttcatcatccttgctggggtgggaggcgagccgagtcagggtcctaccttctgcatgggccggggacccgcttcttcctccagcattcgtgggagaaggcgttcaccgaccttgaggagaaggcgaacttcggctacgcagggctggccggctacaagtgctgtcagctaccgcgtgcctggctccctggctcggatggccctgaggccgcctccgatgctgcctcctgccgcttggtcggggcgtggctgtccgtccaccgcacgggtgatggtcgcgccgtgcacgggtccgccacatccacggcttctcccgcgccactggccgtactgggggccgtacaagacgccgtacgccacgggggtggcggcggcgttcttggatggtcttgtcctcactccttgggaggacgggagcgaggacctcttcacgcgcgccgaggcagccaccgtccaccggtgcggaggtggccgctgtcgtcggtgctgaggtggtcacagccgctggtgaggctgctccttgcagagaggtggtcgccgccgttggtgggtctgtccggagccagcttccagcgcgactcctgctggtgcagcgtagtccattcctgcagaatggagctagggtccctcttggcggtggagtatgcaggctcacggtacgggaccaggctgagcggctacacggtttccggacccccaagcccggctgcagtcccccgccagtggtcatccagaaggatgactaccagccttgtggtggggagaagcaagccgggctgcggcctccctcctgccctcagcttcaaggatcattcggaggagaaggcgttcaccgaccttgaggagaaggcgaacttcggctacgcggggctggccggctgcaagcgctgtcagctgccgcatgcctggctccttggctcggatggccctggggccgcctccgacgctgcctcctgccgcttggtcggggcgtggttgtccgtccaccgcacgggtgacggtcgcgccgtgcgcgggtccgccacatccacgacttctcccgcgccactggccgtactggggggccgtacaagacgccgtacacaacaggggtggcgacgacgttcttggatggtcttgtcctcagtccgtgggaggacgggagcgaggacctcttcacgcgcgccgaggcagcagctgtccaccggtgcggaggtggccgttgtcgtcggtgctgaggtggtcacagccgctgaggtggtcgccgctgttggtggggctgtccggagccagcttccaacgctcacggtacgggaccaggctgagcagctacacggttttcggaccccccaggagacaagtgcccattcttcagagccaaacctccaggtaataggacaccagccacagagtggcggagcatgcaggcccacggtacgggaccaggctgagcggctacacggcttcgggccactccaggagataagtgtctcttctctagttccagaccccaggtcgtcggacccacatgacctatag

SEQ ID NO: 31463 - DNA, 399 bp, Zea mays
  Peptide Sequence Number=SeqID_74838
atgggcaagagcaacaaacgcaagcgcaagccgactcctccctcggaggatttcggcgactcggaatactcggaggaggagttctccgagtccgaggggtctccggctcccgtctctcccccagcgtcgtctgacgatccagacgactcccaggggcttgccgtggaggtctggacttatatccgggctgtcgagcactccgggctcgagggctcggatgagtcggagtactcctcggacgaggaggactcgtccgaggaggacggtggcggcgatggcgaagacaacgacggaggcgacggcggcgatgacggtgacggtggcggcaggggcggcaacatcggcagcaagggtggcaacggtggcagcagcaagggcagcaacaaggccagtggctag

SEQ ID NO: 31464 - DNA, 1152 bp, Zea mays
  Peptide Sequence Number=SeqID_74839
atggaccggtacctgacggtggagcggccacggaacgagtcaaccatcgaagagaacgggatccgcatcaccgcgcagggcctcatctgcaactatgtctcctacgctacctccctcctccaggtgcctgggcttgtcctcaccatcgccgtcgtatcggccatcgcgctctacctctgcaggaagaagatcagagtcctgatgttcacggtgtcgtcggagaggttcctgaagatccagagggaggcaccgccggagtaccagcagtacctcgtgcaggtgaccaagtaccaggccgcacagaactgcaagggcgagctgctgccatggtggctttttcttgcgggtgtgagctccgctcgccgccggtcttggacgccgtggctaggctcctaccacccctccctccacccgggactccacgctgccaccgccacacgacagtacgcatacactcttcttcctcccctcgctctggatggctggcgtccgctccctcagcgcctccgcccatgcccggctcccgcacttgccggctccccgatggagatgaatgaagaaaggaaggtcagcttactaggactagcagatatattatcagcctcaattggaggattctcatgggctcccttgatttcaaagatctgcaagaataaagtcgaggcggaggcttggtttactggtcttagtgccttgatatgtcgaagacagcatggatcccaggtccaacatatagatggaatccggattgctggacttcctattgataacctgaaaagttccaaggatgctttgttggatggtatagatggtggtgatgcatctgctgctgaagctgaaggaggctcagaaaaatctaccattgaaaaagagctagagcagcttactagcatattgcctgatcttgagaagaagcttgaggacctgtctgaagcaaacccaagcgctgacatggatgagatggtgaaggcaattgtgtccaggcgacaactggaagctctggaagcactaggcgtcaaacgagctagcatcaagccgatctctgccaaacctgttgctaagaaacctgcacttgattcaccatctctccaaggtgacaacagcatcaactctgaggttgtccctgcgacgcagactgatgaatccagctaa

SEQ ID NO: 31465 - DNA, 399 bp, Zea mays
  Peptide Sequence Number=SeqID_74840
atggcgtctgcatgtggagcgttgcgcaagtcgacatccctggcgtcaaaagtgagcggcggtgggggttgtgatgtggaggatttagatggtgtggaggcggtgggggtaggacctgcacctcttgatggtgatgatttgcacgattgggttgatgttggatttgctcgttatggtagtgttggtggtggtgttgctgggggtgtcctcgccatgaaacaagcagtaaaatcttcgcggctgctgggtccgtcctctgccccttcctcttgtgatgttgccacgaccttgagggggagagataactcggccaatgcatctatgctgggccggaaacccgctacagtttctacaaagagcaatgcaggaatcccccgtctgactgccatcgcagcataa

SEQ ID NO: 31466 - DNA, 195 bp, Zea mays
  Peptide Sequence Number=SeqID_74841
atgcgcacgtcacggctgattctttacttctcgggtatttccgtattggactattatggaatgcagatcagcaggaaacgacacaagattggtgaggtcatcgccaaatcttgcctggagaaagggatctccaaagttgtcctagatcgaggcagattcctctaccatggcataaatgacagaactcggtgctag

SEQ ID NO: 31467 - DNA, 781 bp, Zea mays
  Peptide Sequence Number=SeqID_74842
atgcagcatgcattatctttcttccaccttttgcagttgatacttattgtttggtcctctctttcgcagttcgatgccattcctccagagattggcatttcacggaattcaggcagtaagaaaactaaggaagaggaaggagcaaggagaaaagctggagcagtgaaaatcagtccatggacattggcgcggcttaatgcagaggaagtctcaaaggcagccgcggaggcaaggaagaaatccaaaatcctgaaaccagttggaaaacatggcgccccagagaatagcagcaaaccagaccatttgcctaccgacaagagacgactagacaggagaggtttccctgctgaactctctcttgacccacttgcaactctatccgcaagcggcaccgaaagcaactacagtgacgcagcaacagaaatatgtggcagtctagccccgttacagctcgaagcgagaagtgctttccaaccgagtactgcagcgtccacaagaaatgttgcttcatcgcctgaaagtagctttgactcaccaaatctccaccccttccgcacttcctcggccacagctgatgagatgcagggagccatgatgcatacagctcacaggggcatcgagtttaaaagatcgtctagcgatggttatgaagcatcaagaggcgaagatagcgaccgcatcccttcaaggatcgtgcacaggccgtcaaactgggccagtgtctttctgaattctagtcagggagaccctccagctgatctgctgtcggcatcagctgaag

SEQ ID NO: 31468 - DNA, 1785 bp, Zea mays
  Peptide Sequence Number=SeqID_74843
atggaggagcttcttcctactagtgctagcagtgtgatagaggagaagtgtggcaatgaagatgcatcaaaatcacagacttccaactctgatagggaagtgggcagcaatgagaaggccatcgaggaggatggttttgttaccacggttgaggctgatcctacttccaaggagattcttctgactactgcgggagaaaatgaggaatgggcttcagatgatgataagaacagtgaggagattggctgtattgacgagattgatgaagatgcagatgagaccaaggagcagagttacacctctaacgaagtccaaactttgcgacacactgggacagtagaagaggtaaacgaagatgcctccgttaaaacgaagagtggcatttatcttttagtgcccggggaacaccaggttgttgatgcatttgcaaccaaaactgcaaagtcattggatgatgctataaatataggccaagaggaggagggtcgtgaggtggctgatgctactaaaaatgcaatgaaagatattgacaatgatatgaagtacagggacggggaaggagaattaaaggagagattagctcaaaatcgagatcactgtgatgcgctcaatcaggacagtgacactactctcttgagactcgatcttgatcactgggaagagacgtcggtcagctcgtccagccttgccatgagtgaggacttgttgtctgtatttggggcccaagactcattactgcagcaagaagcatgggagcccatacctcacatggacctactgatcgcgaaggagttgcgtcccatggcagactcgaccttagatcttgcagttgatgttggagcaagatcaggcgggccaacagacaaaatgactgtctctacgatcttcgagtcggctagcagcacatctagcaggtcaggaacgggaaccacacccatgctgactacactcttgcagatggttcgcattgacaagttccagatagcccagtttgcattgagtgcgatgaatgagctggtccaaatggcgcagcggaatagaccattgtgggtttcaaccgttccctcacttggttcgctaatcatggagactctgaactataaggagcatttggtggcattttcaccatgtgttggagtaaagcctactgggtttatgtctgaggtttcaagggagttgggcattgttaccattggcagtagcgctgctcttgtgaagaccttcatggatcagagacggtggttggacatattctgctgcagggttgccactacagcagccgttgagaagatcttacctgttgcaggaagcagaaatggtgcattgctgcttatgcatgcagaactacaagtgttttcacctcttgtcaagttactcaccgattttttttggagggagctgaagcacacggaagcataccattctatgtgccaatgggatccacgagttgatcagtttcattggaatgatgatggcagcaaggagacacaatctctcctttggataattagaccatgggatcctgctttgtattatgttcaacggtcactggtgcataggccttgttcgaagttgaccttcaaggatgtgttgccagaagagattgtggaccggcgtctggtgaagaaagggggtcgaactgttccacatgtgcttgttcgaaggagtagggtgcctcacgattcagctacatgggaagagttctccatctttcgccaactttttcctcgaactcttgcttgggggacaagcaagttttccggagggggcaaatgtcacaactga

SEQ ID NO: 31469 - DNA, 102 bp, Zea mays
  Peptide Sequence Number=SeqID_74844
atgacggtgcgagctgaggagaattcctcgccggacttcacaaaccgctacctcccgtgggtggccctcaccggcactctaatcctaggtttgagcggataa

SEQ ID NO: 31470 - DNA, 258 bp, Zea mays
  Peptide Sequence Number=SeqID_74845
atggcggacacagtgcctggctctcgtgcagggcggaaccgcgactgggtatcctgggcatcggctcatcaattcccctgggcacgtagtgttctcggcgtgggtggccggatctcggccgtgcaacgaagacaaagaaaagcaccgcgcaatccatcgctagggaaagaagaaggtgttgccaccgtcgatccgttcgcggacggctggatctgtaagttgggtaccgcttcggccgggcgcgttttggggcgttga

SEQ ID NO: 31471 - DNA, 393 bp, Zea mays
  Peptide Sequence Number=SeqID_74846
atggaggcgagcgcggcagggaacaatgtgaggtcgcggtcgggcgaattctatggtgtggactgcatcgcggccaggacggctgccgtgacgtgcacgacgtcgccatgccacaacaccaccacgaccagggagcaggaggagcggccgagcggagctcgtagctgcgcgcagggacgaccaggggagcgcgcggcatgggcaggggcgagctcggcaggggcgtgcactatgaaggtcgagcagggagggagtaccgcgatgaggaagcttgggaggaaaaaccgcgacgcgcaggggagctcagctgagcgcgagcgagcagagggaaggggaaggggcgtggcggcctgggagctcggccgggcaccggagctggagcaggcgagctga

SEQ ID NO: 31472 - DNA, 288 bp, Zea mays
  Peptide Sequence Number=SeqID_74847
atggacggccaagtcactccagcaaccatgtcctccagagaacctgtaaaaaattatgccacaagcaaggctgagtatactaatactcagctagacttacccgtacaatggatcaagcagggtctcattagctgcgagaagcagacgattcgaatcgagtttttatccttgcaagtgaccgcacttgtacccaccataaccggaatgggagaccacgtctcaggtcatgtgaggagggcaatctgcgggcaggttcactcaggatttggtaaacattatgctaagtaa

SEQ ID NO: 31473 - DNA, 330 bp, Zea mays
  Peptide Sequence Number=SeqID_74848
atgggcaagagtaacaaacgcaagagcgagccgactcctccatcgaaggacttcgacgactcggaatactcggaggaggaggcatgtctggtgcgccaccggacatcaaggtgggcccagaagttagaactccaacggtcaatttccaacggcactgatgacgtggcgggggcaccggacatgtccggtgtgcaccggattgtccggtgcgccatcgaacagacgacctccaccaacggtcaagttggtggttggggctataaataccccaaccaccccaccattcattgcatccaagttttcaccttccaaccaccttacaagagctag

SEQ ID NO: 31474 - DNA, 441 bp, Zea mays
  Peptide Sequence Number=SeqID_74849
atgggcaggtccaagggcgccacgtggcaaggaaaggaagtgcattccatgtattcaacgttgggtccggacctccatagaaggacgccggacccctatgcgtacaagtccggagcccccaagaaggcacgctgggccccttgggaggatcccagtcccccttcgagtgaggtccgagccttggcaaggtcccgggacaagaaggaccctggcatgagtaagggtccgacgacgtcaaggtcacccaacaggcggcgcatcagaccagtctgtaggcaaaaagtacgcatgtgccgagcggcgcaccgtactcatcgtcccttctacaagaagcttcccttgcacgccgaggatatggagatctcgggtgtcagggcaccagaggaccgcctcagcagcaaaaattggaggttccaagagctatctttgttgtgtccctag

SEQ ID NO: 31475 - DNA, 1080 bp, Zea mays
  Peptide Sequence Number=SeqID_74850
atgcagcgagaagaactagaagtggacctgcagaaagttcgggaacaaatgctagctgtacaaccctctgggaaagcaaggagatatatggaagatggaatggttgatttagctgattcatctaggcacccaatagatatgcataatgaactcctctgtgctcaagagactattagaatacttagaagggaggtttctgagaaggaatcagagattgctcagtgcaatgcacatatctcagagctaaacgttcatgttgaggcagtggcacaagaatacaagcacaagatgaattctaagaaagatgaagagcttagtgctacgaaacaacgtattgtggaactcgagggcataacagctaggagacaaagggagtgtgctgttaatgctgttaagagcgtgtatgaggcaacggagggcaataacaaggactcatctgacacacaagttaaactgaagttccaacaggtcttgcatcttatggcttcacattcgccatttatgtttcatctatacatcaaggcacgttctgttcctatactgtctgctgtcaaaaatagatattataaggttactgatggggctttgcgggcgtgcggagagacaacctcggttgtttttagaccatacaactctatgtggtcgattacaacatgctttgggattgatttcaaaaaaacaaaaaacaaatgcataaatatgagaaagaagctaaagaaaaggattctgggagttgaggagagtgcttcacaacaagagatagagaaggcgtatcacaaattggctctgcgcctccacccggatacgaatcctgggaacgagacattagatcctgttttcaaccactgtagggcgcccgaaggggcgcctgatgttctagtggatgttggagacgaaggggaaatgcatgctcagccttcatgctctgctactgtggggcagcgtaactgcgtaaccccacaaaagatacaggcggtggcgctcgctgattcgccatcatttctcttttcgcgcaacacaacacaggtctatcctaacggcggacggccagtggaaatggaaactgcgcttatccaatag

SEQ ID NO: 31476 - DNA, 507 bp, Zea mays
  Peptide Sequence Number=SeqID_74851
atgtacccggtggtgacgggcacgccgccggcgcggctgccggcggcgtcgcgggtggacaaggccacgagccacctgctgcagggccccgactgggccgtcaacctcgaaatctgcgacaccctcaacgccgaccgctggcaaacgaaggatatagtaaaagctgtgaagaagcgattgcagcataaggatccaaaagttaaattctttactttgacggtgcggactataatcaatctcatgatcaatgatgtttctgtaatatttggtgtgggattacaattattggagacaatgatgaagaactgtggtgaatatgttcattttgaagttgttgatcagcatattttacaagagattgttaaaattgtccagaagaggcatgatatgcaagtgagggataaggctttgttacttctggattcatggcaagaggcatttggtggacctggtggcaaatatccacagtactactggtcatacattgaactaaagccctatggctaa

SEQ ID NO: 31477 - DNA, 447 bp, Zea mays
  Peptide Sequence Number=SeqID_74852
atggacgagtctggtgtgaaaaaggagatcggaagtcagatggaggttcgttgccaaaccaacttttgccagaatgaagatggtttccccaagttgctgagagcatgtacagttcgcctcggaatcaggagccagccagagtatgatggtcgtgaattcgtcgagcatggcacacagaaagaaaccctccagtttggatggccaggatgcgtgcattggaaaggtcagcagttgattgaggacgacccctcagtcgtgtacctcactgcatacctgctcacccttgatacacagtatgatttcttggctcggcaccaccgtcagatgattgcccgagcagagatgcagagaagcgcaaccgtcaacttccatgtggatctcaccacagctcaagccccatatagctgccttgggaaggtcgtgaagtcattgctgtggaagccctga

SEQ ID NO: 31478 - DNA, 477 bp, Zea mays
  Peptide Sequence Number=SeqID_74853
atggctttggcgccgcctccggcgctgcctcctgccgctccggccggggcgtggctgtccatccaccgcacgggcgacggtcgcgccgtgcgtgggtctgccacatccacggcttctcctgcccgccagtcgcactgggggttgtacaagacgtcatacgccgtgggtggtggcgccgcgttcttggatggtcttgtcctcgctcctgaggacgggggcgaggacctccttgcaacggcgcacaccctgaggtggacgctgctgctggcaaaccactcggagtggtggtcgttgtcgctgctggtgcagaggtggctgccgccactggtgaggttgctcggagccaacttccagcgcaactcctgctggtgcagcgcagttcattcctgcaaaaatggagctagggccccgctttgttttggctgggggaaccaagttgtgcgtctggaccccctggatggtggttctaggtactag

SEQ ID NO: 31479 - DNA, 174 bp, Zea mays
  Peptide Sequence Number=SeqID_74854
atggcggtgggtgcgctgcaaaagggggcgtggggcggtagtgcgctgcaaagggggcgtggggcggtggtagtgcgcatggatgtgggcacgcgtgcgaggggcacgagggctctaaccaaagtgaagaaaaacttcactacccaatgcatgcagaggactgggcataactaa

SEQ ID NO: 31480 - DNA, 1602 bp, Zea mays
  Peptide Sequence Number=SeqID_74855
atgacactgcccccgctcccgcaccccgcgcgccagccaaacctctgctcccgcacgcccgtcaaaccgccgctcccggaacgcccgcacgctagcaacccccgctcccgcacgcccgcgcgcgtcgacgacctcgctcccgcaacggactcccgaacgccccgtcgtcctccactacctaaacgacgcatcagccgcgaaatccgtcccggacgtggcgcctcccacatcgtcgtccgtgtcggggcgcttcctgccgccggagagccccacgaccacgtggctgaagaagcggctcctcctaagtccctcgtggccgcgctccctccggatccaccggcgggcggcagcggctgctgcgccgcggccgtcgccgacgacggcatcacgtgcgacttcctgctgaagctgctccgcgcggggagcatggtgggcgcggatacgacgctgctgcgggacctggaggcgcgcgtggcgaggcggctggaccaggcgacgctgggcgccgtggtgataccggcgttcggccacggcggcgagcacgcgccggcgctgctctggacgtgcccctcgtgctgcgcctcgtgcgcgggttcctcaaggacggcggcggcggcagcaaggccgcccgcgtggccaggctcgtggacgtgtacctggccgaggccgcgctggaggccggcctacgccccgccgagttcgaggagctcgcgcgcgccgtgcccgcccacgcgcgccccgccgacgacgcgctgtaccgcgccgtcgacacctacctcaaggaaactagatgtgcctgatggtacagtaggagtacccgctaatatccgtcccagatgtggctggtggaaatgtgcggacggaattccccaagcaagctacaacagcgcctgcaacctgctcagggatcttgcaggtgccaacagaaatcctagatgccctgggtgtgcctttgcggcgcacccaagcactgcgaaggaggagcgcaagtcgctagcgcagctgatcgacgcgcgcaagctcacggtggaggccgcggcgcacgctgtgcagaacgagcgcatgccggtgcgcgccgtggtgcaggtgctcttctcggagcacggcaagctcaaccgcctcgcggagctgagcgcctccttcagcggccagcgcagccccagccccaacccggcgctggagctccccggccgctgcccctccaagtgcgaggtcctcgcgcagcaccaggaggtgcgccgcctccacgacgacgtcgccaggctccaggtccgtcagtcggcttgtcttgagttctcgagcccgcacatgtacaccaacttcggtggtgctccgactgacgctgaaacatacgtgtgctctatggtgcaggtgcagtgcaacgcgctgcaggcccaggtggacaggctgggctccgagaggcgtcggcgcggcggtggcgggttcttcaagtggagcgtgttctggttcggcggcggcatgggcgccgacgtaggtcgacgactcggagagcggcatggagcgccggacgccgcccaaggggaagaagagcgccacggcgacgcccaatgccaagtggtgcaagtccacgtcctgagatga

SEQ ID NO: 31481 - DNA, 288 bp, Zea mays
  Peptide Sequence Number=SeqID_74856
atgggtttgttaatgggttcaaatggaaacccaacggtgggtatgagaaacccattgggtattcgaaacccgcatgagtatgagtttgggcaaaactttatacccgtcatggatatgaggtttttaacggacatatttttttttcacgagtatgagtttgagcaaactcttagctcagccatcacacttatgacagaatatagagcttttaaagtagagttagcagttggcttgcttgtcccgggagcagaggcaggcagtgacagccatgcaaactgggagtcgtga

SEQ ID NO: 31482 - DNA, 1590 bp, Zea mays
  Peptide Sequence Number=SeqID_74857
atgcaggcggcatgcaaccgcaccaagggggcgcaccctttcgactttgacgcgtccagcatggaggcccaggcccacacgtcatgtaaccggcgcgccggttactacgtgcgagaaactacatcgccacttacgccagtaccgcgcctcctcgactgcagaaccggtgccacgactcgaggcaaccctgtgcatggcccaacagtgccaaccgagcacatcggccacgggtcagtccgccgcgggagaaggcgcgacggtcgatatggccaaaagtgggctggcagtgatggcggcgataggcgggcggaagcagcagtcaagtcgtctgcaggctcacgtccccttctcggacaacgagagaaccctctcccacggcgacatctttggcaggcgaagcgggcgacgcttcacctccgccatgatgaccgtgtcaaaaaagggaccgggaaaggggatactccgaaaaggatccttctccacgaaggaagtgggccccgagcccccctactaatcagaggttcgaaggctggcccctcagaagggttcgatagccgcctcagagcactcgggctccgcgcccactactggtcaggggttcgaaggctggcccctcaaaagggttcgacagtcgcctcaggccactcgggctccgcgcccactactgatcaggggttcgtaggctggccctcgaagggttcgacagccgcctcagagcacgtagagcgagagatgactctgggtacgtccgatacatggccgaggctcaggctacgctcccgaggtaccctaggacatttccgagaccagcaggagcgattctgtaacggaatcccatcagagggaggcatcgagcccccgaaccctatcaaacgggaccgggtccggcaaatcacctacagaagctcgggggctgctctcgcaaacccggctccggccaaaccgttgacagcgtcaacataccagcccgagaactcggaacctgactatgcacccgagcaacaaccacccccgagcttcgagtggatttttgaggataatccactcgaaggtcttcgtttcaagcctttttccgagaatcatccttcctttatgccggatgctttggagtgccttttttctcttcggctttttcacatctcttgctgttgtttatttctcctcttcttccctccactgccaccatgggcaagagtaagaaaggtagcggttctttcgcctcgctctggtgacaagcgcaaacgtgagccgactcctccctcggaggacttcggcaactcggagtactcggaggaggagttctcctccgagtccgagggatctcctgctcccgtctctcccccgacgtcgtctgatgattcagacgactcccaggggattgccgcggaggtctggacctacatccaggccgtcgagcgctccgggctcgagggctcgggcagcgacggtgatggtggtgatgacgacgacgacggaggcgacggtgatggcggcggcgacaacggcaggggtggcgacggcggcagcaagggcggcaatggcggcggcaacaaggacagcaacaagggcagcaacaaggacagtgactag

SEQ ID NO: 31483 - DNA, 492 bp, Zea mays
  Peptide Sequence Number=SeqID_74858
atgtcgaagcggctgctgtcgcggctgctcggcatgttccaatcgcggacgcaggtgggcgtcgacaaggccggcaaccgctacttcacccgcgttgaggaggtcgacggcacaatcgagtggatttgctggctgaatggccaaaggaagaaagctccaacaccagaggaattggctgagctggaggcaagacgtgaacgtgtcaagcaaaacattcagcttctcaaaaagaaagaagaagaggaaagaaaaactggtatccaaccagtcaagaaaattgggaaagctgaatctccaaatctccaaagtttcgtgaagcagcagttctcgggtactcctccagatcagcagaaagttaacactctaggacctgaggataggcctaaggacacaactcatacagaagatgctacgacagacaatgagaggtatactgaaccaacgggaactggtgccactttcaagccagggacttggcagccaccaacatga

SEQ ID NO: 31484 - DNA, 363 bp, Zea mays
  Peptide Sequence Number=SeqID_74859
atgagcgaaaggaattgggcggagactcactggatagcttggtccacgcgcggtggcggaagaccgaagtccggtgaggtcgatctcgggcctccggtgaagtccggtcgggtccgagggcttggcaagcttcacgggctactggcggagctagccgaagcactggcttgcccggaggatggctggggtgggctggccacggtggccgaagctctggcggcaatggcgggcggaattaagctcgccggagctaaggggaagtggctggccggtgaggccgtggtcgaacacgtgttcccgttgcctctgcccctgttcaagcgccgattgggagcaaatcttcgtgaattgacgaatctctag

SEQ ID NO: 31485 - DNA, 252 bp, Zea mays
  Peptide Sequence Number=SeqID_74860
atggcttctctcttgtcgggcgtgaaacagcgcaacatttgtcggatcggcctcacctggggaaagacctttagtttatgctcgaaattggacgagcgcgccttcctatttgtcatccaagctggagctaatgatggcggttttgcgttcatcagcgaacccgaggttaattcttttcgtttcctcagtcggccgcatagaggtcataacttgagcttcgtttgcaggtactgcgaggtcctccttaggtga

SEQ ID NO: 31486 - DNA, 627 bp, Zea mays
  Peptide Sequence Number=SeqID_74861
atgcagctcgtcccacgcgcacgtggtgcagatgcagcagcccactcaccccacgttctctctctcccccgcgtggtgtgtagctcgcgcgacctgcgcacacgcgccttcgacgcagtcgtcacagcgccggcggagacgctgctcttcttccccaaaaatccccaactgcccacgcctcgcgagcagttcggcaatttctccattccctctccctcaaacgctagaaccgcccgcctctctctgctcgcctgcgcggcttttcccctgccctcgccgttcgtcgtcgtgcgtctgcgccttgccgcgcaaccgccatcgtcgtaccttcgaccttcgctcgccggccatggtggacgcaggatgtcgccgtcgatgctgttctccccggcgcgctcgtcgttcgtacccgcctcgtcggtcgtcgtcggcaagtgtaggatggcctatgcgccactaaccttcgtctcgccgtgctgcgcgccttgccagtgcggctgtgcagagccacctggcgtgtcgtcgttgtcagcatcgttcgtccccgcagcagcctcggcgcagtctgtgcagcaccctcgctgtcgcatgattcgcgccgcgcgcagcacgtctgtttgcgcataa

SEQ ID NO: 31487 - DNA, 195 bp, Zea mays
  Peptide Sequence Number=SeqID_74862
atggctgggcgatttggcctggcgcgcggcggcacggcggttgccgctagcctgcagcgcgagtgcgcactacgcgctggctggggcgctggccgagccggcccgggcggctgggcggagctcccacgcgacccaggaaaaagagaagaaaaacaaaaaaaggggagggtaacacctgaatttggtggatattag

SEQ ID NO: 31488 - DNA, 614 bp, Zea mays
  Peptide Sequence Number=SeqID_74863
atgcagctcgtcccacgcgcacgtggtgcagatgcagcagcccactcaccccacgttctctctctcccccgcgtggtgtgtagctcgcgcgacctgcgcacacgcgccttcgacgcagtcgtcacagcgccggcggagacgctgctcttcttccccaaaaatccccaactgcccacgcctcgcgagcagttcggcaatttctccattccctctccctcaaacgctagaaccgcccgcctctctctgctcgcctgcgcggcttttcccctgccctcgccgttcgtcgtcgtgcgtctgcgccttgccgcgcaaccgccatcgtcgtaccttcgaccttcgctcgccggccatggtggacgcaggatgtcgccgtcgacgctgttctcctccccggcgcgctcgtcgttcgtacccgcctcgtcggtcgtcgtcggcaagtgtaggatggcctatgcgccactaaccttcgtctcgccgtgctgcgcgccttgccagtgcggctgtgcagagccacctggcgtgtcgtcgttgtcagcatcgttcgtccccgcagcagcctcggcgcagtctgtgcagcaccctcgctgtcgcatgattcgcgccgcgcgcagcac

SEQ ID NO: 31489 - DNA, 411 bp, Zea mays
  Peptide Sequence Number=SeqID_74864
atgacggtggcaggcgagcgggagcagcggtcacgtcgtcagccaggctcacgtcccatccaggggcagcaagagagcctcctctcacggcgtgaagacggcgcgcctgtgatccgtccctcgaacggctcgcgcacgcgcagcggccgccccgccaaccactcgccccgtcgcattaactccgcgggaccgggaaagggggacaccctgaaaaggatccttccctatgaaggaaccgggctccgagcccccctactgatcagaggttcgaagactggccctccgaggggttcaatattcgcctcagatcgcgtgggccctacacccactactggtcagaggttcgaaggccggccccccgaagggctccacggccgcctcaggctactcgggctccgcgcccattactga

SEQ ID NO: 31490 - DNA, 162 bp, Zea mays
  Peptide Sequence Number=SeqID_74865
atgaagccaaacctttttcggatgaggggtaacaggcgtattgcgatgaccaacaatgatgcagagaagaaaaacaacaggagcagcaagaggcgatgcgctaggaacacatgcatgcattatggctctcttgcacgtagaaggtgggggcaaacaatctga

SEQ ID NO: 31491 - DNA, 411 bp, Zea mays
  Peptide Sequence Number=SeqID_74866
atggcgcatccaccagggcaggttggcgatggaggagaggcgtccatgggaggagaaacagcaaacaaaacttcagacatatccagggcggagctcgctgcggtatttcatcgagcacttggcgagcgtcgcgggtatgggtttggcactggtatgatgctgcagcaagaagggaaagaggagacatccggtctagtggcgtggatgttggagcagggagctcacgacgctgagatgcacaggcgacatgctagcgacgcagggagtggtggccgacatggaggggagcaaggacgagatggaggtcgaagatggcagcttgacgatgatggcgcagcccgtcgagccctggtaagtgaggacaacgagttggggaaggagctcatctacctcgacaacggcaagggctag

SEQ ID NO: 31492 - DNA, 330 bp, Zea mays
  Peptide Sequence Number=SeqID_74867
atgggcacggcggcgcactcggtgctcgggctcggcggcgctcgggctcggggacggggacggcggcgcttggcctcggggacggggacagaggcgctcgggctcggagatggagacggcgacgctcaggctcggagatggagacgacgacgctcgggctcggagatggggacggggacggcggagttgggctcggggacggcgcggcgtggcgggcgcccagctcggagacggtggcgcttgggctcgggctcggcgacggcgtggcgggcgctcacggctcggagacggggacgggaacggcggcatagtatcagcctggcggcgtag

SEQ ID NO: 31493 - DNA, 204 bp, Zea mays
  Peptide Sequence Number=SeqID_74868
atggagaacgcagaagtgcacattttgcacttgcacacggcgttcagggatctcatgcaccagtgggattgcagtggcttgcccaacggtgaacgcttccaacatcgcatcatcaacaatatgaagaacttcgcgcatacgacgtatgcgcatggaaacgtgctcagtggcaaatggagaaagacaagagagagagacaaatag

SEQ ID NO: 31494 - DNA, 1350 bp, Zea mays
  Peptide Sequence Number=SeqID_74869
atggtggttagcgtggccgcgaccgggcccggcacggacgccgagccggtgagctccaccttcttcgcgtcccgctacgtccgcgacccactcccacggtaccggatgccggagcggtcgatcccgcgggaggcggcgcagcagatcatcagcgacgagctcatgctggacggcaacccgcgcctgaacctggcgtccttcgtcaccacgtggatggagcccgagtgcgacaagctcatcatggactccatcaacaagaactacgtcgacatggacgagtaccccgtcaccactgagctccagaaccgctgcgtaaacatgatagctcacctgttcaacgcgccgatcaaggaggacgagacagctattggggtcggaacagtgggatcctcggaagcgatcatgcttgcaggtctggcgttcaagaggaaatggcagaacaagaggaaggagcaggggaaaccgtgtgacagacccaacatcgtcaccggtgccaacgttcaggtctgctgggagaagtttgcaaggtattttgaggtggagctgaaggaggttaagctatcagaagggtgggacgtgcctatccacgtcgacgccgcgagcggagggttcatagcgcctttcctctaccctgagctcgagtgggacttcaggctgcctctggtgaagagcatcaatgtcagcgggcacaagtacggcctcgtctaccctggtgttggctgggtcatctggcggagcaaggatgatctgcctgaggagctcatcttccatatcaactacctggggacggaccagcctacgttcacgctcaacttctccaaaggttcctgtcagatcattgcgcagtactatcaactcattcgcctaggcttcgaggggtacagaaacatcatggagaactgccaggagaacgcggcgatactgcgggagggcatcgcggcgacgggccggttcgacgtcctgtccaaggacgccggggtgccgctggtggccttctcgctcagggacagcagccggttcagcgtgttcgacgtctccgagaacctgcggcggttcggctggatcgtgccggcgtacacgatgccggccgacgcggagcacgtggcggtgctccgagtcgtcgtcagggaggacttcagccgcagcctcgccgaacggctggtctcggacgtccgcaagatcctgcgcgagctggacgcgcgcgcgacccacgccgtgagggtcgccaccgccaccgccgagcagtcgggcgacggcgtcgtggccaagaaaagcgtgctggagatcgagcgggaggtcgccgcgcgctggatgaacgccgtgaacaagaagaagacgggggtctgttga

SEQ ID NO: 31495 - DNA, 1194 bp, Zea mays
  Peptide Sequence Number=SeqID_74870
atggaaataccctcactcggcggctggactgcgattctgaaagtgttctcgcgtgtaccgaatgacaggggtgctcctctatttaacctctcgcagagggaagctgaaggagaaaggtcgccgagtcgttatgccattagtcggccagctctcgccgagtcacgccatgagtcggcagctgaaggagaaggcgtgcgtcggttaggttcttgggaggtgggggtgtctcggggattcgtcgtggcgtgcaccggcgtctgcccccacccgcgcctagccgcgaaggtgaaacccagatccctgcctccctggccgtacacgtgcccgaccgcctcttcccacctcggcgccgcggcggcggcggcgcaccttttcctctggaaccaccgaggcaccgtggagttcttcctcctgggcctgtgcgcgtttagacgaggagctgcggcggccaagaccaatcgaccatggctaccctttgagaacaactgtgaaattggtgttttctccaagctgacaaatgcttactgtctggtagcgattggagggtcagagaacttctacagtgcctttgaggctgagcttgcagatgccatccctgtggtcaagacctctattggtggcactagaataataggccgactttgtgttggaaacaagaatggacttctattgccacatactacaaccgaccaagagcttcagcatctgaggaattgcttgcctgatcaagtggtggttcagcgcattgatgagaggttatctgcccttggcaattgcatagcctgcaatgaccatgttgcacttacgcaccctgaccttgacaaggagactgaggagttcattgcagatgtgcttggggtcgaggtgtttaggcagactattgctggaaatatccttgtggggagttactgcgccttctctaacaggggtggtttggttcatccccatacatccgttgaagaccttgacgagctctccacgctcctccaagttcctcttgtcgcaggaactgtgaacagaggaagcgaggtcattgctgcaggcatgacagtgaacgactggactgccttttgtggctcggacacgacagccaccgagctctcagtcatcgaaagcgtcttcaagctgagagaagggcagcccactgcgattgtggaggacatgaggaagtctctgatagacagttacgtgtaa

SEQ ID NO: 31496 - DNA, 375 bp, Zea mays
  Peptide Sequence Number=SeqID_74871
atggcgccccgcaagccctgtgacgacggcggctctcagctctcttacggaagcagggggatggccttcttagagaaggttggccgcgcggggacgaggacgggacaggcgctctcttggggccgctcgcttccctcacccgcgtggacgcttgtaaccccctactgcaagcgcacccgacctgggcgcgggacgaacacgaaggccgcgggatttccacctctctcacgcccgtctccggccacctcgcttccccccttcgcgctcgcccacgcgctcgacccatctgggctggggcacgcggcacactcactcgtcggcttagggaccccccggtctcaaaacgccgacacttatcatactgttgaacactga

SEQ ID NO: 31497 - DNA, 243 bp, Zea mays
  Peptide Sequence Number=SeqID_74872
atgggtgagacgttcctggtaaggaggggccatccacttcggctgcggaccaccggagagaggacgaagcaaaccatcggcaacaagggcctccagatcgtccgccgtgacggtggagaaaggccacgggtcgcgcggcgaaacaacggtcacccggtcagccatcaccaagcagaagaggtggcggcggagcggacaagggactgggaaaggggatactccgaaagggatccttctccgtga

SEQ ID NO: 31498 - DNA, 423 bp, Zea mays
  Peptide Sequence Number=SeqID_74873
atgactgtgtctctcgcctggggtggtaatggatcgcgatccaaatgcttctttacaaaatggggtaggcgcggacagtccggactcagggttcggacagtccgtgctaggctcaaacggtccagctgctggaggtggacgcaagttcagcctcaggcacaacaggaagctccgcctcgcccgaccctaggcctcagccttgggaggaggtctccgcctcgcccgaccccagggctcgacctcaacctcaacctcggaaggtggtctccgcctcgcccgaccacagggctcggcctcaacccctcgggaggaatcgcgtcctcgcccgaccctggcctcggcctcaggagaagactccgcctcgcccgaccttgggctcggaccgaccgcgccacgggggatacatcattaccctacccctag

SEQ ID NO: 31499 - DNA, 954 bp, Zea mays
  Peptide Sequence Number=SeqID_74874
atgaccattagtgaaggaatgcagccgggctgcgtgatgaaaatccttgaagccgagcgatggctgaagggcgctaacccccacgaggtcgcgctcctccaacagcagcaagacgaaggcaacgcgggtgccacccatccgggggctcagaagcgggcgaaagggcggaccgccatacaggaggcgtgcaaccgcaccacggttgtgcaccctttcggcttcatcgcatccggtgggctggcccctcggaagggttcgatagccgccccagagcactcgggctccgcgcccactactgatcaggggttcgaaggctggcccctcggaagggttcgacagccgccccagagcactcgggctccgcgcccactactgatcaggggttcgaaggctggcccctcagaagggttcgacagccgccccagagcatgcagagtgagggatgactctgggtatgtccgttacatggccgaggctcgggctacgctctcgagggggcgcaccatcggctcgcccgaggcccagctcgggcaggcttcgtcgagaagcaaccttggccaaatcgcctcaccaaccgaccgtatcgcaggcgcattcaatgaaaacagcgccgctcaccccgctccaactgctgtgccagccacccgggcaagactgacaacagcaagttcaccctcaagcgcaacaggaagctccgcctcgcccgaccctaggcctcggcctcgggaggaggtctccgcctcgcccgaccccagggctcggcctcaacgtcggcctcggaaggtggtctccgcctcgcccgaccccagggctcggcctcaacctcggcctcgggaggaatcgcgtcctcgcccgaccccggcctcggcctcagcagaagtctccgcctcgcccgaccttgggctcggaccgaccgcgccacgggggatacatcattaccctacccctagctag

SEQ ID NO: 31500 - DNA, 1203 bp, Zea mays
  Peptide Sequence Number=SeqID_74875
atgatgaccaccagttcgatggtggggagaagcaagccgggctgcagcctcagccccgccctcagcttcaacgatcttcatcatccgtgctggggaggagggcggggcaagtcggggcctgcctccgcgtgggccggcgacccgcttcttcctccggcattcgggggagaaaggcatcctccagctctgcagaggaggcatcctccagccacgcgggggaaggcgaactgctgctgcttgtacagggtgcagttgtccgtcctccacccgggcgatggtcgccggctacaccagggggtcgcacaacacgtcgtacgccgcgagggcggtactcgtgttccgggacggtcccgttctcgttcttgtggcgagagcgggagtgaggacatgctagtgcgctttggggcggccgccgctcgctggtgcggtgttggtgggcaggtggccgctgtcgtcggtgctgaggtggtggtcgccataggtgaggctgcttctgctgaagcggttgcccctgctgacgagaccgtcagtgccacctgcgctccgggcctccggctctttggctttaatggctggttctcatcccccgtgaggggaccggtcaccggcgagccacctggagtttgttgtcccacaggccctctgaaccttcagccgctctacgatgagctgaagctggaggcagcggtgtcggcgtggatagaggcggagtcggctcaaaaagaggcttcgtcggcccgggagcatgtggcttcccaggccgaggaggtgcagcagcggcggatggagcttggccaggtcgtccgcgagcgggaccaatcccggagtcacgccgtcgaggccgggagccgggctgaggtcctcgggggacagccggctaaggctacggagcggctagccggggtgtctgctcgggccggaacccttgcggagaacctggtcgtgagggcccaagcgcggtgctggcgtcctcctccgaggtggagatccttccgctcgagtcaccgttcgaggctaggccaggatctgccgagggtggaaatgtcactgagggtgctgctgctccccctgccgatgtccgaacctgcaagaacagtttgtctgaagaccccgctatcgaagcagtcaaaaagcgcgaaaggcgttctggcaaaagactttttcgaggaaaattttgatgcagagggggttccccccttctag

SEQ ID NO: 31501 - DNA, 180 bp, Zea mays
  Peptide Sequence Number=SeqID_74876
atgggcattgctggaaccgagggaaagtggctatttggaatcaagggcgataactctgatctactcttgaacacactgatcttcactgcttcgtattctgccagattgaatggaatggaggctcggatactatggatgaaattcttgttaggatataacaactggaagaagcagcagtaa

SEQ ID NO: 31502 - DNA, 1717 bp, Zea mays
  Peptide Sequence Number=SeqID_74877
atgggagggcttggggtttccgatggctttgctagagagttgatgaggacgtgcgcggccccgggggaaaggatgtcttcgcccgagctccgggagtcttcggctcggatgctgaaggttaccgggggttgctggcctaggaatgttcctatcccccgcgcggccagcggggacgtttttacatctcgcatggttcgcaaatggagagtttttccttacgggcggaatattgctgctgttgtgtcggcagtgatggacaaggatcgccagggggctgcacaaaagcgccaggcggctgtcaggcttgttgaagccaggccaaagaggcagcgggggtcggcgaaggctgcggcccccggcggaggcaagccgccgctggcagcgaagtcaggcgtccctgcatctagcaaggcgccagagacagcggcgggcgccggaggctccaaaccggcgaaggctgtgccgccgcccagcagggtggcggaggccacgaaggcggcccgagcgttgccgtcggcaggcaagcgtgtcgccgacttcgccaccgacatttgtgtggaggactatcttggtgcgccgaaggcgaagggcggggctcttagcgccggaggcgaggtgacggccctcgcggctgtgagggatgaggcgggcgctgcgtcccgccggctgaaggaggtggtggagtcgctaagtcaggtggctgactttgccaaccgcacggcgtcgggggccctcacggcagttgtgtctgccgaagtcgagagacttcggacacaacatgctgacgccgtccgagagaaatcggccgccgacagcaagtaccgcaagctggcggacaaggcggatgccaagctggcccgagcggagggaaacattgccagggagcgcgccgagcagctgcaggagcggctcatcgccctggagagccgcgtggagcgggccgaggccgcgatgcgagcggaggccgaacggacgcgcacacagcttgtgagcacatatcgtgagctgggtgcgcggactggtgacttcgaagtgccggaccgagagttcgggcttcgctgcctggaatgggtgcaggaagaactgcaggaactccccgctgtcgtggggggttatgtcgtacgcctccctgatgtctataaggttgaagacctcgtggtgaaggattctaccggggccctctacgaccggatgtggggtccgcacggtcgcgaggtggtcagggagcgggcggagacggcgatggctcaggttcaagattttgggcctgcgcacgcaaccgctactactgaattttcggcggcttcgaccgcggaaggtggtaatgaatatggtggatctgcatctgagttttttgattttactgactctgggagctcggttgagtggactgaggagtcgtcggaggaggacttggactattttgcggccttggacgtggctgcggcggaggcctcgccacatgccgcggacgcgcaagatgtgccaggtcctagcaccgggcgccgacggcgaagggcggttgcaaagcgtagggttagtacggaggaaagggctcggcttcgtgtgagtagggctggtcggcaggaactgttgtctttgcccgccgccgcgagtacaggggaaggggaactgcagagtctttttgcgggcttgtatgatgaagttgtgtgccctcgcttgcctgtgcttgcgaaggcgttgtgtactttgtctg

SEQ ID NO: 31503 - DNA, 1554 bp, Zea mays
  Peptide Sequence Number=SeqID_74878
atggtgcggagtcccgccttcgcgctaaatctgcgaaatcgtgatccggccgcctttgtgcgtgaagctgaggatgaggcggtgcggcttgttgggcgttatgtgctgaggaccgagggccagcgcagctgggagatccgcgggtcgaatgaccgtttgaatagggtcttcgaattgaaccaactgccatatgatggctatcctggtcaagacgacgcggaccgccgggggaagaaaccggtggtggagactaaatacgaccctgcgccggcggccgccccatcctctaagaagaggaaactaggtactgccatgggaggacttggggtttccgatgggtttgctagagagttgatgaggacatgcgcggccccgggggaatggatgtcttcgcccgagctccgggagtcttcggctcggatgctgaaggttatcgggggttgctggcctaggaatgttcctatcccccgcgcggccagcggggacgtttttacatctcgcatggttcgcaaatggagagtttttccttacgggcggaatattgctgctgttgtgtcggcagtgatggacaaggatcgccagggggctgcacaaaagcggcaggcggctatcaggattgttgaagccaggccaaagaggcaaaagcgggggtcggcgaaggctgcggcccccggcggaggcaagccgccgctggcggcgaagtcaggcgtccctgcatctagcaaggcgccagaggcagcggcgggcgccggaggctccaaaccggcgaaggctgtgccgccgctcagcagggtggtggaggccgcgaaggcggcccgagcgttgccgtcggcaggcaagcgtgtcgccggcttcgccaccgacatttgtgtggaggactatcttggtgggtcggacgagggccagcttgctacagttgcgcctgtcgcggcgatcgcgacggctgccatagtgccgaaggcgaggggcgaggctcttggctccggaggcgaggtgtcggcgctcgcggttgtcagggacgaggcggacgcagcgacccgccggctgaaggaggtgacggaggcgctgagtcaggtggctgacttcgccagccgtactgcgtcgggggccctcacggcagctgtgtctgccgaagtcgagagacttcggacgcaacatgctgacgctgtccgtgagaaatcagcctccgacagcaagtgccgtaaactgacggacaaggtggccgcattggagagggagaaggctgacttccggcgccaactggcggcggagaggagggaggccaacgaggccatcgccaaggagcaggctgcgcaggcggaggccaagctggcgcgggcggagggcaatcttgccaaggagctcgccgaacatctgcaagagcggctcaccgccctggagagccgcgcgaagggggccgaggccacgatgcgtgcggaggccgaacggacgcgcacacagcttatggatacatatcgtgagctgggtgcgcggaccggtgacttcgaggtgccggaccgagagcccgggtttcgttgtctgcaatgggtgtag

SEQ ID NO: 31504 - DNA, 495 bp, Zea mays
  Peptide Sequence Number=SeqID_74879
atggcgcgccgcagcaccggccgccgaagccggctttgtcttaagagccttcgtgggggccagaccagccaagccttgcctccgcttgctgaaagaaagagagacgacaagttcaagacacacagtgaaaaaaccaaaacagaggtatcctcagatacttacccgctccggggcaaggccaatcgtgcctgcggggaggcccctcggcccccggtctctgtaggtgctgctgagggttgccccgccgccggcttcggcaccgttttccgcctcggacgcccgaggcgccgagggagcggcctgcccaggtgtcgtcacgacggccgagggacctgcctcctgtgcagccagcgcgggcacccgctcatgggggacaggcggatcggcctgaccccctggagtcacaacaattatctcggccaaggggtcaagtaccccctcggcctgcctccgctcctcggaccgggaccttggtgtcccagccccaggcactga

SEQ ID NO: 31505 - DNA, 81 bp, Zea mays
  Peptide Sequence Number=SeqID_74880
atggcgggggatcgagaaagggaatatttcgaaaaaggatccttctcagtgaaggaaatgggccccgagccctcctactga

SEQ ID NO: 31506 - DNA, 789 bp, Zea mays
  Peptide Sequence Number=SeqID_74881
atggacagcgggctgagccacggccccatccttcgcggcccccaactctttggggcgggaagcgagccgtgctgcggctccatttctttggctttgatggctttggtgccgcctccaatgctgcctcctgccgccaagcggggcgtggctgcccgtcccccgcacgggcgatggtcgcgtcgtgcgcaggtccgccgcatccgcagcgtcccctgcattgccggccgcactgctccgacgctgtccggggggtcgtacaagatgtcgtacgccatgggggtggcggtcgcgttcttggatgaggtggttgcctccgctggcgagccgctcggtgtggaggtggtcgctgccgtcggtgctgatgtggttgcctccgccggcgagccactcgcggccctactgaccagcatacctaagaaagagttggcgatggcccccaagagagtggtggagcgtgcaggcccacggtacggaaccaggctgagcggctacacgggcttcggaccaccccaggagacaaatagatgtcctaagctgcaagcctggctgttcaattcggatgtcattatgtctgatggaaagggaactgttcgggtggaccaacaggccgggcttatgagggcagacctcaccgggttggcgtacacagatgttctagaggtgaggaagaggtactctttcagtcatagcgagatagttacccccggccatttctgcatgtactcggaggcctggacccgtggggagtccaggagggttttcgggggaaggcaggcttcggccccgtag

SEQ ID NO: 31507 - DNA, 609 bp, Zea mays
  Peptide Sequence Number=SeqID_74882
atgtcgggttggtccccagatttgaacaccttcacggatctcttgcagtccgatgggtcacctacaacccttccgttagatgagtcttcttcactacatcgtcgctccgatgtttcagcctcactcccccgtgcactatttccggctgcgcgtccaccaccatacccttatccctatcatttgtatcaatatccacagtcttcatatggtcaacctccaacttcccaagccggaattcaagcctcattcccggtacgtccgtatgcccctcccccacctgctgcggacggaagtcaagcttctttccagatacctccatacgcccctcctccatatgctccacctccgtatggagtacctccttatgctccatatgctccacctccgtatggagcacatcatccatatgctccacctacgtatggagcacctcctccagttgcacctttatctgttggatctgaaaaccaagctgaggaaaatcccgtgccgaaggaaaaatatccaaagaggctagagtggacgaaggaagacgagaaaaagctggttaatgcttggtttatgcattctaatgatcccatctccggcaacaataacttggtctgctag

SEQ ID NO: 31508 - DNA, 582 bp, Zea mays
  Peptide Sequence Number=SeqID_74883
atggcgtacgacatcttgtacgaccccccggacagcgtcggagcagtgcggccggcaatgcaggggacgctgcggatgcggcggacctgcgcacgacgcgaccatcgcccgtgcgggggacgggcagccacgccccgcttggcggcaggaggcagcattggaggcggcaccaaagccatcaaagccaaagaaatggagccgcagcacggctcgcttcccgccccaaagagttgggggccgcgaaggatggggccgtggctcagcccgctgtccatctccacgagcgactcgaggcaccccgcgcatggcccaacaatgacattaagtgcggacgtcacgggccagtcaaccgtgggaacatgcgtggcagtcggcgtgaccataggcgggctggtagtaattgcatcaacaggcgcgcaggagcagcaagccaatcgccaatcagagtttggccccacctgcaggctcgtatcctcccctaaggcgggctcaggggccactgtcagtaccctgaatcaggggtaccccctactacagtataaagatgatgtacacgtacgacgtctcctagccgcacggtga

SEQ ID NO: 31509 - DNA, 1155 bp, Zea mays
  Peptide Sequence Number=SeqID_74884
atgcagtgtcatgaaaacaatgatttcaagtcggccgacttgctagtcgatccacctggcaagttgacttggacagccagaactttggaaatggcaagatcaccaaaaggtaggaacctccaagctcgtcaacgtaggtcagcttcttcagatgtgcccttgagctcctgtgagacgaaaggaacaagcaaaggaaatgatgtgtcagtgacatctgagaagaatgaatggaaaggagcaacttgcccagtttgcttggagcatccacatgatgctgttctcctcctgtgtacctctcaccacaagggctgccggccatatatgtgtggtaccaactaccgtcattccaactgccttgaacactttaaaggagcttatgcaaaggaaaaaatggctcttggtgtttcagctgagtctgcatctggccttccattatcctcaaacacactgccatcaagcaaccagccatgtgtaatggaacttgcctgccctctgtgccgtggagaggttaaaggatggactgtggttgagcctgctcgtcagtatctgaaccggaaaaggagaaattgcatgcatgatgggtgctcattccatggctcgtataaggagctttgcaagcatgtgaaatcgaagcaccctacagcaaaacctcgtgaagttgatcctgctactgcagatgagtggaaaaggtttgaatgtgagagagagcggcaggatgccatcagcactatcaggtccatgaacccaggatctgtgatcatgggggattatgtccttgagttgaatggtggtggcaacaaccatttgctctcagatggagataactttgacttaggggaaaggctcaacttcttcacatccttagatcgtactttgaatgagagaattgacctgtacgactcgtcagatggtttggatgaggggtttgacttcttggcatccctgtttacccatggcaggagaatctctactggaggctcattgagcagggcttatagaagacacagggacaggcctagacgttcaacgaattctgctgatgcttctgacattcagcatgagtcagctagcactcaaaggggacagcgtgctgttcgggctacaggcaggacttcacggcgccaccaccacctacgcgaggcagctgagagatga

SEQ ID NO: 31510 - DNA, 507 bp, Zea mays
  Peptide Sequence Number=SeqID_74885
atggatcgattggaacacgaacacctatctgcgccatgcactgtcttcgcgggcagagcttggcagatcaccaagtatgaaattgtttgggggaaatggtccttaggacctgaatttggtgtccgctgctcggagaaccttgtcgtggccctactcggccggtctacgtgctcgccggagtctctccaacgtgaggaagaaatcgaagttaccgaagaagagacaccaccaccttcggagtctcaggccgggaatcatttctactttgacatctgtggatctgagcctgattcacctgtgaacgaaggcaagccccggcgtgctgaccgaggaccctttaactggtcacatgcctcgtcatggcatacccttgagagtcttttccttagtcgggtgaggaagcgacaaacttttgttgcttttgctccaaggtggtaccaaacgaggaaaaacaagactgaagtgtgggaggactcggtcctccacttaggatcttttgtttattaa

SEQ ID NO: 31511 - DNA, 339 bp, Zea mays
  Peptide Sequence Number=SeqID_74886
atgctgcggcggtacttcgcgatgactcggctggacgatgtcgcccgcgcagttcgttccggcgatcagcagttcaccaacggcaacccacaccacgactctatcctcgaccctctctctctccacccgcggtttctctgggtcttcggtgatagagccgctcggctccactcggcgcggggtatcaatggaattaggaggggagggcacgactctggtttcataggcgcaaaggggagaagctcatccaacgcgaggattccggatggcaccgtcttgttgcagcatgcggtccggaggaagcggaagacccaacgacgggtgaaaggggctcgctga

SEQ ID NO: 31512 - DNA, 519 bp, Zea mays
  Peptide Sequence Number=SeqID_74887
atgggatacacgacttgtgggtacagggtacaacctctggagagtgtaaaactgccttacacatcagatgaactcccacctttggtgagttcatgccacattattccccacaacttgttgagcgatgaacatgttgaactggcccacgtcaatcagaccacccaccaccgtagacgggaggtggaagcggaggtggtgaaaattgtcggtaaatactcaacgaagacggagctaacaaggagttgggatatacgaggctcgtatgtcaggttgaaacgagttttcgagttgaatgtcctgcggtatggtccattcctagaggggggctatgccgatgccagggatgaccgagggaagaaggcgaagacctgggcacacgaaggggaaggctataactgcggtgacccggaaaaggaaaatggatgtgaaagtatgatgagggtattgggagtccaaaggcctcgaggtgttttgttgaggagttggcggaggcgtgcgctaggtctgaggaggtcatga

SEQ ID NO: 31513 - DNA, 774 bp, Zea mays
  Peptide Sequence Number=SeqID_74888
atgtcgcttggggatgttgatacatcaggtagtacagtggcaagcactgaaccatcagactatgtacatggtctcgatcagaaagcaaaacacttgtctctgggaagaaataacattgtttcagaacctgaagaagtgctacaccctcaaccatgtcatggatcattctggccaagaaccaagtccaaagcaagggctgatagaaattcagttggtataacgtctactaatgacacacggtcgtcttgggcagccccatcaatgcacgataaggaacacatttcctcaacaatatcatacccaggacctatttgggactgtgaaccaaagtgggacacagggccaaaatgggatagtgagctaacttgggagcctgaccaccccattgaacttcctagaccacaagaggacatgggaattggagcactgatggaacttgtgccaaattgggatgataaatgggtagttaggaaagggcactttcttggtgtcctagtatgcagccattcatgcatgacagtgcaaagtctgatagttcattatggtaaacctgaaagcgatagtggaacagaggttggaaatgtgcctgatggttcaattccaataagccagtctgcacctcctccaactctgagccccttcacctataagccccttttagcagacactgtccaagcagaggatataaaggagatatgcaagcttttagtggtggtatcaggagaagctacaaaagcatatgctagtactgctattgtctttacgctgatttaa

SEQ ID NO: 31514 - DNA, 273 bp, Zea mays
  Peptide Sequence Number=SeqID_74889
atggtcgaggatctcgcatcgagcgccggccacccgcgcgatgcggacgattctgttgaagaagggaagtctgaccgcatgggcccgcacgacagtgaagagagcgcgagtgcgagcgagagacctccaggtgggtcccatgcgacagtgcgcgtggcgcggggagcggaattgggctggccgcgcgaagggaaagttaagtgggccaaattcacgtacctccttgagttggttggtggtgtgacttggcctccatccctgccaccgggatag

SEQ ID NO: 31515 - DNA, 300 bp, Zea mays
  Peptide Sequence Number=SeqID_74890
atgggcgtgatggagccgtgcgacatgcgttgcaataggaagcactgcgggaggctgggacgggggacgtgcatcggtgcgcgggaaccagactgcacctctacaggagtggagagtcaggaccttatagttgtgtgcaggactcttttcaaggtgccgtcgcacaccagcttgggcgcctccatcggattcatatcatcgctggactcgcttccatgtgacttaaattatttattcgcattaaagataaagaataaaaaccctagaacattaaggtcatgcactgctcagtgctactaa

SEQ ID NO: 31516 - DNA, 444 bp, Zea mays
  Peptide Sequence Number=SeqID_74891
atggcagaatcgtcgtggtgtctacacgattctctcttcccggcgagcagcgacaccgtcggcaagctctgcttcaatggatcaaggatgcaggggaacgtggctcctaccaatctggtatcaaagatctcgacgatcatgagctctgtcgctgccccagccagcagtcgccgccagcatcaggcggcccccagcaacgtccagcgcgctggtcgcagcccctgcttcgtcagcccaaactttaatggtggcatgaaggttaaagctgatcgtgatgagtcatcgccttatgctgctatgcttgcctcacaagatgtcgcgcaaagatgcaaggagcttggaattactgcattgcacattaatagcgtgtttggtttgatggtttggctcatccatcgtggtctggctccggatggagtggtcttgcactttcttgcggagtga

SEQ ID NO: 31517 - DNA, 642 bp, Zea mays
  Peptide Sequence Number=SeqID_74892
atggccagaactcccagcgccgcggctgcctttctctggtgcttggtcagctcgccgtcgggccggctcaagccccatcgcggcactccagctcgcccagtctccgcgccgcggcactccctctggtccgcgcttccttcagctcggccaggcgggacatcgttccctgctgcgctcgcccttggtgctggccgcgtgctcctcgtccggctcggccgcgacctcaccatcgttccgcagctcgtccaaacgccgggcttggccctgccctctgctccagctcgcagtcgctgcgttgccgagtcccttgccgcgtctgcgtggttgtgttctttcatggaaacactcagggcgtgtttgcgaccctgcaccaagctggctcggcctgccctactggcccagccccagctcggcccaggcgagaacatgtttgtgacccttacagacagctgggctaagaggccaactgcccaactgccaaactgggaatatgtttggcagttggctgtggtcggcctggcccatagacaggaaatagagatggacattgctaacataaaaaagagatggacattgctgacagaaaatagaggattagaacaacatatgtcaattgaacaatacaagcatcaactgagttag

SEQ ID NO: 31518 - DNA, 669 bp, Zea mays
  Peptide Sequence Number=SeqID_74893
atgactgacgatgtacgaggtaacctgttccggatgatatgggtgcgaagtttcaatccttttaagatagaaatatctgtcaaagacctgcagaacatattaagtataaatctagatatgactctaaaatgttttgacatggctgttcgattgcttgccaataaagagtcacgtaggccaaaaggtgaaattataaagaatagaaagcattatatggacatgcgcttctggagaatgattggttttggtaaattgccaaagtaccatgaggaccctacagcagaagagttaacaaaaatactcgattgttggccatcaatgaactattatatcacggcttgtaaatatgttcttatgccatggaaattcaacggttgctacgcccttttcgtaatagatcatggtaaaaaacatgtcacttttattgactttgcacctaatcaagattggtgtaagcacatgccatacaagaggcttaacaacagctaccttatcttacaagctatggccatgtgggagaatgataatccaatgaaatttgttagggatacaaagattcttcggagaaactttattatcgaactgttaagttacgaggaaaattcgtgcagacatgccatcccagcaaatatacaacagagagttaacaatattgttaaaaaatattag

SEQ ID NO: 31519 - DNA, 837 bp, Zea mays
  Peptide Sequence Number=SeqID_74894
atgacttcccacgggtcctccgatgacggaaatgcactgacccacacggacggacttgcacgagagggctttccccgcattttgtgggaagtacttcagggggccggatacacgacaccccctcagtacgcggtgcagcagttcgagaagcaccgggtgccccgctgtagggtgaggatgactttggagcctcatcccctgcagccaggctggcgctccttggactcggagtctttcggataccgagcagaggacacgatcgaggcgatcgctctgcatgggttgactactttctgtggattccatcctttggagctggctacccaccccattggcttgttccccgctgagagggaggacgacccaatgtggaaggatcgggtggagcatgccaaggacatctgggccatctacccaggacagactgcgcacttgacagtgatgcacggtgaggcaatgtcccatctgatggcactgctggaggcaacaaagatcacgctggataacagagaggagctcgtggttgatttatctcaagaaatggtggagaaggatttgcaggtggagcagctatccacggatattcaggagttggaggagctggtaggtaccagggagaacaccatcgaggtcctcgaggatcagctcattaacactcagcagcagcttgctgaggctaacgagcacctggacatgcaccaccaggagatccaggaccaggaggccaacgaggacgtcgacattgagggaggagatgatcctgcctccagtgtggactctgctggctcgggaagaccaccttcccccgagtcgagtgttgcttcgttcgctcactag

SEQ ID NO: 31520 - DNA, 882 bp, Zea mays
  Peptide Sequence Number=SeqID_74895
atgactggatggcccaaaggatatggtttcgtgcgttttggagatctgaatgagcatgcacgtgctatgactgagatgaatggaatgtttttaatgttctccttcttcacctcgctgggtgggttcgggggcagctcggacggcgcgaggggcctcaccagcgtcgacctgtccaattccgagtccaggccagacagtgtggcacaacgtggcttggaccacgacactgaagagagggtggaggagctcacattgaagaactgcatcaacactggtatccagcctgaggtttctgctggtgggagcacaagcagcagggataggcctacccgtattaagggcctgtggggtaattttacacggagaactagcaatttggtcagcagggaaaacgctgcactgagttctggcgacattgcaaacttgagggctcgtgatgtttcagcaaaggtgaggtttctattgtctcaaggatggtacctgcacttgtcaaacataaaagctcgctacctattttatttagacacaattaaggcaataaggcctactagagtttttgcatactcaagggttcatgggcatcccaggctcccagcaatggaatctgcaaggtatctccagctcgctacctatttttgtcattatggaatctgcaaggtatggctccacattgatacaattgatggtttgtctgcatatctagcaagtgtgcaggaggatgttgcatcagttatcattggtaaaaaaactatattgcatgtgcggactgcctctgatgctattgatatgaggatctcagttgatgaaagagtaaaggacaagctctcaaatttggtaaccaggctccaaaatgaaagctttaccgcttcccgaaagaactag

SEQ ID NO: 31521 - DNA, 318 bp, Zea mays
  Peptide Sequence Number=SeqID_74896
atgggcgcgcctgccatctgcgcgtgcagagcgcgcattaaatgcgcggcagagagccgttggcgcggagatgaccgttgctccggagtcgcaccggacagtccggtgcacaccggacagtccggaaacacaataaataaacaagagcataacagcacctacagtcgtgggcatatcaaaaccaaattagccaaagcaatcatacaagggagatcactctcagatttccaatgcttcggacaaaccatcaactatctcaagtccgccatgcacaacactaccgcctacccgatcaaggaccagacaaaagcttgttga

SEQ ID NO: 31522 - DNA, 483 bp, Zea mays
  Peptide Sequence Number=SeqID_74897
atggaggggtctggaccccattcgaggggtccgatttgcacctgtgggggtcttggaccttacccggaggcccggtctgtatatacagggcgtctcggggcacaagcgggagagtctgccttgaagagggattcaccctgcgtgcagcagttacgctttcgcattctctcccaatcgctgcgccccttcgccttcgagctctctgtgcccctttgcattcacgctcttccgctctacacccgtgccgccgccgacgccatgacttcacttggccattccgagcatttccagtccgagggggcgctcaacctggtgcgccacctgctcgaatggagcgcgccgttgcacgtcggaaggatccgtgccggcgccactcccctcggcaatctcgccgccgaggagttcgtgttgttcgtctcctacgtctcctgcgggttggcgctgccgatttcgcctttgagagcacctagagggggggggtga

SEQ ID NO: 31523 - DNA, 864 bp, Zea mays
  Peptide Sequence Number=SeqID_74898
atgcaggcggcatgcaaccgcaccaagggggcgcaccctttcgacttcgacgcgcccagcatgggggcccaggcccacacgtcatgcaaccggcgcgccggttgctacgtgcaaggaactgcaccgccactcgcgccactaccgtgcctcctcgactgcggaaccagtaccgcgactcgaggcaaccctgcgtatgacccaacagtgccagccaggcacatcgatcacgggacagtcgacacctttggtaggagaagcaagcgacgcttcgccttcgccataatgaccgcgtcaaaaaaggctggcccctcggaggggttcaacagccgcctcagagcgctcgggctccgcgcccgctactggtcagaggttcaaaggccggcccctcggaagggttcaacggccgcctcaggccactcgggctccacgcccactactgatcagggagtgaggctgacagcggccaagtccggcctcaggcgccataagaagctccgcctcgcccgacccagggctcggactcaggctcggccccggaagacgacgaactccgcctcgcccgacccagggctcggacttgggctcggccccggaagacgacaaactccgcctcgcccgacccagggctcggactcggcctcggccccggaagacgacgaactccgcctcgccagacccagggctcggactcgacctcggcctcagccgacggtctccgtctcgcccgacctaagggctcggactcgacctcgacctcggaagacagacccgacctcgacctcggaggagcctccgcctcgccctacccagggctcggaccgaccacgtcacaggaagggccatcattaccctacccttagctag

SEQ ID NO: 31524 - DNA, 324 bp, Zea mays
  Peptide Sequence Number=SeqID_74899
atggtccgccaatgcggcgcagcccacgtcgtccaatgggacacccacctggaaccgggcacccgttggattttgcggtgcgaccgcagcaaagtcgtagtcgagatcgcgaccctcgatgttctgccagcgctcacgcgccctctccagagagactcgggcatcctcgcccgtgcgcctacggttgagttctgcccgcaggtcatcaggcctctccagagagactggagcgtcctctcccgcacgcctgcggttgagctccggccgcaggtcctcagtcggtgttgccctcaccgagggtggttcgtcttcagagccagctaa

SEQ ID NO: 31525 - DNA, 2454 bp, Zea mays
  Peptide Sequence Number=SeqID_74900
atggcggaggccaaccgcaggacgacgccccggccccgcgcggtgccgccgctgctcgccgaggtggaggtctccaacctgcccggcttcgacgtcaccccaacgccgagcccgcacggccaggacgccaccacgccgagcccgcgcccgcccacgaagccgtcgtcccgccccggggtgccgccgctggaccgcgtgccgtgccgcagcgaggtggtgttcccgccgctggactcgccgttccaggcgccgggctaccgctccgtgcagcccgtctccatcagcctcccggcgtcgcccatcggcttcggcttcggcgtgcccgtcatccccgcgccggccaacgccgccgccgccgactcggacgacgacggcctccggaggcaggccctccaggccaacgccgcggccggcgacccgcagcaggcgccggcgccgacgccgccgcccgcgcgggagaatggaggagggggcgtccggttcatgcaccagccggacaagctggtgttccgctcgcagcccattcccggcggccagccacagcgcgccggcagccgagccgcccgggcctgcagggccatcagccgggacaggcgctatgacacgttcaagaccttctccgggaagctcgagcgccagctcacccacctggccggcgccccggaggtccaagaggtgcgaggagatgacgccgtcgacgccgccacctcccgcaccacgtccatgcccaaagtcgatcgcttcttcgccgcactggaaggccccgaactcgacaagctcaagacgtctgaggaactggtgctgccgtcggacaagacgtggccgttcctgctccggttccccgtgtcggcgttcggtatctgcctgggcgtgagcagccaggcgatcctgtggaagacgatcgcgtcgtcgtcgccgaccacgttcctgcacgtatcccacaaggtgaacctggtgctctggtgcatctccgtgctgctcatgtgcgccatcacggccgtctacgcgctcaagctcgccttcttcttcgaggccgtgaggcgcgagtactaccaccccatccgggtcaacttcttcttcgcgccgtggatcgcctgcctcttcctcgccatcggcgtgccgccgtccgtggccactgagcccctgccgaggtggctctggtacgcgctcatggcgcccgtgctcttcatggagctcaagatctacggccagtggatgtccggcggccagaggcgcctgtccaaggtggccaacccgtccaaccacctgtccgtggtgggcaacttcgtgggcgcgctgctgggcgccaacatggggctcagggagggccccgtcttcttcttctccgtggggctggcgcactacagcgtgctgttcgtcacgttgtaccagcggctccccaccaacgagacgctgcctaaggagctccacccggtcttcttcctcttcgtggcggcgcccagcgtggcgagcatggcgtgggccaagatcacgggcgagttcggctacgggcccagggtggcctacttcatcgccatgttcctgtacgcgtcgctggcggtgcggatcaacttcttccgggggttccgcttctcgctggcgtggtgggcgtacacgttcccgatgaccggcgccgccatcgcgtccatccgctactccaccgaggtggacaacaccttcaccaaggcgctctgcgtggcgctgtccgtgatcgccgtgctcacggtgacggcgctgttcgtcaccacgctggtgcacgcgttcgtgctccggaagctcttccccaacgacatctgcatcgccatcacggaccacaagatgaagcccatcatggagctgcacgagagccatggcgaggacagcagcaccaacagcaacgacatcgagaccggcgccggtggcaaacaactccagttggaagatgccgtatttgggatactggggaaaacggctcttaactgcgcactggcctctgctacagcctactatcaacaggccagcgacagcacccgacccctccacgtggatggtcccggggccgccacatggccggagaagatgatatactccaaggtatcaaaagtgagtccggacccctatgggaaagtgtcggacccctgtatatacagatcgggcctccgggtaaggtccaggacccccacgggcgcaaaccggacccctgggatggggtctggacccctccatgtggagttcgggccgctcacggcagggtcccgggattctaggacagagaatgcccaggccttaatcaaggtcaggcgggggtccggagccgacacgtgtccggaccttatcgtttacacttctgctccccgcccaggcggagcctcgatgctgccacgtggcatggtgcacgtgatgcggtgtaccgcctctgcatttattgagccctgtccatttcactggcaggcgatgtgccgcctccgcatttaa

SEQ ID NO: 31526 - DNA, 1035 bp, Zea mays
  Peptide Sequence Number=SeqID_74901
atgacgaaaatccttgaggccgaggtagaggcagaggccgcggcccggctcgctttcccccaccatcaagctagaggcaactctccctacgtgcgcccccaacagtcacgggctgagtcttctccaacacgctccaaagccctcccctgcggcgcgggggctgggtcccgcatgtcatgcagaccggctccgagcagaagaagccaaaccgccgcgcgtggtgcacgcaaccgcccagcggttacaagtgaccctccacttttgcccagaccaacgggcaaaaggggcgggcagccatgcaggcggcatgcaaccgcgccaagtggacgcgcttctccgactcccgacacgccagcatggaggcccaggcccacgcgtcgcgcaaccggcgcgccggatgctgcatgcaagcaactgtaccgcctgtgccaccacggcgcctcctcgattgcggaactaataccgcgactcgagacgacccagcgcacgacccagcagtgccagcctgacgcggcggccaacgcggccaaaagtgggccggcagtaatgacggtggcaggcgcgcgagagcagcggtcacgtcgtcagccaagctcacgtcccatccgggggcagcaagagaaccccctctcacggcgtgaagacaacgcgcctgtgatccgttcctcgaacggctcgcgcacgcgcaacggctgccccgccaactactcgccccgtcgcattaactccgcggctggacaggcggcgcttctggcaggagcagcgggcgacgcttcgccttcgccgaaacaaccgcgccaaaaaaagggaccgggaaagggggataccccgaaagggatccttccccgtgaaggaaccaggctccgagcctccttactgatcaggggttcgaaggctggccccccgaagggttcaacagtcgcctcagatcgcgtgggccctacacccactactggtcagaggttcgaaggcggccccccgaagggttccacggccgcctcaggctactcgggctccgcgcccattactgattag

SEQ ID NO: 31527 - DNA, 1970 bp, Zea mays
  Peptide Sequence Number=SeqID_74902
gccccggcgccctcgccctactcgagagccctaccggcacgggcaagacgctcagcatcatctgcagtgcgctgcagtggctcctcgatcaccgcgaagctgccgtagttgccgctacggcattggcccaccccagcggcgcctccggctccggtggtgacgatgacgagcccgactggttgcgggatttcaagccggcggcggcggttaaagagagcactaagaagaaggcgaagcctcccgcgatgaggaaaacgctggtttcacggaaaccagatggatttggggaggaagacggcggcgacgacgagggggagttcctacttgaggagtatgagagcgacagcgaagacgtcgcgaggcggggtgtagggaaacgagcacattgcggtagtagtagcagcagtagcagcgaggacgacgatgagatgacgcccaaggttttcttcacaagccgcacgcactcgcagctctctcagttcgtcggggagctcaagaggacggagttcgctgggcggatcaggacggtgtgcttggggtccaggaagaacttatgcatcaacaaggatgttctgaagatgggcagtggaaacaggattaatgagaggtgcttggaactgcagaagaacaagaagagcaccaaaattaagcttgaggatgataaacgaaaggtgcgcccagcaaagcgctcttgtggctgcccgatgttaagaagcagaagtctgctgaaagagttcagtagcgaagtgtcaaaccaaggtgcattagacatcgaggatttggcacaaatagggaagaagattggaacctgtccctactatggttcacgagacatggtccgctcagctgaccttgtagtccttccttatcaatctttgttactcaagtctgctagagaatcacttggccttaatctgaagaacagtgttgtcatcatagatgaagctcacaacttagctgattccttgagtaacatgtacaactcaaagatcacgtcttctcaggcattggttgactttctacgctcccttctgaacagcaatgatgatggaagaatcatagttgcaaagcaaaagctaggtggacaacctgatgaagcatatcttaaatttgtgatgctttgtgcggaaaaaatattttctgaggatgcttatgctgttatcctggctggtggaactctccagcctattgaagaaactaggctgcgcttgtgtccaagcttaccaccaactgatataaaattcttcacttgcaaccatattgttcctcctgagagtattcttccaatagcagttacacgtggaccctcaggcaaggcatttgatttcagctacaattcaaggagctctccttccatgattgaggaacttggtcgtttcatctgtaacattataacagtcgtgcctgagggagttgttatgtttttttcttcatatgattatgaaaggcgtgtatatgatgcatggatgacaacaggcacaatttccaggatttctaaaaagaaacatgttttcagagagccaaggaacagtgctgatgtcgaggctgtcctcaacaaatacaaggaggcaattgaatcctgtagtaatttttcccaagacacaggtgtcaatggggcacttctattagctgttgttggtgggaagatttctgaaggcataaatttcagcaatgggatgggtcgttgtgtcataatggttggcttgccttatccaagtccatctgatgttgagcttatagagacaataaagcatatcgaaagtatttctagctcattttcggttggagatgataaggccttaagcagaaaatatgatgatgaatgtgaacttcagcctggttatgatatattacggaagtgcactagaggtggaagagagtattatgagaatttatgcatgaaagctgtgaatcaatctattggtaagctgcttctcctgagcatttgtcatgcatatagcactgtttaa

SEQ ID NO: 31528 - DNA, 2765 bp, Zea mays
  Peptide Sequence Number=SeqID_74903
caaagcagcagccgagcatcgtcgtcgttcgtccaactcccccggccggccggcgacccgcgccgcgatatgctgctgcacaccgtccggttcctctgctccgtcgtcgccgccttcgcgcgcctggtccgcgagctccgcaaggcgtccgacgtcatggcatccgcatgctctctgtctccggtagcggtcctcaccgcacccgctatggcggcggcgccatctcccatcggcctgatagcctccacgccgctcccgaagcgaaagaagatgcttgcccaccaggttgccatcccggaggacctgcagctcgtcgcgccgccgccgccgccgccacccgtgcctgcgcttcctcttgcagacgcagtggtgtccgactgcatcagtgggagtgggagtgggagtgggatcgggatggtagtagagcaacaacaggctcggagcttggcgaagaaggccgcgtgggcggccaggaggcggccgtcgacgctcgtcataccggtggccgacgacgctggcgaggtcgccgccggttgggccgcagctgccgcgccggtgaaggaggccgacgtggaggtggtgggggacgggttttggttggcgagtagagcaggaccgaggcatgcgatggaggacgcatatgctgtgctgactgacaaaaaccatgcagattctcaactggcattctacggtgtcttcgacggccacggcgggcgcgcggccgtggacttcgtctccgagcggctcagcaagaacgtggtgtccgcggtcctcgccgccgccggaacgcagacgtcggaggacgacggtgtctcggcggctatcagagcggcgtaccttgccaccgacagcgagctcctcacgcagcaccagggctcaagcggcggtgcgtgcgccgcgacggcgctggtgaagggcggcgacctgtacgtggcgcacctgggcgactgccgcgccgtgctgagccgcgggggcgtcgcgacggcgctgacggccgaccacacctgcgccagggaggaggagcgggagcgcatcgagcaggagggaggctacgtgagccgcagcggcagcggcgtgtggcgggtgcagggcagccttgccgtgtcgcgcgcgttcggggacggcgcgctcaagcggtgggtcgtcgcggagccggcggtcacccggctgcccctcgccgctggctgcgacttcctggtcatcgcgtccgacgggctctgggacaaggtcagcaaccaggaggccgtagatgccgtctccaggagccgcgccgcctcatcctgcagggacctggtggacatggcacggcgcaggggaagcagggacgacgtcaccgtcatggtagtcgacctccagagcgagctccgcaaggtcctcatcagggcatccgcgttctctccgttcatagcttccctaccgacgtcggcggcggcgtcgtctccacccgccggcgtaatctccgctatgaccctcgcgttgcggatgaggaagacgcctgctgctgcctcagacgtcgtctctatccacgagcagctgctgctggtggtggcgcctcccgccgctgttgccggtgcagattcgtccaacgacgttgtcggtagttgtggccatgacgtagcggagccggagcaacaggctgagagcaagaagaagaagaagaagacagcgtgggctgcgaggaggcggccctcaaggctggttataccggtggcggatgtcgatgccggcgaggtggctgccggctggggcgccgcggctgccgccccggcgaaggaggccgacgtagaggtggagggcgaggggttcaggctggccagtagagcaggaccgaggcatgcgatggaggatgcgtatgccgtggttactgacaaacatgatggaacttctgatctgctggttcgggcagaaggcaagtttagatcaacaaaagatatcaggaagcagattggtttcgtgttcctttctgatttgaagagtgggatgtatggaacttcagatttgaacagtgagttgtatggttccaggttcgtggttccggaaaattttcatatcagcttgctggcattctacggtgtgttcgatggacacggcggacgcacggccgtggacttcgtctccgagaggctgggcaggaacgtcgtctccgccgtgctggcggcagcggggacgacggagatgcacgggggggcatggtcgtcgtcggcagagacgaaggacgtcgtctcggcggcgatcagagcggcctacctggacaccgacaaccagctcctcgcgcaacatcagggtgaaagcggcggcgcatgtgccacaacggcagtggtgaagggcggccacctctacgtcgcgcatgtcggcgactgccgcgcggtgctgagccgcaacggcaccgcggacgcgctgacggcggaccacacctgcgcccgggaggacgagcgggcgcgcatcgagcggctgggcggctacgtgaggtgcggcggcagcggcgtgtggcgggtgcagggcagcctcgccgtgtcgcgcgcgttcggcgacggcgcgctgaagcggtgggtcgtcgccgagccagcggttgccacggtggcgcttgccgctgactgcgagttcctggtcatcgcgtcggacgggctctgggacaaggtcagcaaccaggaggccgtcgacgctgtatccaggagccgtgcgacggcctgcagggagctcgtggacatggcgcggcgcagggggagcagggacgacgtcactgtcatggtcgttgacctcgagag

SEQ ID NO: 31529 - DNA, 198 bp, Zea mays
  Peptide Sequence Number=SeqID_74904
atggtcagggtgaaaagtcaatcaatgcgtggagatatatctaaggatgttctcctttcaaagtcttgtatgggtatgaccctcccatttgatgccgctcctctgatcccggttaatattgagactgatgtggcacaactgttagctgagaggcctgctttcaccaacattttgaaagaacagttagctggtgcttag

SEQ ID NO: 31530 - DNA, 162 bp, Zea mays
  Peptide Sequence Number=SeqID_74905
atggggattggttgtccacgggataaaattggaataaggattaaggtgtggtaccgttctctggaggagatggttgctgggataacttggccgaccaccctgccaccgggttggactgtcgagtgggaacctgcctcggctgaggaggagcatgaggagtga

SEQ ID NO: 31531 - DNA, 150 bp, Zea mays
  Peptide Sequence Number=SeqID_74906
atgggaacaaatgggcatctcgacctcgacacgggaggtaaatccatagatcaaaaggtgcataagttcatctacaactattctaaatcgactgtccggaataccgttgattattccggacaggagaagcttttttggaaaaacacctaa

SEQ ID NO: 31532 - DNA, 192 bp, Zea mays
  Peptide Sequence Number=SeqID_74907
atgaacgtatgtgagctcactcttgctgtctcacaccccccacaggtcaagaacaggtatcttcggactcgtatcagaaagggagaagctcaaaagatacgaaggttggcacagcgccgaagctgtgaagcaggaaagcttcggcatgttcgcagaaaagggaaccgacttaaagatgaaaaggccatttag

SEQ ID NO: 31533 - DNA, 246 bp, Zea mays
  Peptide Sequence Number=SeqID_74908
atggcgaccactctttcgttatcctctcccctcttcctcggagctccggccagagctagagatgtggttccgtacggagtgacttcggctagtgtatcactgatgactctaaatatgccaggcaagggttacacgagtagagttcgttgtcgggagcagcagcgacgaacgacaatagtatctatggttggtcagcaaacttcccagtgcagcctccatttctcagtacctcctcttcaattctag

SEQ ID NO: 31534 - DNA, 447 bp, Zea mays
  Peptide Sequence Number=SeqID_74909
atggcgcaacaacagcgtgaaggtttgaggggcggcggccaatggccggtgtggggaggcggaggagggcaggctcctcgcgctctaccaaaagccacctgccatcaacgtctcccgaaatcgccattaggaggctacactatactacactacactacactacaggaacaagtacgcttacggcctcattgtctgaagcactcgacaaagcctagaaaagattcggcgactctgcaaagaaagctcgacgaactgtacatcggcaacggcttctttgccgagtacttttatcgggcactcgacaaagactttatcgagtgtcacctgatactcggcaaaggcaagtcaccgccacgactactagtaacggcgacaaagcctgtgccgagtgccctccgagtaacactcggcaaagagttagcctttgccgagtgtccactgtactaa

SEQ ID NO: 31535 - DNA, 1017 bp, Zea mays
  Peptide Sequence Number=SeqID_74910
atgtcgacggagtgttcggacctcggggacgagttctggctgccggaggagttcctggacgacgacttcttctccgaggaggagaaggcggccgtggcggccaggagcgagagcgacgaggaggacagcctggcggggctctcgcgcaggctcgcgggcctcctcggcgacgacggggagcggaagccgcctaccgccaaggcggaggtggcggtgattgggtcgccgcagtcgacgctgtgcgggctgcccaagtcgggccaggagagccccaacggcggggcgtccaaggggacgtcgccgccgtcgtcgccgcctctggagcagaagccggccgacccgtgggacgtcctgtacgaggcggcggggcaggtcgcgcgcatccgcgccgccagcagcgtgccggtgcaggtgccggccaacgcatacgccttcagcaagccatccccgccgccgccgccgccgccgcagatcgctccgccctccgccaaggtccctgccggcgccggcggtcactaccacccgctcgcgcacttggtttcgcagcggcagatgcaggctgctcagttccatctcctgaagcagcatcagctgctgaagctgcagaggcagcgccatctcgccgcgtggagcgcgcgccagagcgcctgtgccaagcccgtcggctgcggcggaggcgacgcgccgcttggcctgaacccggcggcgtggcctccgctccagaagccaccgccaccgccgccgccgcagcagcaccaggcgccggcgcatcctgcctccggcatgcgcgccgtgttcctgaccccgcctggcgccaagcgcgagcgtaacggcaccggggtgttcctcccgaggccggccggcgcgcccgcggcggagcccaagaggaagacggcgggggcgtgctcgacggtccttgtccccgctcgcgtcgtccaggccctcaacctcaggctcgaagacctcggcgcccagcctcgctactaccctggcggcttcgttctcgatcacggttag

SEQ ID NO: 31536 - DNA, 804 bp, Zea mays
  Peptide Sequence Number=SeqID_74911
atggcttcgggcacgccacccgcgccatcgaggtccgccgccgctccctccgcccgcttgcggcttgcctgcctggtgccggcgctttgcacacacaactcgatcgccccccttcgtttctctgagttcttaatactggtgcgcggagtgcagtaccaccagacgaccgtggtgcccggggagtccatcctcaagaccgaggcagagtggctcaactccatcaaggccgaccttgtggtttcagatgttgtacccgtcgcgtgtagggcagctgcagatgctggcattcgatccgtgtgcgtcacgaatttcagctcaatttatgcagaagtggatggtaaggagataggcatagcccacatgcgttggcacctttggcggagaatctatgacctgtacttagggaataggcaatttgcagttgttgagaatccaggattctggaactggacctttagcctggtggatgaagatgacaaattgttggctcagattgatcgtaattggaggggcaccggctttgagctcttcacagatgctggccagtatgctatccggtttggtgatgatgtacaaagcgacaagtttgctcacttaccgtttattatatctgggtatgtgggtgcccacttttcccagttagttaatgtctcacaaaagctccagaccaaagaattgcatgttgttcgccagctgactttgcctgaaagggcagtggatcttgctctcgccatttccttggacagtgattacttctctagaagaggtggctggggacttccgtttctgattgccacggagtag

SEQ ID NO: 31537 - DNA, 780 bp, Zea mays
  Peptide Sequence Number=SeqID_74912
atgccccctacaccatctcagggcaccccgactgctggaggagaccctgatggagatggagacgacgacgacgctggtggcagttcaagccacgacacggagcgctcggaggagccagagccagagggatggatcgctagacccatcactcgtgacgctgctcgtgggtgtcacttccacgatgctcttgataccctgttgcattgggccttcgaccgacacacttggtctatcgagtaccgttgtgtagtctaccagcatcatcgtgggctatacccagaccagtgggaggctacttgcttggtgcgccgtctggacgatgatctccggggtgcagaggccttctcagagcaccattctatcactgagagggagactgtcgaggcagtcatgcaagatgtagcacaacgggcactttctcagtattgctcgttgttcagcggggtagctaatggccttgacctgaagtactatccttgtcgttcgatcggtagagctagaggtgtgattgtctcgccagttggtgagggcaatcccaggctgagcagcatggtcaacctggccgccgtgctcaacacagagttggaccatgcccttgacaagttgggcaaggtttgggcggaggttgcagaattgcgtgctgaatgcgcggcacgccactatctaaatggtggttctcccacccctgtagggattcaacacccttaccgttcaccgccccgtggtcgcttcgactatggtaccccagactgcaggacccgcatagatttagatccatag

SEQ ID NO: 31538 - DNA, 126 bp, Zea mays
  Peptide Sequence Number=SeqID_74913
atggggaagagtcctgctactcctgctcctgctcctggcgttggtgctcctgctcctcgtgcaggtgacgatgcagtctctccaggggacgctccaccagtcgagaaggcaaaaaggggatcatag

SEQ ID NO: 31539 - DNA, 357 bp, Zea mays
  Peptide Sequence Number=SeqID_74914
atggaggcaagaagagcttcgaggtaccgagtgcacaggagaaagtcaaggaggccgaggaatccaaagccaagggtggagaagaggatttgcaaagtcaaggttgatcgagtagagaagagttatgtggctaactatgttcgtctaagtgttagggaacctctcgaaaggagtcgagaagaagtaaaggagtttggctcaaaagagtttgctgtttcgcatgctgagacttttgagcatgagtggatcctcagtactaacaccaaggtctttgttatgctagaggatatttcatgctcattctcatcaacagtgaccggttgtggtgttcaggaagtgcaaagtcaagaggcatag

SEQ ID NO: 31540 - DNA, 1656 bp, Zea mays
  Peptide Sequence Number=SeqID_74915
atgcagcatcctactgcccaggatcatataacttactcaaggaggagcgataggtccattcaagttgccaacacacagaaggcagaggctgagaagaagaaggctgagattgagatgaagaatgctgaagctgaggaggctgagaagagaaaggctgaagccgaacaagctgataagaagaaggcagaagaagctgagaataagagaaaggctgaggccgaagtagctgagatcaagagaaaggctgcagctgaagaagctgagaagaagaaggaagaagaagctgaggataagagaaaggctgaggccgaagaagctgagattaagagaaaggctgaggccgaagaagctgagattaagagaaaggctgaggccgaagaagctgagattaagagaaaggctgaggccgaagaagctgagattaagagaaaggctgcagccgaagaagctgtgaagaagaaggctgatgccgagaagaaggttgaagcggaggagaaaaggatacaggttgcaatccagaaacagctgaaggacaatatcaaagctttgaaaaagccggtgcccgctgccaaggtaaagaagatgttccagttacaaatgtcaaaagaatatgctgagcagcgccaacagtacgaggataggttgaacatgcttcatcaggaggccaaagctgagattgacagtttggagaagagcattgatggccaggcaggacccagctcatcatttgatgatatccagttcccggcggagtctgatgatgatatcaacaatttgacccaaccaatccgactttctcaagacgaagtctcagtaggccaggctgatttcagtgagtttcaaaggatgatattcaagcgcctaggtgatagagtgctgaagaagcctagggagtacatatccccgttcaagatccctcgtaatcgacctgagatacccctggccaaggctgttgcacttaggcggaagatcgcatctgatcctgagctgaaaaggagaattttgttggagtttggccttcttgttggactcactggcgaggaaattttaacatctttttctaatgacacccttggtgagtcaggaatcatagactttttcgtgcactgcatgcgacatgatgatattgtgcacaaggttgattcttgtggatacagagtgtttctgaccactggtttttatgtttttgtccctatcaaagatggtgctcactattttgtatattgcttcaattttatccataagcgtattgatgtgctggactcgaacgactacttcctgaattgttctaatcaggaagaacggcacaaggctgtctttgccaaaatcccaatcattgatgcagccttccagaaagtttccaacctcaagttacccagagttagcaagtggaggcggccttttattgatgtgccaaagcaagcaggtcaaagcgattgtcttttttttgtatggaagtacatggaatattatgatggggacaaaatgaccaaggaaatcaatccgttcaagggcccgatatacagatgtgagctgttgcattacgagatcttccaccctttgaaccaagctgaaattcctggttcgcttgataagtttagaattggtggtcgtccgttgccaattgaatgggatagtagtcagtcgaacaattag

SEQ ID NO: 31541 - DNA, 912 bp, Zea mays
  Peptide Sequence Number=SeqID_74916
atggcggaggattctggcgccatcctccgccacatctcctccgtcaaggatatggtcgacaaggttaatgaagagattgaacaaaacatacagaagaccagggaaatagaatcagagatagtgcaacattctgaaaccgaaaagcactatctcaacaaggagtctgagttgacaaaagaagtatcagttactgagtttgaactcaatggtcttatccaagtggctgcttctgaatcagatttacttaaagtggcagagggaaatttggagttccagaaagttgctcacgatgtgattcggaaaagagtttctgataagatggaaaaattcatcaatgaatctatggggtttcaagccaatatgctcaaaagttcaaatgaggatttagttctcttactgaatgaaaaaagttcactggaggatgaaagtgcgaaattgaaagtgaagataaacagtatacatagttcatccaaggaatacattgcagagattcttgaggaagtgaatacagaaaattcagatcaaagagctgtctccaagcaaggctgggcaccttcaaaagctacatcatttctgtgcttccagatcgaccaagcacctaaggtcaccagcgactttacaccctttctcataggttttgtcaggtgtttgggtgctctccaccaccctgcaaaagatttttcggacagattaggagttcttattgccaatcccaaacctgagaagatcatgtaccagaaatttctagcaaacacaaaactgctgcttgtcactcatcgcaagaagtatgaggactcatacatgtcctcagaagagggaagatactggtatgcttcgatggtgaaattggctctggcaagaagctttagtcatggtttcatggagctttcccaatatagtgaaaaatggtaa

SEQ ID NO: 31542 - DNA, 180 bp, Zea mays
  Peptide Sequence Number=SeqID_74917
atggcccagaggctttcgggccagcccggcacgttttgggcatctctgggccgtgcttggacacatgtcctggcacgtgacccgaaccggtacggcccgagtcaacagcgtgccgggccaggcacgaccctgttcgtgccgtgcctaaccgggctcgggccgggaacagtacagtcatag

SEQ ID NO: 31543 - DNA, 390 bp, Zea mays
  Peptide Sequence Number=SeqID_74918
atggtacgggggctcagtccttatagtcgcggggtgattccgagttggcgatcgactggttgcccgaggacgccgccgagattcgcggccagcggagcaaaggacagagaagaggataagtcccaacggcgaagtagcggcgtctgttacggagttcgtgcggaagaagaaatatccggccaggtggttcgaacggacagcgagatccgtgcgatccaggcggcgggcatcgcggcagtgttgaggacgaagcgcgcgatagagaaggaagagctgacaatgcggccccacatggcggcggaagagaagactgaccactggggcccgcgcgcagagaaaaactccaaagcgcgtgcggcagggatgctgggttgcgtgggaaagaattag

SEQ ID NO: 31544 - DNA, 393 bp, Zea mays
  Peptide Sequence Number=SeqID_74919
atggacaagagcgttcctgtagttagcaagatcttttgctcaggagctccaacaatgctgatgataaggaggagacctgctgtggtgaacggtggcggttttgttgttactgacctcagccatagcattgtgttcatcgtagatggttgtggaacacttggatccaagggagagcttatggtcaaagatggtgaaggagaaccaatactatccatctctaaaaagattaaaggcatacataagctgatccagcaggtcatgatgggtaagaaagggctgatgggaggcaaggacttctaccatgtggaagtacagtcaggatatgaccaagctttcatcattggggtgatggcaattcttgacagcatacatggagaatccactagatgctga

SEQ ID NO: 31545 - DNA, 873 bp, Zea mays
  Peptide Sequence Number=SeqID_74920
atgggcgggaccggcgcgagcagccggcggaggtgggcgcggcggtccttccggacggcgggtggtggaggaggaaggggaaccggtggggttgtcaggcggaccgtcgcggcgtcgacgaccatggctccgcggggtacccaagggtttgctcatgtggacaagcaacagcgtcatgttcatggagtattatcagatttcagatgcaacagtggatcaacagatcatctttctttgtatgtcgaggaatttaagcataagagctcacacagatcatctgttagatgtcttcctagtgcacagggaaatgtaacagaaatcagtcgcatgcaacctgttgcaaggaaagttcaggtagatatgaccttcaatgataaaggattgtgtcgtgctagcagaactgtttcaggaatgcgaattcaacctaaatattatatcagcagtcccaacaacaatttgaagaattctcctactgtgaagagttatagtgggatgagtgatttcaattatcaactggtcagaagtgctaaaagtgacagcattgatgatctgcaagtatcgtcttcaagtgacactagtgatagcttcaacttatcatctctgggtgtaatagatggtgatgaatggaatacgaccttcaagagggtgtactaccctcatgctgcatgcctagactctatatctgtcatatacgctaaagaaataggtcagatctccaactcagacttgagcttggcacatctgcaccaagggagactgctgcagaggcaatgcagtcaagcgatgagaaacccatacaactggttgaagacatccttgaagaatttgaagatgatgaggaaagggacttctcttacttgctggatatactga

SEQ ID NO: 31546 - DNA, 447 bp, Zea mays
  Peptide Sequence Number=SeqID_74921
atggcggagcaccagctgctccctaatcaggcgaacgcgagatcgggtgtcgctgtgaacgatgagtgcatgctgaagtttggcgagctgcagtcgaagaggctgcaccgcttcataactttcaagatggacgacaagttcaaggagatagttgtggaccaggtcggggatcgcgctaccagctacgatgacttcacaaacagcctccctgagaatgactgccgatacgcgatctatgatttcgactttgttactgcagaggatgtccagaagagcaggatcttctatatcctatggtccccatcctccgccaaggtgaagagcaagatgctttatgcaagctcaaaccagaaattcaagagtggcctcaatggcattcaggttgaactccaggccacagatgcgagtgaaatcagcctcgatgagatcaaggatcgggcacgctag

SEQ ID NO: 31547 - DNA, 438 bp, Zea mays
  Peptide Sequence Number=SeqID_74922
atggctcagcaggcccggcccgatttttggccgggcttcaccgggcccgggccgggccggacggcccgtttggccatctctaagtggaaatgtggaatgcggtggatacgacagaacgggaagcgcgcggcggactacgtgcgcccattctcagttcgacacgtggcggcgctgggcgggcaccgcaccagccacctgcgggaccgccacggcctcgcgctcggcatgcacgccgccgcgccggcgaaggaggaggataccgcgacgaagccggcagcggcgaaacccgcgcccgcgcccgcgagccacctgtgccacgtctgcggcctcggcttcgacatgggccaggcgctcggcggacacatgcgccgccaccgcgaggaagcggccgccgccgccgcgcaggcgccgcccgtcctcctccagctcttcgtgtag

SEQ ID NO: 31548 - DNA, 1530 bp, Zea mays
  Peptide Sequence Number=SeqID_74923
atggccgccaccggcgtggtcgccgagccgaagaccaagtacgatcgccagctcaggatatggggtgatcaaggccaggctgcactggagaaggctagcatatgcttgcttaactgtggtcctaccggaaccgaagcattgaagaatctcgtgcttggaggcataggaatggatgaaggatgtttggggcaaccaagagctaaatctatatgttctttcctacaagagcttaatgacgctgttaaggccaagtttgttgaggagtctccagcgcatttgatagatactaatccttcattcttttcccagtttactgttgttattgctacccagcttccagagagttttttactgaagctagattatatctgcaggaaagcagatatcgttttggttgctgcacgttcatatggtctaaccggtttggtcagggttagcgtaaaggagcattgtgttatagaatcaaaaccagaccacttcttggatgatttgcgacttcacaacccatggactgaactaaagcagtttgcaaaatcaattgacataaacgataaagatcctgttgtccacaaaaatactccatacattgttatccttgtgaggcttgcagaaaaatgggcagatgcacatgatggtaacttgccttcaactaggcaagaaaaaaaggaatttaaggatctaattcgagcccatatgcttaatgtagatgaagaaaattacaaagaagctgtggactcttcatataaagtatcagtcactccaggaatcaataatgagattcgtcagataattgatgatgactctgcggaagtcaattcctcatcgtcagatttttggattttagtggctgctttaaaggagtttattgcaaaggagggcaacggtgagctacctctggagggaacaatacctgatatgacttcccttactgagtattatgtaagcctacaaaagatttaccaagctaaggcagaatttgactgtcttgccctggagcatcatgtaaaggaaatcttaaagaggattggtagagatccggattcaatttcaagagcatatatcaaaacattttgtaaaaattctagaaaactaagggtttctaggtatcgtagttttgaggaggaatttagctctccgtttgtccctgagattcagaggtatttcaccgatgaagactacagttacgcaacgaacttctatattctactacgtgctgttgatcgattggctgccaattatagcagattgcctggaatcttcgacagtgagattgatgaggatatccctaggctgaagactgttgcggcttcagtggcaagtgagatgggtttgaatggagcatccttatccgaagacctgataaccgagatgtgccggttcgggggtgcggagattcatccagtggctgcttttgtcggtggagttgcttcccaagaagtgattaagctggtcaccaagcagtttgtgccgttgccgggaacattcatatttaatggaatcgacctcaaatctcaagttttgatgctataa

SEQ ID NO: 31549 - DNA, 453 bp, Zea mays
  Peptide Sequence Number=SeqID_74924
atgaagcggctcacgcaggatgaggaccaagagcaggagcaggagccgggtgtcatcctaagcgtggcccagggggtcacgctgctgctcgcgcgcagcggcggcggcggcgagccgcgggcctcgccgcgcgtgttcgagtgcaagacgtgcagccgccggttcccgtcgttccaggcgctgggcgggcaccgcgcgagccacaagcgcccgcgggcggcgccggccaagggccgcccgcacggctgcggggtgtgcggcgtcgagttcgcgctcggccaggcgctgggaggccacatgaggcgccaccaccgcgccgtggccgaggagtgcgaggcgcgggacggcgcggcggctagcgcccacgggatggacgtggacgacgccgaggcgaagccggaggaggaagcgacaggcctgctgcgctttgacctcaacattgccccatcatga

SEQ ID NO: 31550 - DNA, 591 bp, Zea mays
  Peptide Sequence Number=SeqID_74925
atggcgcgcgccggaatcagcagggtcgacgatgtcgaagcagcgaaatcagcagggtcgacgaggcagaagatcacgagcagtcgcgtgaagacgcttcccaaaaaccttattcgccctctcccggtgcaggatctagaagacgaagggttccggagacctgctctcctgatcgcagatgcacgtctgcggccattggcattcgctacttctgtttgggagcagaggaaaggcaagagaaaagaaaaggagcagctcgtgttaccatgcatgcctgcaaaagccaaagcgagacgtgagacgtgtagtgcttggctttgcttgattcttccctccgatgcaatctctcaccctattcgctctcagccgacgaggtggttcatgggtttatataatcccgagttcaaggacggctattatgcggagtttattaggatcctaatcacagatccggcggccaacagggcatcaggacttgttgtaatagcccgagattcccgtttattctccacggtcaccgctgaactcgtgcggaggttgttacaacaaagagatggagctgaccggatggccccaccagccgatggctga

SEQ ID NO: 31551 - DNA, 693 bp, Zea mays
  Peptide Sequence Number=SeqID_74926
atgtcacccatgggagcgccttcgagtcagtctggtcactatttatcttcattgttgcgccctcaagcggtagaggtggaggtcgtggactgggatcgtgctgcacgccgaagggagagcaaggcggtccgcggttgcgccgagatgcccgagcttgacgaggaacaggagagcacgggatttccagcggtccagaccgagagctcggctccctacacgacatcatcatggacgccgccccgctcctcgctctcctcctcgcggccgtgtccctctccgcggcggcggcgggcgacggcgcgcacccgggctactccgacgagggcacctgcacggtggaacgccgccggagcgggcgtgggctcgggcccggagctgcggcgcctggaggagcgccggcccgggcgcatcatcgacatcacgcacgcgtacgtgccggaccttctggcgttcgcgccgggggctgtcacggggcccttggtccacctcaaggagtccatggcgaacgggtccgagtacaacctgtcggagctgcggttggagtgccacatgggcacccacgtcgacgcgccaggccacatgaaccaaggccacttcgccgccggcctcgacgtggacacgctcgacctcgacgtcctcaacggtgaactacatcatctcaataatccccgctctttggcgtcaatgctttga

SEQ ID NO: 31552 - DNA, 2949 bp, Zea mays
  Peptide Sequence Number=SeqID_74927
atgaagataaatagtgaccagactgactcgaaggcgctcccatgggtgacatggcggttccctctcgacgacacctccaggttctggtccacggcggcggcgtctgcgcggggacggggcgaacgacaacaagcgtctcctgacgaagcctccacctctctaggttccctctgctcctcgtgccccgctgtagatcaggtcggcactctccctccaccgcccaccacacctcgcgtggcatcctccgcgggcgagagcacagtcgggccctcgccgctcgcccgctcccccacgggggcgtcaaatccgaattggctgcatctaactaccggcggggccaacgatcttagcttctccttcccgcatccagagcttctcggtgagtgcgagacttcgggccggagaactgggaaagcctcgaggagacatggatgggttgcccagagagttgtgcctcaagatcttccacctcctggatcaccagtccctcgcctcttctccccaaggaaatggagggtgttgacctcggatgatgaactgtggcgcaagctgttcaacgacaggtggggagcggacgccgcagcgttctacacgccggagggatccaagtcttggaaggacgtcttcgccatgcaggaccggtgcgaccgatacggactgatcattagggaagggaaggactactacctgatctaccagggcgagatccagagacaaccagaaatttgccatgacctcgttcctgaccaagaaaaactgtcaagcacagaatcacagttgatatattgggattccaaggtatcagaggctgatatggatgcaatgtggaaacatcctgatgtgtataaggagtggataaaatctggtgagagacgtggaaatgtacgattctcccatgatgcaaagaacaggccttacctttctcgcgtcgaggtgaaggatatgattgccttctcatgttgtgtatatgatggtggtgatgaggagaaggaaatggatgcagccagagaaataggttggagaaggaaatttactaagagaggacgtgtaataagaccaggaattattagaatgaatggaaaatgtcctcttacacctttggaggttgggttaatgcttcgtggaatgggtttcagcaataagactgcaatctttttggcatctggaaagatttacaaagcagagaagaacatggcttctcttcttgaaatgtttcctctcctacagacaaaagagacactggcatcagaagaggaacttgctccattcaaggcttcattcgcgccgtcatcggcaacggctctggccttcccacaccaccgtccacctcccccacaccgccgccgctcgcattgtggcggtttggttggccgcagagcccccgctctaggtgcctctagctcctcctcggtttcgttctcgcccccgtctccttccttttcttcttccccaagttcttcacccccatctcgtcgcttccatggcccagacctcaacgcctggcgcctcccagcgacctccgcacgtggggcccaaacagtccttgcgcctctgatgttgatgagccagcgactgacgacgacgtggcctcgtcgctattggagatggggggcgctcgtgctatccaccgccgaccctctcaccaaggcacgacgcacccacgccgccttctcccggtgggccgtcgggctccctgtcggccaggcgacgaccccctaccaccccaagcgcaaggactgcctcgtcgagcacgcgccctacgcccgcccgtcgtcccccgcggaggagccggagaagaagacggtcaagccggcctcggccttggcctcctggctcgggctcggcagcacggaagctgaccgcctcaccatcgctacctggtctgccccgccgtcttcccccagatcgtgcgagacctgggtctacccagtgccgctcgcccgctcgccccctaaacctccaagcccaggtaacctccgcctcacgctctccagctccgcctcatccactgctaggaagtacacaccagagcgccgccagaagttcatccgagggcaacgaagcaaccacgagaagatccacacggccacaatgaagatcctgatgtaccagctttgcaacagcgtggccttcgtccacgaccccaaggtgctgcaccgggagctcaagttgcacatccttctcaaggaccacaagaccatggtgctcaagatcgccaacctcagccttagccacgccatcaggccagaaatggttgtaggttggtatcactcacatcctggcttcggatgctggctatcaggcgtcgatatcaatactcagcaggagctatggtcattgttggagttcatgatgcctgatatatttgctactggggatgttgatctgaagaagctgctgaatgcagaagatcgcgaactaatttcacagataaagtccattttagggccatttattcttagacgtttgaagtcaaatgttaagtttgttgtcatgggcacagagcagtctgaagcttacaaaaatgccataaatgagtaccgtgccgcttgccaggctcgtagtgccaagtcttcagatggcatttccaataatattgctggattgattccaaagcgacaaatatcaaactattttacacagtttcgtaagctattattgtcatatggtgatgtgggcacaaagggcgctctaaaggatgagcatgtttttgcatcggcaaaatgtcagcacctcctcgccgggatggtgggaaagaactccatgaaggttgctcgtgatctggccatgcaggagggaacattggtcgatggcataaaagaagtcgtcttgtctcctgcacatgctttgtcccttattgcagcaggagaagcttcaccgtgcccccgctcccgcccgccggtgtgccgccactccgcatccaggcgcagcgccggtgttccacggtaa

SEQ ID NO: 31553 - DNA, 723 bp, Zea mays
  Peptide Sequence Number=SeqID_74928
atggtgaccaccagtttctgggtggggaagagcaagccgggctgcgatcttggtcccaccctcagcttcaaggatgttcatcatcctcgctggggtgggggccacgctgagccggcgctctacctcccgcgcgggtccgcgggtcacccttttccgcggcgttcgggggtggaggcgctcgctggccctacgggcggcgcggacttagacaacgtggggctgatcgacggcgggcgtcgtcacctccagcgtgtcggagtcgtcggccgggctcccggcggcccctcctgccggagggcggccgccgtgccaggccggtgccccacccgtctgggaggatttgagtggggatctgccggggggctggcgtcccctgccatcggcgccgaggcggaggcggctcgagaagtcctcgtcgccgacgggatcgctgccaccatccgcgccccgggccactgcgccggcgtacttgtcctcgcccctcgagcgtcggcgtgggcgagggcaagattgcagcagcgcccgcccactgtcgccgtagtcagaacgggcggcggcgagccgctcgtcagtcttctgtcgctccgcaggccttccccatggagtggggtcgaatctctcagctcgatcggccttgttgtctggggctcctctagcttagttaaagagacccctcggtcgctcttcgatgagccgaggccaggggtagcgacatcagtatga

SEQ ID NO: 31554 - DNA, 852 bp, Zea mays
  Peptide Sequence Number=SeqID_74929
atggctcgtcttagacacactgcacgtaagtcggtgattcctttcctgccgtctcgacttgcggagcgtcctctgcaccgcaccgtgtccggacagtcgagtcacctggagaggctgcaccaccgtctgcgtgaggagcaggaacgccggcaccagcacggagagcagcagggctcttcctccccaccccagcgagaggtggagtccgtgaggccccgttcctctgttgcccagctggaggcgccccctgcaccaccgcgggacgtcccggctgttggaggagctactggaggagatcccgacgacgacgactcagaccacatctaccagcacagtcgcgggaggtacccggaccgctgggaggctacctgcctagttcgccgtccggaggatgacctccggggtgcggaggccgtttcggagcactattccatctccgaaagggacactgcagaggcggctatgcaggatgcagcacggcgtgcactctccctgtactgttctttgttcggtggcatggccgatggtcttaaccttcggtactacccccgccgtcctactggcagcacagagagtgtggttgtctcacctgttggtgagggtaaccctaggttgagcagcacagtcaacctagtcgcagtgcttaacactgagctggatcactctctgaacgagctaagcagggctcgaacggagattgcggggttgcgtgctgagctggcagagcgccatcaccaggagagtggttctcctgcacctgttgggactcagcacccataccgctcgccgccacgtggtcaccacacttatggttcccctgtctgtaagaccaggatagatctggatccttag

SEQ ID NO: 31555 - DNA, 417 bp, Zea mays
  Peptide Sequence Number=SeqID_74930
atgacgctagaaggaaaggcgaacgagatagttacggtccataccatgaatcggtgtctggttgatggtggccacggtggaacgcggcggccgcacggcggagctccaagcttcgccccaagcttccagggggttggcgtggagcggataggggcgaggaggtctggctttatacctagggcagagtccgagcaggtgggtgcgagtagcaagatctgcggcgaaaatcccggccgaggatttggctttcgccgcggcgatttggaatacggacgccgcggcacccagcagaggaagaaggacccggcgaacggggcccaccggtcagcaacacgagtccgtgcccgcgcgcgcgatgaccagatcctggcggagggggcccgcacggcagggaaagaaaggaacgcgggcatgtga

SEQ ID NO: 31556 - DNA, 1026 bp, Zea mays
  Peptide Sequence Number=SeqID_74931
atgtcgaggcttcggctaggcgacggtgaggcatgcaggctgcgcgacggctgctacgggatgcgcttgacaggcgcgcgacgcgtcatggagagcgagcgcgagcggcgctgggcgcgcgacacggctgggtgcggggcgtgcgacgcgagcagcactgaggctcgggcgagcgcgttgggcgcggctgcggcgtgggcaagcgcgaggatagggagagaggagtgggcgttaggggagaaggaagaaaactggggcgcgtgcagttctaacagagaccatgtcgggcggttgacgaggacctcgcgacgtgggcgtccagagcgggaggacggttggagaagaccgcctggcacgcgggatggcgagtggatcgtgggcgcggctgggagcgcgccaggcggccgagcgcggggcgtggccgagccaggcggggctgggcgcggcgcctacgggcgagcagcgcagcgggcgagcgcggcaactgcgcaggcgcggcggcggctggggaagggcgcggctgctgggctgcggtgggccgcgcgcgctagggttgggggcgcggctgggccgtggagcgcggagtgggccgcgggcgcgatgggctgccaagtcgagcaggccggggcgcaggggtggccaggggagggcgctgggccgcgcggatggggcgccgaggtgttacataggtcctcattcccgtctttgctaagggagggagtgaggacatccaagaacacggccgccgctcccgcaatgtacgacgccatgcgtgacccaccactgcacctcgacccagctgcagaaggcagtgtcggaggtagcaccgaggccatccatgccaaggcatcgggcacgcaacggctggtgacacccgcagtcagccagcccggcgtatccaaagctcacctcctccgcatgaatagcgaacgcccttctcccccgatcactgagggaagaagcgggccgctacccacgcggaggtggggccccaactcggcatgccctcctccccagcacggatga

SEQ ID NO: 31557 - DNA, 219 bp, Zea mays
  Peptide Sequence Number=SeqID_74932
atggggctcggtgtggcaatgagattgatggttcttggttttgactctggtaatggattttggcctgggaagccaagttgtgtgtctgagccccctagatggtggcttcaagtactaagacacctgccgcagggtggtggagtatgcaggctcacgggtttagtccgggtggccaagttgcgtgtccggacccccctgggtcgtggttctagatactag

SEQ ID NO: 31558 - DNA, 198 bp, Zea mays
  Peptide Sequence Number=SeqID_74933
atggtgcccagatccggcgaccccctgctggtcaagttcccagccgcgcaccaggacagcgtcgacccccgcggcggcctgacccttggtgagccccttgattcggtcgtcctcgctgcgcaggttcccagcgccctcgcctgctcgacgggatgccccgtcgatctgtgcagccacggcgcgatgtcactgactctg

SEQ ID NO: 31559 - DNA, 447 bp, Zea mays
  Peptide Sequence Number=SeqID_74934
atggagaagttctatgccttcggcttcagttatgcatttcaacatgggttgacatgggttgacttatcccctttttgtagagatatcctcggggtttcgtacggctggtgtgccgactatgggataaaatacatcggatggcaagggcttcgaatagcggcgagatactgcattaatatgagctctttggcggacgtcagcgcctgcgtgacaccatgcctcattagagtggatggtccagacggtgatgttgtaactggagagttccgccacccatttggttattttggcggacgcctccggattcctgagcaactctctgagacccctatcagaagtgactcgtactttgtgtgcctcaaagtagtgtctcagcttgctcaaagccatgatgaccatccggagtcgagcttcgtgcatgttggcgaatgtttctacgaggtctga

SEQ ID NO: 31560 - DNA, 954 bp, Zea mays
  Peptide Sequence Number=SeqID_74935
atgggggttggcgcacttccgccatcgctcggctttaaggattttcatcatgcagcccggccggtggtcatccacaaggatgactaccagccttgtggtggagagaagcgagccgggctgcggcctccccctgccctcagcttcaaggatgttcatcatcctcgctggggcgggaggcgagccgagttggggtcctgccctccacatgggctggcgacccgcttcttcctccagcattcgagggagaagggcgttcaccagccttgcggaggaggcgaacttcggctacgtggggccggccggctgcaggcgccgtcagctgccgcgtgtctggctcctcggcctggatggctttggtgccgcctccggcgctgcctcctgctgcttggccggggcgtggctgtccgtccaccgcacgggcgacggtcgcgccgtgcgcaggtcggccacatccacgacttctcccgcgtcgccggccgcaccggggggtcgtacaagacgtcgtacgccgcgggggcggcgtcctcgttcttggatggtcttgtcctcactcccgcagcgaggacgggagcgaggacctctttgcgcgcgctggggcggcagccattcgccggtacgacactggtgtgcaggtggccactgtcgtcggtgcagaggtggtcgccgccgctggtgaggctgcccactgcagaggtggttgcctccgctggcgagaccgtcagtgccacctgccgctggacttccggctcttttggctttaatggcctcgttgtcgccccccgtaggaagacgggggcgaggaccttttcgcagtggcgtacgcgcgggggtgatcgccactgctggcgagtcgttggtgtagaggtggccgtcgccgtcggtgctgatgtggtcgcctccgctggcgagccgctcggagctagctatcccgcggccctactggtgtggaggtag

SEQ ID NO: 31561 - DNA, 906 bp, Zea mays
  Peptide Sequence Number=SeqID_74936
atgaagatggttcgtactatccaaaccactcggataaacaccaactacatccctccaccaagacaagttcctgtctaccccgtggtagtcgaggaaatccctgtggatctccctcgcattcgtgtggagaacagagtcatactggatgacagcccggaggagtttctgcctacgcccaccccattggcagaatcactagccttcgtagctggatcgtcagcttcagcatcgccagcactagcagtccaagcccctcctcctggaggcgatgacccagacgactctggtgacaatgatgaagacgacgaagaggaagaagaagatgatgaagaaaacatcaatgatgaagccaacaaagaacagcaggaccactacgtggggttatggcctgttactgaacattatacttcaatgttcgagacatggcacttccctaacctgttggtgatggatgcaggtgatagagggttcaggactctgtcggctcatgagtctctaaagccgctatccacctatgctgcatcagtcaacgatgctgttaggcgaactctgtggtccctcagccacacctactgggagcagctgcacaacacaaagtacatgcatcttcctctgcgtattcgtggagaaagccagactagcattgttctaggtggagctaatgatgatcgcctcaacaccgtagctggtgtggtggcaggtcttaacaccgacctggatagtgctaccctggacctctctagggtacacttggagctggaggatgcacacgcaaggattgcaaccctggaagctcagcttgatggaaggaatccccctgaagttcaagtccctacgatgacgttatctcctccccgcaagaggatccgctatggagaaccaggatccatcaccaggctgctttag

SEQ ID NO: 31562 - DNA, 321 bp, Zea mays
  Peptide Sequence Number=SeqID_74937
atggctggcactcaggagcgcgctctgaccgcgcccgcgcacgccacgagctccgatcgactcgaccgctcgcctaacaacgcgtctgtgcccgagcccttgcctataagaagcctcagccctacgtccttacccttctgcacgcctcatactttttgtcggcgattggacgtcgattgcaacctcgctgacggagagtatgtactcatcctcgagcaaggagctcaccaagaggaagctcaggagctagctacagaggctgctactgaggatctccctgctgccccagcaattgaaggcaagccccagttttatgcataa

SEQ ID NO: 31563 - DNA, 369 bp, Zea mays
  Peptide Sequence Number=SeqID_74938
atggtcggttggcgtggcgatctagccaaggttgcttctctgcgaagactgggcctcgggcgagccgaagcttgtttgggaattttggtaaacctatttggggtattatcctttgttgttaatggttcaagtcataacagtgtgattcaaatagttttcttggctggttttacgttgatgctttcctttgctcaaggagaacacgccaaaagggagacggtcaccggcgaaaagcctgaagcttcgggaaagaagaacggcgaaaggactccgttgaaggaggtcgacgacaagaacaaggagcacaaggaggaatctgccggctccatcaaatcacataggaagggtgataggaaaaaaagaaaatga

SEQ ID NO: 31564 - DNA, 336 bp, Zea mays
  Peptide Sequence Number=SeqID_74939
atggtcggttggcgtggcgatctggccaaggttgcttctctgcgaagactgggcctcgggcgagccgaagccggtctggttgttccctcatgcgaactggccgtagcccggatgcacagtcgagtcccaagttctcgggctggtatgttgacgctgtcaacggtttggccggagccgggtttgcgagagcagcccccgagcctccgcacagagcgagaggacggtcaaggacagactcggctttttacatacgcccctgcgtcgcctttccgcaaggaggaggggggaaagcgccatgttgccctcggagggtgccgaacatggtgtctccaatga

SEQ ID NO: 31565 - DNA, 222 bp, Zea mays
  Peptide Sequence Number=SeqID_74940
atggcgttctctccctctctgcccaactccggcgaccccagagccaccctagctcgcgccagcctcaactccggcgaccccaccgccgcggagaggaacaacgctgcccgcagccaccacgagcagtccgaggttcctgaatgtgttgttggagacctccctgagcaacaacctggtgaaggcaagtgtcctctgacctattatgtcctacatactctataa

SEQ ID NO: 31566 - DNA, 1200 bp, Zea mays
  Peptide Sequence Number=SeqID_74941
atgtcttcgcactcccttcatgcatcgcgtccttccacctttcgagcccccggatggggagcgcccgcggttcttccgccttgtcgtcgttggaggaacgcaacttcgcagaagttggtacctttcagccatcgttctgcttcaaggattttcatcagacagcccggctgcatcccctcgccggtggtcacccaagacagtgaccaccagttccagggtggggagaagcaagccgggctgcggcctctgcccctccctcaacttcaaggatgttcatcatcagtgctggggaggggagtgcaccgagttggggcctgtctccgcgcggggagcggcccgctccttccctcagtgatcggggggaggggcgttcgccgttcgtggcgctggcagctgccgcgtgtctggctctccggcctgggcggcttcggcgctgcttccggtgccacctcccaccgaggcagccggaagaggtttctccaccgacgagatagttggagccacccgcggactgacctccaactccacggccctggaggcttgtcctcgcccctcgagtggggacgtgggcgagggtcttgtcgcagcagcatctaccctgaggtcatcgctgctgctgtttggccgcccagagcggaggttgttgtcgctgctgccggagcgggcggcggtgagccacctggggttgcgtcgccccgcgggccctccaatgtggggggttgttcgtacctgtgggggcggaatcagagttccgtttgtaatggcaccttgagtgtcggtgtttgtccattgtggctgtcggggcttgaacatgctcggtcggacttcgccgaaggtggagttgacgctgagggtgctgctgctccccctccattgacgtctgagcctgcaggattggacttatttgtcggtaacagaattgtttgtccgagcgagagttacttttcacggaaggtgatgagtgaggattctgctatcgatatagtcgagaaggcacgaaaaatcgttttggcagaaaagttcccgagcattaagacttgttcggtcagcggaatcgcttatccgagcgtgagttacttatcgcagaaggtgatgagtgaggatcccactttcgaagtagtcaaaaagcacgaaagatattctggcagaaagactttttccgaggaaaattttgacgcggagggggtgccccccttctag

SEQ ID NO: 31567 - DNA, 567 bp, Zea mays
  Peptide Sequence Number=SeqID_74942
atggaaccaggcaccgttgtcttcttcggtggcatgacaaagttccttcggctttttgacgagggagaaattcaaaggtacttcgaagaaaggattacacagagttgttctttgtggctcttgaaaaaggttttcagcaccgaagctcctgaaatacttaaggacatgctaataatcaatgcttcgctagcccaagggacaaagatcaaggaggccactgctttgaaggctctagaagttactgctctggaaccattctcagaccgcgaacaaaaagacgaggaacatatagctccattaatgagctcactctttgatgatgatgaagatgactccaaggacaaggatactgctagtacaaccttggtgaggaaagatgttatgtcgcttgctgcagaggtggcaatgtcagagagcctgaaggttcatccaatgcctctagtagtaacacccttggcaataataatggctgaggagaaaactggttctacgaaaatagtgaaagcagaggataagggcagagggccccccttttccttaagaggccaagaaagctatcgaggatga

SEQ ID NO: 31568 - DNA, 1410 bp, Zea mays
  Peptide Sequence Number=SeqID_74943
atggcgcctcctgttgacgtggctggcccgcgccctaggttgggtgatgtggaggctcctccgaggttgaggtcgagtcttcagtggccgtggtcgagtccgggcccctgggtcgggcgaggcggagaccgtcggctgaagccagggctgagtccgagcccctggggtcgggcgaagcggagttcgacgtcttctggggctgagcccaagtccgagccctgggtcgggcggagcggacccgagtccgagccctgggtcgggcggagcggagttcgccgtcttccggggcttagcccgagtccgagccctgggtcgggcggagcggagttcgccgtcttccggggcttagcccgagtccgagccctgggtcgggcggagcggagcttcctatggcgcctgcggccgggcctgactgcctgtcagcctccctctgtcaagtggcaccgcagtcggagcggcgcaggcggcgctgtctttctgtcaggccgggttgcttcttggcgaagacatggccttgggcgagccggagatatgttcgccgctggaggggggcctcgggcgaggcagagatcctccgggcctttgcagctttatgctgatggaggttaccagctgagaattaggagccttgagggggaccagcctttctcggttgcgttttgttccggtgggtgcgcgcgagcgcacccgccgagtgtagccctcgaggcctcggaggagtggtttgactcctccgagggcgagagggcgatcaggggcagactcggcttttttacatacgcccctgtgtcgcctttccgcaaggaggaggggggaaagcgccatgttgtcctcggtgggcgccgaacatggtgtctccgaggcgccgcctgtcccgccgcggagttaatgcgacggggcgagtggttcgcggggcggccgttgcgcgtgcgcgggccgttcgaggaacggaacacgggcgcgtcgtcttcacgccgtgagagagggctggcgctgctgggtcgtgcgctgggtcgcctcgagtcgcggtatcggttccgcagtcgaggaggcacggtagtggcgcaagtggcggtgcagttgcttgcacgaagcatccggcgcgccggttgcatgacgcgtgggcctgggcctccacgctgggcgtgctggaagtcggagaagtgcgcccacttggcgcggttgcatgccgcctacacggctgcccaccctttcgcccgctggtctgggcaaaagtggagagtcgcttgtaatccgctgggcgatggcacgcaccgcgcgcggcggtttggcttcttctgctctgggccggcttgcatgacgcgtgggacccagcccccgcgccgtagggggaggaccttggagcgtgtcggagaagactcagcccccgatggttggggacgcaagtag

SEQ ID NO: 31569 - DNA, 1263 bp, Zea mays
  Peptide Sequence Number=SeqID_74944
atgcccacccagaagcgcccgcctccgcctccgccaccctctccctccccctccgcggcccctggcgccggctcgccccctccctcgtctccgccgctgccgacggccgagcccgcggagaagaagcccaagctggaggtgaacggcagcgccggcgccgaagccaacggcaacgccaacgatttcggcgcgaaggaggggacggaggtggaggcgtcggagtctgagtcggaggatgcggacgccgcaaaacaggagaacaacgagtgtccagcgtgccgcacacactgtgcgagccggcgttctttgagagatgatccgaattatgatgccttgattgcagctctatatccagatattgacaaatatgaagaagaggagctagcgttcaacgaagaggagaatgaccgcaacaagcagattcaagcatccattgctgaggcttttcggaaacaatcagaagttattgggcggaagtctactgccaaagctactgctgctgcatttgtaagaagatcacgccgtaacattcggcctaatgggcagaatacctatttccgtggccgaggaaaagccagttctgatgacgttgctctggcctgttctgaagatgaagaggatggaaacggtgaaagctgtagcaaagaggcctcatctgcggaggagagttccccagagaaaaagcagaaacgactgccaaaatggccaacaccgcgttcttcacctgcccgagcatgcaatgatgaggttgcttctgatgaaaaggatgatgtaggaatatccagggaaaatttcagcacatctcctctacgagcatggggaaagaatggcactcgcagtcagactcgccacagtagcttcagtggttcaaatggcaggatggtcaagggtgggcgcatgatcaagttggttgagtgcttgcgaaattctgacgacaatgaaggcgagcgtgatgtacatctttgtctgcttccacttgatggacaaacggcaccaaatctggagaagtcatatctgtgttgcggcccaactctgtccatcaaacaactttgtcagtttgtcgccagtcagacatctcacaaagatgaagaagttgagatgtatgcgctgaagccttcttgtagcaagcctgtcagcactaatacatgcggtcctgacaaagcaaggctcgcaggggaggaacgcctttcagacttgcgctcctcgttcacatttcctaatggggttctggagctggtgtatgccataaaagtggctaactag

SEQ ID NO: 31570 - DNA, 474 bp, Zea mays
  Peptide Sequence Number=SeqID_74945
atggcttctgtttgtggaggttgtttagcacttcaagatgatggggttcctataaagtttcctgttgctagaattgcaatgggcctggtccttgatacacaagaatttggtggagatggtagcccacttatactttctgatattactggagctgaagatgcctctggtgacatggatttgaaggtagttgggataactctacctgtgatggagaaagcactccttcaagctagggaagggagacaacatattctaagacacgagaacagtgaggctgcactgttgataaagcacaggcgacgggacggaagaacagcgaaggggctccatatttgtgggattttaaaatacggtgaacaaccctcacctaacgtcatgggcagaggcaccggagcacagcgacgcgtgacgacctccacaggagatttacagcggcgcaatggcctcgctaacggcgattttcgaaaatcgtag

SEQ ID NO: 31571 - DNA, 891 bp, Zea mays
  Peptide Sequence Number=SeqID_74946
atggtgcgcattggggaggctctatcgcttgggttcccggtgtgggtggcatcagcctgcgccctcgcgctgtggcggccgccggccttcctctgggtcgggcccaccgcgcagatgcttggcctctccttcacaatgcttggaatgggaatgacgttgactttggatgacctcaaaaccacattattgatgcccaaggagttggctgctggatttatactgcaatacacggtcagggtgtggctcgcgagccaccttcgagccgagcctgcctccccagctcgtgaaatgggcgagccgagccgagctcgggcaaatgttgctctttcagttctgatgacagcagcaagcacttttgctgcagcgttcatgacccctctcctgacgtccaaactcgctgggcagtatgtcgcagtagatccaatgggactgttcgtgtccacatctcaggtcgtcctggcacctgtccttctgggtgctctgcttaatcagtactgcaatggtctggtccaactggtgtccccgttgatgcccttcattgcggtagcagcagtagccgtcctctgtggcaatgctattgcgcagaatgcttcggcagtcctggcatctggctcgcaggtggtcttgtctgtcggttgcttgcatgcatctggctttttcttcggctacgttctctcaagagtacttggcatcgatacctcctccgcgagaacaatctctattgaggttggtatgcagaactcagtgttgggccttgtccttgcaaacaagcacttgggcaaccctctcacggctgttccgtgtgctgtttcgagcatctgccactcggtctacggtagcattttggctgggatctggaggtctatgccaaacaaggacaagggagaatga

SEQ ID NO: 31572 - DNA, 318 bp, Zea mays
  Peptide Sequence Number=SeqID_74947
atgcacagacaacagcgcgcgtccgttacagctagcacggagaagctacgggacgcgcttccacttccgctcgcttccaccccgtccataccaccgccctgcccgcacctcgccgcgcaccgcctgtcctcgcgcccgctgcgcttcctccgccgctgcctgcgcgtgcgcccgctcggccgccccgagatccggcaggtgacagctatggaaaccactgagcagtttctgggatatgagtgctcttaccagttcaaacattgtatcagatcagctcaagatcgtaccgtggattatttcgatatggttcatgtctga

SEQ ID NO: 31573 - DNA, 216 bp, Zea mays
  Peptide Sequence Number=SeqID_74948
atgaacggatctagagcaaccgtcagtagcaccgcgggcacaagagcagcgagctcatgggcctctcttaaatcacggaggggacggctgtcggggaaccggcgaggtgaacgtaccaccgccaagggcgcggtgagagggatgcgttcagccggtggcctggaatttcagctggggcgcgcggtgagcggacctcctctgcagttatattgttaa

SEQ ID NO: 31574 - DNA, 1329 bp, Zea mays
  Peptide Sequence Number=SeqID_74949
atggcagggatatacagcgacgcccgcgactgcctcagcaggagggtgcagccgccggcccgcactgctgcgcggaccttcctctcccccgtcggcgaagcaaagagctccgcgaaaaagagatgggtccacaaatcccaatgggggatcgcccgcatgaagcggctcgtcggcacaccgaatccccgctcgtggaaggaaacgaagctcacgatgtaccccggcggtggggacggagcggctccgcccacggggggaatccactccggccgctgctcatcggtgagagggcgaagtaaaccctcaccaacgagatcctccagatcactcgccgtcaccatggaaaaaggccatgggtcgcgcggcgagatgatggtcacccgcgggacaggcggcgcctctggcaggagaagcgggcgacgcttcgccttcgccataatgaccgcgtcaaaaaagggaccgggaaagggggataccccgaaaaggatccttccccgtgaaggaaccaggctccgagcccccctactgatcagaggttcgaaggctggccccccggaagagttcgacagccgcctcagatcgcgtgggccctacacccactactggtcagaggttcgaaggccggcccctcggaagggttccacggccgcctcaggctactcgggctccgcgcccattactgatcaggggttcgaaggctggcccccgaagggttcacagccgcctcagacgccgagcgagggaagaccatgggtacgttcgatacataaccaaggctcgggctgcgctcccgagctcaccggagacaccatgttcggcgcccatcgagggcaacatggcgctttccccccctcctccttgcggaaaggcgacgcaggggccgtcaacataccagcccgagaacttgggacccgaccgtacacccgggctacggccagctcgcatgagggaacgaccagaccagccgaagcattacgcgaggcattaagacctcgaaggagtgaaaccactccttcgaggcctcgggggctacacccggcaggtgcgctcgggcgctcccaccggaacaaaacgcaaccgagaaaggctggtccccttgcaacaaagtgcgacgaaagcctccaagcgagtgctaacactcccttcgaggctcgggggctactgtcggggaccataattaggggtaccctcaaggctcctaattctcagctggctaagtccgggaagacggcgaactccgctccgcccgacccagggctcggactcgggctaagtcccggaagacggcgaactccgctccgcccgacccagggctcggactcgggctaa

SEQ ID NO: 31575 - DNA, 897 bp, Zea mays
  Peptide Sequence Number=SeqID_74950
atggcgcctcctgttgacgtggctggcccgcgccctaggttgggtgatgtggaggctcctccgaggtcgaggtcgagtctgtcttcaatggccgtggtcgagtccgggcccctgggtcgggcgaggcggagaccgtcggctgaagccaggcctgagtccgagccctgggggcttagcccgagtccgagacctgggtcgggcggagcggagttcgccgtcttccggggcttagcccgagtccgagccctgggtcgggcggagcggatcgaagcggcgcaggcggcgctgtctttctatcaggccggtcagtggagcgtcgaagtgacggcgggttgcttcttggcgaagacatggcctcgggcgagccggagatatgttcgccgctggaggggggcctcgggcgaggcggagatcctccggctttatgctgatgggggttaccagctgagaattaggagccttgaggatttattgatggcaacggtcccgatccccgaatccccgctgggaattccttcattagaggatgggatggggaatgtcctcccccacggggataccgggtggtccctgagccgacgagtgaatgtcgccgcgtgcccccagcccagatgggtcgagcgcgagggcgagcgtgaaggggggagagcgaggcggccggagaccggcgtgagagaggtaggaatcccgcggccttcgtgttcgtcccgcacccaggtcggggtgatgatggcacctcccgttgacatggctggtctgcgccctaggttgggcgatgtggaagctcctccgaagccgaggtcgagtctgtcttccatggccgaggtcgagcccaagcccctgggtcgggcgaggcggaggccgccggctgaggccagggcggagtccgagccctag

SEQ ID NO: 31576 - DNA, 228 bp, Zea mays
  Peptide Sequence Number=SeqID_74951
atgaccagcgcgctggacgttgctgggggccgcctgatgctggtggcggctgctgcctggagggcagcgatagagctcatgatcgtcgagaccttcgataccagattgattctcagaaggctgctggggcgaactgccagttctaatcctgtccttaatctggcttataactcaagttatgatcgagcaaccacaaagctgaaaattcatcaatgcttgtggttctag

SEQ ID NO: 31577 - DNA, 280 bp, Zea mays
  Peptide Sequence Number=SeqID_74952
ctctgatgatgctaaggaggtagtccattaccaaacaatctcaccaaagagcttagctaaatctgttctcgaggaaggtggctggtcaaacttcatgtgctcaagggaggatactcagaataatgttgatgttgccattgtttttattggctcaaagctgcaatcgtcagacatatctaaagataagcaagttgatccagctttagcagacacactgaagaaaagcttcggtatgacagcagagaaggggaatcgacttaaagatgaaaaggcaaattag

SEQ ID NO: 31578 - DNA, 2028 bp, Zea mays
  Peptide Sequence Number=SeqID_74953
atgcccccatccaaggacgagatcaccagactttgtgcagagctctcaaagaaagcacagaaagcaaacaacatctggtggaggctgagcggactgctgggtgaccggaaccggcaggtcatgtacatactgctccctgctccaggcgctgttcacagtggcaacaatggccctgacggtccctatattcctgtcctaccggatgcacgtggtgttcctgatactcaagatacatgccagtacggcggcctaccagcatgttgggacactgaggagcacttgataaagtctgcaaagcagtgtggagatctcacactaatgcatggtgatcttgcactcatcgattggattaaagaaatctcttgtgaaccaagggtagaagccgtgcttattgatgatgcttttgtggaaaggaagtggatggaatgcctatttcaaccggacgcatatctaggtgatgaggtgatagactgttacataaatttaataaaagctcaagagcatctaaaatgccgatctggaggtcgtgtacatatagaaaatgcttttcagttcaactttctaaagcgagacggtgatgctgaaactaaaacagatgagttatatccaagtaaagacatggcacaaatatctagcgctgaaagaagagttttactttatctagaccatgacatggtgtttattccaataaatatccgagaaatgcactggtatcttgctgtgatcaatgcaagaaatatggagatacagataaaaggactccaaagacaaattgatatggtatctcaacgtaaggagttaaaagatcataggtggccagacctccgagttgcttcttggccacttaaagaaatagaaatggaatatgcaaagcaaacagatagctcctcgtgtggcctctttctactaaactatatcgagtactggacaggggatgaactatctgataattttacccaggacgacatgtcacactttaggaaaaaattggctgctatattactatcctcagatataaacaagagaaaggggtgtccgttatacaagtatgacaaagaagtcgatgctggatgctcctctgatgttcagatattagatagtcccacaaatcctaagaagaggaaactaccttgtgtatctgaagaaaacgaagtattgatggaagatggtgatggccccatcactcaagcagacttagaaaggtggtttgttcatgattgggataaaagaactcctataaaaatcccgaccgatgagtgcactaatgagtttttactgagtggcctttccacaaaggacatgccagtgaccaaagctgatttaatagatgttctatgtgattacatcatgacaatccaagatgatacgacattagagatgacatgggtgcgaagtttcaacccttttaagatagaaatatctgtcaaagacctgcaaaacgtattaagggtaaatgtagatatgactctaaaatgttttgacatggctgttcgattgttggcaattaaagagtcacatatgtcgaaagatgaaatgataaaggataaaaaacattatatggacatgcgcttctgggttcttatgccatggaaattcaacggatgctacgcacttttcataatcgatcatggtaaaaagcacgtaacttttatggactttacacccactgaagattggtgtaaacacatgccatacaagaggtttgcagaagcaattatcatggcctctaagaaatataagattgcctacaataagaaacgttctggatgggcacatgatatttttaagtgggaacatacaattcggtctggtcttccattggacttaaaaggggttaatacaagctacttcgttctacaagctatggtcatgtgggggagtggtagacgaatgaaatttaatagggatacaaagattcttcgaaggaactttgtaattgatctattaagttacgaggggaattcatgccgctatgctatccctccaaacatacaacaacgacttatcagtatcgctaaaaaagattag

SEQ ID NO: 31579 - DNA, 360 bp, Zea mays
  Peptide Sequence Number=SeqID_74954
atggagagctgggagctgctgcttctgcataatctgcaatttcagtttggaaaccgccaagatgcactggttaggacacattcaacatcaaatgagaagctagaagagtcacagctgcaaactgctatgggggcaagcaaaatcaaagtatcccaaggatgcatagatctcctgcaggaatttcatcatctgatagatggcaatatagagtttcttgtaaagttgagagatttggtcattgatgggtacaagaaggttttcaagattttttccagaaacttgatgggaattttcatgtgctttctgggagaagcaaaaaaattcccaggagtcaactactctggattctgtgcaaattga

SEQ ID NO: 31580 - DNA, 525 bp, Zea mays
  Peptide Sequence Number=SeqID_74955
atggcaccggggagcagcattgtgactgtagtccccgagtcggactgtggagatgacgatgggcttcctgagtcgattgggggtatcaggcttgacgtagactctgcaagtaaaccgtggtctacatcggcatcgctagccaatgttgcattgtcatcgctgtgtggcttgaatgatttgctcgaatgcccagtgtgtaccaactcgatgcgcccacctatactccagtgcattgcggtgaaccccgcgatggagagctgggagctggcagctctcactaattttcagaggcgtttctgttcaactctcggaatgaccaatcaagctgttaacgcagcgaaggaggcagttcagcgctcagaggaccttgatataaggagaagattgtttccccagatttcaaacagaagtcaagaaaacagtttggattcagattgtgagcaattcaattgggatgactttgaagttctagagataaagagtgcacttaatgaagtccttgaattaaatcaaacagaaaaatag

SEQ ID NO: 31581 - DNA, 2082 bp, Zea mays
  Peptide Sequence Number=SeqID_74956
atgggcgcgtgtgggagcatcaaggctgttaagtacctgttcaagtacatatacaaaggccatgatcgtgcgtctgttgttatgagagatgcgagtaaggaaaatggtgatgtagatgagatccagcagtatagagatgcaaggtgggtgactcctccggaagccttatggaggatatatggatttgagcttagtcagaactctccatctgtgatgcagctgcaactccatcttccaaacatgcacatggtgacgtttcacgagcgacaaatggtcgagcgagtcgtcaatcgtccaggtgctgataggtcaatgattacagcatattttgaggcgaataagctgtacgaggaggctcggggcatcctgtatcgtgacttccctgagtggtacacttggcagcagggcaaagtgtggcaaaggaggaaacggaatacgggtggacaagtcggtagaatcgtctttgctctaccatctgagggggagcgcttctatcttcggctcctcctaaatcatgttactggtgctacctcctatgtggatctaaggacagtagacggtgacacactaccatcgtttcgtgaggcagcacaaagaaggggattacttgaagcagacaacacaatagatgagtgtctcaatgaagctgctctttaccaaatgccatcagcgctacggaggttgtttgcaacgatactggttttctgcgagccgaatgatgtggccgaattgtggcagagacaccttgacacaatgtccgaggattatcatcgtattactcagagtaaacgccatttgcagcagatggtcttgattgacattagaaacatgttgcagtcaatgggtaaagacataaagacattccctctacctgctatcatcgatagatatgacgattcacaaggtattgatagagagatttacgaggaggaaattatcgaggcaacggcagaagatgttgctttgcaagaaaccctaaatgaggagcagaagtctgcctatgaaaagatcttatctgttgttgacaccagtaatggcggacaagattgcagttgcaacagctacatctggggttgcggcttccataatgcctggtgggagaactgccccattcacgcttcaagataccactttactattgatgatggtgctatatgtaccttcacgaaacaaagtgggacatcaaagttgctacagaaagcgtcgctcattatttgggacgaggcatcaatggctaagagacaatcaattgaagcgttggacaacagcatgcgtgatatcatgggacgccctgatctgccctttggtgggaagactattgtgtttggtggagatttcagacaagtactccctgttgtacgtaaagggtcaagggctcagatagttgctgcctctctacggagttcttacctatgggaatcaatgtgccacctaaagcttgttcgcaacatgagagcaaagagcgacccatggtttgcagaatatttgttgcgtgtcggtggtggaactgaggaagtgaacaacgatggtgatgttcgtcttctagatgaggtatgtgtgccatataccggtgatgaccgcgaccttgacagattgatagatgacacttaccccagtctaaacgaaaacatgtctaatacaagctacatcacttcaagagcaatattgactactcggaacgactgggttgatatgataaatatgaggatgatcgatcgtttccaacgggagcagatgatgtaccatagctttgacaccgcggtggacgatcctaataactattatccatcggaattcctaaacacgctgactcctaatggactacccccgcacgttctgaagctcaaaattgggtgcccagtcatgttgcttaggaatatagaccctgctaacggactttgcaacggtacacggctggtgctatatgttgctctctcaagggccacaactcgattgaatgtgaaggtacttgtaattccagtcactgatgataaaatgaataagggggtggaaaagaagtcaacaataaatggcgtaacatacacaaagaatattgtctataaggaggtccttacgccgtag

SEQ ID NO: 31582 - DNA, 657 bp, Zea mays
  Peptide Sequence Number=SeqID_74957
atgtcatgcttgcagttggatgaaatagaggacgagcaccatatgaaagacgagcaccatatgggggaggagcaccaaacgagggagggaacaaaagaggagcaccatatggaggagcgccatatgatccatatggaggagcatcatatggatatccatacaggtaccttggagaggaccagcaaggacttgggaaaggccaaggtgttgaggaggagcagcaagggcgtccacaacaggaaggagatcaagtccgagtcggctgcgactctatctcgggttccaggaccagtctgcactaaaatggacgcccaagatgcatccggactccgattgcgacggactggatatgggataagccttcgtggcaagggcgaagataacaaggaaagggcttcgagggaccaggcgaaggtgaaggccaagcgacggcttgtggaccgaggtaccatggctaaggtacagatatacctcgacgattcgaatgcggaccggatggcgagcccctcggtggaggtggctgaccggcgcgtcggggcaccggcggacgacggagtagtggggacgacgacctggctagggacgacggcgtttggttggggcggcggtgtggcggttggggcagcgggctggggcgacggctgggggcggcggtga

SEQ ID NO: 31583 - DNA, 216 bp, Zea mays
  Peptide Sequence Number=SeqID_74958
atggcggcagtgtggcagaaaccggtgaacgggagccccaggaccgccgcagcgccgtcgccggcggcaagccctattagcagcttggtcggccggcgatcacgggaggatcccgagaggctacgtccccatgccattctggagatggccgcacagctagggctggatatcgagccagctcggctcggctcgtttgagctcgagctggctcgttaa

SEQ ID NO: 31584 - DNA, 417 bp, Zea mays
  Peptide Sequence Number=SeqID_74959
atggtcggtgagggcgtaccgctcgagggcgagcagaatgagatcgcgccagcgattgtagtggggagaaagtggatccaaaaccacgggcacaagggcacacatgttctagatattcgtcgcctgcgcttgaagattgacgatgagggcggcctcatagtcggggtcttcgacaacatcagcgtcgttgttcgggacgccgccctagggtggtgggaagatggcgctgacgcgctgtgggtgatagccgcaatgcgctcaaggtcggaggcgggcctggcgagctgtctcctacgcagcgccgacatcggcgatgggtggaggctctgcggaggccatggtgctgcagcacaggcatcgtattcagggaagagtttagcaaaagctataggtcatatgattgtgactatcttgtga

SEQ ID NO: 31585 - DNA, 729 bp, Zea mays
  Peptide Sequence Number=SeqID_74960
atgaggctgtggaggcggatacagtatgaggaaaggaaatgtgccaatcagagaaagcttctctctgatgcagagactgtcaggtggcttaattacgctgtggaaaagatttggccagtttgcatggagagggttgcatcccagcagttccttttacccatattcccgtggttcctagagaagttcaaaccatggacagcaaggaaagcagtaatccaaagcctttacttgggtaggaacccaccgatgtttacagatattagggtagttaaccaatcaaccgatgatgaccacttgaccgtgaaacagctaaaatttacatgccaggttctagagatagggatgaattttctttcagctgacgatatggatgcaagaatggctgtgcaactaaggaagagattaggatttggcattacaacaaacatgcatataactgggatgcatgttgaaggaaaggttctggtaggggtgagatttctgcggcagtggccatttattgggcgtgtaagagtatgctttgttgagcctccatacttccaaatgacagtgaaaccgctgtttggtcatggacttgatgtaactgaactcccaggaatttctggatggcttgacaggatgctggatgttgccttcggacagacacttgtggagcccaacatgctagttattgatctggaaaagtttgcctctgaatcaacagttagttgctcccttcatttcaattga

SEQ ID NO: 31586 - DNA, 216 bp, Zea mays
  Peptide Sequence Number=SeqID_74961
atggagttgaccgccggatccagaggaggagcaccgactgctggattcaaaggaagagacgagacgttctgtatccgaccattggagggcaacgactggatctggaggaggtttggcggtccgaagtcagagtacatccacatatctgcatgcttgagcacgcggcactacagaaacacaatgaaagctaaagtggtcgggttttttggagtttga

SEQ ID NO: 31587 - DNA, 87 bp, Zea mays
  Peptide Sequence Number=SeqID_74962
atggcgagaggttcacaccgagccgaggctttatactccggaaccggcctccgatttgttggcgttggtaaggaagacctccactag

SEQ ID NO: 31588 - DNA, 417 bp, Zea mays
  Peptide Sequence Number=SeqID_74963
atgtcggggggactaagaaacgaaagtgcttctaagcttgaaaaagctgaggttgcctcgacttcatcttttggtacagatgttgatcctagggcaatagaccttgccatcagaatcgccgaaaggatgttcctcaaaatgaaggaagatgatgcaaagaacaagattgaagaagaagaaaatgatcgatggagaccaaacgacgaatccacctcttcacaagctgcagttgagctttttcaacttcagttgaacttcacctcaactacagttgaacttcacttcaaccggggtccagggaaagttcaaccgtctgacctgactggcagactgaccatcagcctgcccgagacggttgaaccggccctaggggcagttcaaccggtcctccacagccaaaatcagcccaacggctag

SEQ ID NO: 31589 - DNA, 433 bp, Zea mays
  Peptide Sequence Number=SeqID_74964
gaagcccaggacgtcatcggtcaggtacatccgcaaattttctcctgcccgcgcggtgctggagaaagaaggttttcgctaccgtaactatatcgacatctttgacggtgggccgacgcttgagtgtgacatcgaccgcgtgcgcgccatccgtaaaagtcggctggtggaagtggcagaagggcagcctgcgcagggcgatttcccagcctgcctggtcgccaatgaaaattatcaccatttccgcgtggtgctgccgtcgtgccgtcaatggggctcggtgtatgcggctcgctctgccaaggttgatttgtcccttggggaggagtgcggtggttatgagattgatggttttggttatgactatgatgctggagaagatgaagctgtggaaggagactcccaggagttccaagactacgacgagttctaa

SEQ ID NO: 31590 - DNA, 1104 bp, Zea mays
  Peptide Sequence Number=SeqID_74965
atggctccaggcattaggttcagcaagagagtgagggcaggtgcacaaccagaggagcaatcttcaaaaaggcttcactctacagagacagatggccaaaatgtacaggaaccaacagatggaaatgatcacataccaaatagccctactacacctggacttgctgatcatttcagcagagctgcagaggaagccatggcatctgctgctcatgacagtacaggtgatgctgaaggcaacagccgtactacacctggacttgctgatcatttcagcagagctgaagaggaagacatggcatctgctgctcatgacagtacagctcctacacagcgagcaccaaggagatccagggcagcaaccaagggaaaacaactggacaggatgactaaagttatgcaaaggagactgcccatagatgttgaggaaggcaaaaaaaggccacatgaacctgttcaagctgccaagtttgcatcagaggctggcatcattattcgggaaaccatgcctatcctaactcgttggaaagattacaaggacgaccagaaatactacaacagctttgtgtcacagctaaatgggcgcttgtccgttaacactgaggacaaggaaacaaaggaagcttgcaccgatatgctacgctctgcgtggagggcattagttgcaaagtggtctgatccaaagaacatggaaataagtgaaaagaacaagcagaaccgcagtcaagtcaagtttcatcaggctacgggttctcgctgctatgtggcacacttacatgcatattctcatatggaggctttgagggctgaacctgttgctgaagatgagatgccagcatccagtgtgcaccttgtgtcgaaggcatcatcatcaaatcatagtgagcttcgggaacaacttgcagctgaagcgacggctgctgttcaaggtgaactcgaccagctcaggaagaaatgtgaagaagctgaggaacagcaggcgaggacacaaagggagttggaggagtacaagaagataacagagaagaatagcaaggagatggaggagaccaatgtgctcatcaagaagctcttgtccttgcatggtaactcttcttcgacatga

SEQ ID NO: 31591 - DNA, 722 bp, Zea mays
  Peptide Sequence Number=SeqID_74966
attcattacaacctttatttaagcatgtggagcaaggatcagagattcgtgagaagattatttgttttcttcgagacaaggtctttcctcttaaagcagagctgctgaaacctcaagcagaaatggagagatttataacggatttgataaagaaaaattcgaactattcatggggttcttgcgaaagcttgagcatatttggggattctgctcctagagagtcctttcaagaactaattgaaattattcaagcacaggctgatctgaattcacaattcaacgtttctgacattgaccacattgagaggtggatttcatgcatgtatatggctcttccgatcttcatgagaggagcatcagcaagcaagttcctcaattacttcgttaaacaaattgttccagcatttgagaagattcctgaagaaaagaaactggatttgctaaagactattgcttcaagttcaccatatgctgcagcacaagattcacgtcagctgcttccatctgttgttcagttactcaagaagtatatgcctgggaagaaggtggaagatatcaaccataattatgttgagtgcttgctatacacttttcatcatttggctcacaagactccaaacacaacgaacagtctatgtggttacaagattgttactgggcaaccatcagatagacttggagaggacttctcagagcattacaaagatttcacagagaggtag

SEQ ID NO: 31592 - DNA, 366 bp, Zea mays
  Peptide Sequence Number=SeqID_74967
atgggggagattgatggtggatgtggagagggtcacgatgaagcagggggtgatacatcgctggctcaacacaggagcgggccagtgtacccactcgacacatcgctgatagacatgccacatgttgtgtgttgtggcaaggagccaacacaggggagccttcatgcagaaaaacaaacacgactgaccagagggtgccatagagtcaagatcatgaagaaatttcaactcgtgaagggaggcagttgtgggctaggaggtagtcgagcaggggaaatttgtctcgacgaagagacgatgagtggtgaggtcaagacaacggttttctttgtggtcagggaggtacccgaggaagacaacgagtag

SEQ ID NO: 31593 - DNA, 900 bp, Zea mays
  Peptide Sequence Number=SeqID_74968
atgagcgtccccttggccaccccaccaccacgtccccttggccaccccaccaccacgaccgcccttccactgatggcgactgccagaccagacctcgcacctggacctaggcaggaggttgaggacgagcgtgtgatcagagatgggttccctgaggccacagagggaggctgccatgtccttcatttgattgcaatactcggtgacaacgagtccccccagaagaatctcaatggtgtctatctcgaggatccacgagaggaccacactatccattcgccgccaagatgggatagtgagggaggcggtgtcggtgagtacatggtcgtccagggcgcagcgcttgagggtgaggaggacgagatcgcgccaacaggcctagttgaagcccggccgaggatgatgagaaccagagtgtcgatgttttggacacccgccgcctgcacgtggaggttggcaatgactgtggccttagccgagcaggtgatgcgcaactttggccaactgctgggtgagggcatctgccgcaatgtgttcgtgctctcaagcagcggcaacaaccgctttggcagtggtgaggtcacaactaaggtggagttaactggaacagaagagacggtacgagcagcctccaagcgactaactcaggggatggcagatttcaacaaggcaatatcttcagcaaaaactgacgaggaaaagactaaaattaaaggcgatcagcaaacttcaacaaggacaatgaggtcatataacaatatattggcaatgacacagactgccagcagttcttatgacattggaggcagtgcagatattgtatggtgctttgtggacatgaaaaataaatattttaattcactgctcactgctcagtatgaggaaattttgtccatatga

SEQ ID NO: 31594 - DNA, 537 bp, Zea mays
  Peptide Sequence Number=SeqID_74969
atgtatcagttggaccggacctccgcgagggagcaccggacccctgttcgcacaacccggaccctcgattacggcccgggactcccaagtaagcgtgacgggtcccttggatggggtccagatccctccgagcgtagacccgatgctgccacgtggcttgttgcccgtgacataagccaacgggcggagcctaaccatgatggtgcaaatcgtggagcaccatgccgagacttcaacgagtttcctggtggaggaagaagttgtttcttccacgccacaggttcccaaccgcccagtgccgggcactgctgctgtgcacgctgcacgacagcatacaactgcgcagacatcccggactccgtcgagggcggctccgggagcattgtcagtagccagggagttgctccgtcaccctccaagctccacggcctcaccaggggccatgaagcagtggcgggacgacgtcgaccgaatgctcgacatggcacattctacctcgaccaggtcgaggccacggtcatcccggcgccaacatga

SEQ ID NO: 31595 - DNA, 558 bp, Zea mays
  Peptide Sequence Number=SeqID_74970
atggagttcttcggcgaagacaaggcttccactccactccatcgaattattcatccttcgccgtcactccgcaccgctctccaatttggtataaacttcactcatatattatttgccaaagggggagagaaagtgccaaaggttcaacacaaaccaataaaaagtccaagaaagggttcaaacaaaaagaagcaaagaaaaccgaaggctgccatggtctggcgcaccggactgtccggtgtgccaccggactatgtccggtgcaccagggagatcaactccaaacttgccaccttcgggaattctaggagccactccgctataattcatcggactgtccagtgtagcactggactgtcctgtgtgccaagcggagcaacggctacctgcgccaacggtcatctgcaacgctacaggaacagtgaacagtgcgcggttgcacgcgcagagtcagagcaggcgtcagatggcgcaccggacagtgaacatgacatgtccggtgcaccaccggactgttcggtggcctacatgtcagaaactccaacggtcgaaccctaa

SEQ ID NO: 31596 - DNA, 1251 bp, Zea mays
  Peptide Sequence Number=SeqID_74971
atgcgtgactacgacgaactgaagaagaaagtagaagcctgctatcagcagcaacaggcagatgagcctaaggagcccgaggtgttcctttccctcggcgccaccgccgccgggactggcggcggattcgcggagccgaagcgcaaggagcggcaaacagtgcgtcggccatctgcggggagcgatgacaccgacgacgacaccaaggaggaccgtcttgggctgtccctgagcctggcagcatcgtcgtacgaggaagagaagctgggagccgggccagccggccacgacttggaagaagcctccgtggccggcgccgaccgcaaggcgaagggctacgcgctgctggagagtagcaagctcgaggcaccggcaccgccggccgccgccggagaccttgccgcggccgggatcacgagccagagcgtcaacccggccaaccgcaaaactagggtttccgtgcgcgtccgatgccaaggccccactatgaacgacgggtgccagtggagaaagtatgggcagaaggtcgccaagggcaacccgtgcccgagagcctactaccggtgcaccgtcgcgccgggctgcccggtgcgcaagcaggtgcagcgatgtctagaggacatgtcgatcctggtgacgacgtacgagggtacgcacaaccacccgctccccatcggcgccaccgccatggcctccaccacctccgccgcggccacattcatgctgctctccagcacgagctcctcctccgccacctccgaggtccgcggcggctcagcggcaccttcctacctcagccccccgtacctgctcaactccacctcccaccaccccgccgcttcgccgctgctcggcgcacaaccgtcgtcgtcaatgcccagcgcccctgctggcgtggccaatggcgtgcagcatctcaacatgttcgggcattcgtccatgctcgctcagcaggcgccacatttcagcagcaagtacccgtggtcatcggacccttcgcagtcgcagggcatcggtggtggtctgccagcaggaagcaagaggccgttttggagcaccggcggtgacgagaagacggcaacattgccggacaatgtcggcgcagtcatggcagacccaagtaagttctccgtagcgatcgcggccgcgctcaacagctatattgggaaagacgggcaggtggtcggcggcaaggacggagagagtagcagcaacaaatggggggtggtcgaatcactcccacctccatga

SEQ ID NO: 31597 - DNA, 228 bp, Zea mays
  Peptide Sequence Number=SeqID_74972
atggcgcaccggacagtccggtgcaccctgccacgtcatcaatgccgttggattcagaccgttggagcttctgacttgtgggcccgccctggtgtccggtgcacaccggacaggtactgttggctgtccggtgtgccagcatgggcgattctgactcctgcgcgcgctgtgcgcgcattaaatgccgcagcaggtcacgttgttgaagatgctctaagtagattataa

SEQ ID NO: 31598 - DNA, 90 bp, Zea mays
  Peptide Sequence Number=SeqID_74973
atggccggagttgccgtccacggtataagcaccctaaactccaatgctaatcggttcgacgcgttacgggaaggaaaattctcaaattag

SEQ ID NO: 31599 - DNA, 423 bp, Zea mays
  Peptide Sequence Number=SeqID_74974
atgggcgagggggatggaactgacgagtgggccctggctgccagcgagaggaagctgcgcgagagggaggggtgtatgcacatgagaaggggttctaagggtagggttaagggggaaagccgaccgttggcgttttggagccgttggcgcaccagacactattcggtgcacaccagacagcccggtgcccccttcagaccgttgccccggccgaccgttggctcaccggacagtccgatgaattttagcctaaataagaacattgcttatgtgagacttgatgtgcatatcttggagacaactaatcaagccaaggatggaggcaagaagatcttcgaggtaccgagtgcacatgagaaggtcaaggaggccaaggaacccaaagccaggggtgaagaagaagacttcctaagtcaaggttga

SEQ ID NO: 31600 - DNA, 117 bp, Zea mays
  Peptide Sequence Number=SeqID_74975
atggcggcatcgtcgtcgatcctgagctccaatatctctgagagggcgctccgaggttttggggcactcccacaattggattcttatggaaatcgatgtgaatggtctacgacctag

SEQ ID NO: 31601 - DNA, 702 bp, Zea mays
  Peptide Sequence Number=SeqID_74976
atgaagaatgtagtctactacgagactgacccatccgtgccctcaacctccgacaacacaatcaacatcttcaaagcgcatagagtcagagattcacgtgaggagcggctatatgttctgagcaaccaaccagtacctctgggtgagttctatgctgagttctatgttgagctgagttctatggttactcttgctgggcacaagcagtacctctgggtggcgcatctcttggatgtcgcagccgtggctcgtctgagttatatggttacttttgaatatatctatacttgtttattagtctctgagctgtcgaccaatgagtttgttgatgcttccaatctaactggcaagggaaagactgttgataagggtacccctggtgactccattgataccaagcctatgtccaacttagggaagaggaagaggtacatgactgatgaagatgttgctgtgttcaatgggatgaaagaggctgtatctgatgttgctgctgctgtccgtgaaagcatccatgctgaagcagcacctaggatctacaatgctgtaatcaactgtcctgggttctctagggaggctctcatgtatgccctaaaccacatgatggagcacaaggccacctccctggtgttcctggacatgactcctgatgatcgtgacctatggctcaggactttcctagccaagcactaccacaactga

SEQ ID NO: 31602 - DNA, 249 bp, Zea mays
  Peptide Sequence Number=SeqID_74977
atggcggatcgatgccgccaggatctgtgctacaactgcgacaagccgtttgtgcgaggccatcactgccaacgtcacttctaccttgaggtgaccgctgacgacgacggggtggctgctgcggaagccacgtttcccccaaccagcagcgctaaccctaggacgatggcgcccaagcgccgggtattggtcctcgaccttccacccaccacctgtactacttccgtaaccctacttctaacaatatga

SEQ ID NO: 31603 - DNA, 294 bp, Zea mays
  Peptide Sequence Number=SeqID_74978
atggcctactgcaagtccgcatggctgcacaactcgacatcgacgcggaggcgtcctggtcatagcagggtgatggtctgcaggaagagcatcctcgggaaagctggggatcggggatggggagtgtgggaaggcgacgtggtggatgggtacgagcgtcagggcatggttgacgccagtggcaccaaggcggcgatcggtgatggaaggggtgtcgtggcagatgggaagggaacaatggtggtggtggtggatggcgcggcgatggtgggaagggggggtatgccaccatag

SEQ ID NO: 31604 - DNA, 681 bp, Zea mays
  Peptide Sequence Number=SeqID_74979
atgggcgactcctcggtggccggcgcgctcgtgccgtccgtgcccaagccggagcccgcgccgtccggtgacacctccgcggcggccgcggcgactacagcggcgctggcgatgccggaggaggcgggtatgcgcgcggcgtcggcgtcgcctcaggggcctgcggaggagggggagggccccgccgatagggacctcctctgcccgatctgcatggccgtcatcaaggacgccttcctcaccgcatgcggccacagcttctgctacatgtgcatcgtcacgcacctcagcaacaagagcgactgcccctgctgcgggcattaccttaccaaggcccagctctaccccaactttctccttgacaaggttctgaagaaaatatcagcccaacaaatagcaaaaacagcatcgccgatcgatcaatttcgatgtgcattgcaacagtaccacgttcccccagccagcagccttaaccctaggacgataacgcccaagagttgggatcctggttctcgacctctcacccaccacttgtactacctctgtaaccctagttccaacaatctggtatcggagatgtcaggttccgacgacgtgccgccgaagtcagcaccacccaccaactccaccgttgcaacaactattgatgcgagggctgctgccaccagctcaattttctag

SEQ ID NO: 31605 - DNA, 315 bp, Zea mays
  Peptide Sequence Number=SeqID_74980
atggtgatgacggccaccgtgaatgttgtagccgacggctttttgccccagaatctgacgatccgtaacgaggccgggccgaaaggaaggcaggcggtggctttgaggaagtactcccacgtcattttcatagagtgccaactcagcgacgtcgtgagcgccgccggctgggtggcgtgggacagggcacacgtcatcaataataccacgaagagcgtgagatacatggagtttgccaacacagggcccggcgccgacaccacccaccgcgtcgactggggggcgtccatgttctccacgaccccgcccaggtag

SEQ ID NO: 31606 - DNA, 612 bp, Zea mays
  Peptide Sequence Number=SeqID_74981
atggagcagcgccgccgcgagctgcgcctcttcgccaacaccggcgttgacgcggccacgggcacgccgcgctgggtgtcggcgcccttcacccacccggccacgctggataccgtggccatggacccggacctcaaggtctgcgaccgcgccgacctcgagagcttcctcaagggccgtgcctactaccatcgcctcagccgcgtctggcgccacaactacctcctctacggcccgacgggcataggcaagtccacgttcgcggtggccatggccaggttcctgggctacgacatctacaacgtctacctatctcgtgctgatgccgccggcgacgacccccgcgcgctgctcctgcacaccaccccgcgctcgcttgtcctcgtcgaggacctggaccggtaccttcagggcggcagcggagacgcgaaggcgcgcgtggccagggtgctgagcttcatggacggcgtcacgtcgtgctgcggcgaggagcgtgtcatgttagtttgtcagacaatgactggttggttcgagctcttcgccatcggctgcctccgagctgtggcttcttcttgctgggaaaaatgcctctccggcatcgaccgcctctga

SEQ ID NO: 31607 - DNA, 2712 bp, Zea mays
  Peptide Sequence Number=SeqID_74982
atggcggcctccgttgagcggcacctggccccccacccgtggccggccaatgcgcctcccaagagcttcgacatgttccgctccggcggcccaggaggcaagcgccgcaccggccccgactccgactccgaggacgaggacagcattcccccggactggcggtcgctgtacagcccgcgcctggaggtggagccgcccgcccacgacccacgcgacgaggccacctccgacgcgtgggtgcggcgccacccggcgctcgtccggctcacgggcaagcaccccttcaactcggagccgccggtgccgcggctgatggcgcacggcttcatcaccccggcgccgctccactacgtgcgcaaccacggggcggtcccccgggcggactggtccacctggacagtggaggtggcggggctcgtgaggcggcccgccaggctcaccatggagcagctggtgacggagttcgaggccgtggagctccccgtcacgctggtgtgcgcgggcaaccggcgcaaggagcagaacatggtgcgccagaccgtcggcttcaactggggccccggcgccatctccacgtccgtgtggcgcggcgcgcgcctccgcgacgtgctgcgccgctgcggcgtcatgggcgccgcggacggcgccgccaacgtctgcttcgagggcgccgaggacctccccggcggcggcggcggcggcaagtacggcaccagcctgcgccgcggggtggccatggaccccgcgcgcgacgtcatcctcgcctacatgcagaacggggagccgctcgcgcccgaccacggcttcccggtgcgcgtcatcgtgcccgggttcatcggcggccgcatggtcaagtggctcaagcggatcatcgtcgcgtccagcgagtccgagagctactaccactaccgcgacaaccgggtgctgccgtcccacgtcgacgccgacctcgccaatgccgaagcgtggtggtacaagccggagtgcatgataaacgagctgaacatcaactcggtgatcaccacaccaggacacgacgaggtgctgcccatcaacgccctcacgacgcagcggccgtatacgatcaaaggatacgcatactccggtggcggccggaaagtaacccgggtggaggtgacgctggacggcggcgagacgtggcatgtgtgctcgctcgaccacccggagcgtccaaccaagtacggcaagtactggtgctggtgcttctggtccgtcgacgtcgaggtgctcgacgtgctcggggccaaggaaatcgccgtccgcgcctgggacgaggccatgaacacccagccggagaagcttgtctggaacctcatgcttaaatacacgcacgtgcgtctgttcctctacgcgcagggcatgatgaacaactgctggttccgggtgaagatcaacgcgtgccggccgcacaagggcgagatcggcatggtgttcgagcacccggcgcagccgggcaaccagccgggcggctggatggcgcggcagaagcacctcgagacatcggagagcgcgcagagcacgctgaagaagagcacgtccacgcccttcatgaacacggccaccgcgcagtacaccatgtccgaggtgcgccgccacacgtccccggactccgcctggatcatcgtgcacggccacatctacgattgcacgggcttcctcaaggaccacccgggcggtgccgacagcatcctcatcaacgccggcaccgactgcaccgaggagttcgacgccatccactccgacaaggcccgcggcctcctcgagatgtaccgcgtgggcgagctcgttgtcaccggcagcgactactccccgcagaacagccacgccgacctcaaggccatcgtcgaggcccccgctgcagccgcgccgttatcggtgacgtcgaccgtcgcgctctccaatccgcgagagaaggtcaggtgccggctcgtcgataagaagagcctgtcctacaacgtgcgcctcttccggttcgcgctgccatcgccggaccagaagctcggccttcccgtcggcaggcacgtgtacgtgtgcgcgtcgataggcggcaagctctgcatgcgcgcgtacacgcccacgagccccgtcgacgaggtcggccacgtcgatctcctcatcaagatatacttcaaggacgaggaccccaagtaccccaacggcgggctcatgtcgcagtacctggactccctgccgctgggcgcgactattgacatcaagggtcccatagggcacatcgagtacgccggccgcggcggcttcgtggtgaacggcgagcgccggctcgcgcgcaggctcgccatgatcgccggcgggacgggcatcacgccggtgtaccaggtgatccaggccgtgctgagggaccagcccgacgacgacacggagatgcacctcgtgtacgcgaaccgaacggaggacgacatgctcctgcgggaggagatcgaccgcttggctgccgcgcacccggcgcgcctcaaggtgtggtacgtggtcagcaaggtggcgcgaccggaggacgggtgggagtacggcgtggggagagtggacgagcatgtcatgagggagcacctgcctctgggagacagcgagaccattgcgctcgtgtgcgggccgccggcgatgatcgagtgcacagtgcgcccgggcctggagaagatggggtacgacctcgacaaggcttgtctcgtgttctga

SEQ ID NO: 31608 - DNA, 237 bp, Zea mays
  Peptide Sequence Number=SeqID_74983
atgggggcccaggcccacgagtcatgcaaccggcgcgcggaatgcttcgtgcatgcaactgcaccgccacttgcgccactaccgcgcctcctcgactgcggaaccaataccgcgactcgaggcgacccagcgcgcgacccagcagcgccagcctggcgcgacgggaccgggaaagggggataccccgaaaaaggatccttccccgtgaaggaaccaggcttcgagcctccctactga

SEQ ID NO: 31609 - DNA, 162 bp, Zea mays
  Peptide Sequence Number=SeqID_74984
atgaagggtgtggaattctggattatgaacactgattttcaggctatgtggatgtcacccattgaaccagaatataggttacagattggccaggaattgacacgtggtcttggtgctggttccgatatggtttttgtgatgataactgccaacacttcttaa

SEQ ID NO: 31610 - DNA, 381 bp, Zea mays
  Peptide Sequence Number=SeqID_74985
atgtcacacaaccctagcttccgagatttacgccgcaatcaagaacctcccctctcaaaaaccatactcccaaggaggtactgtagactgctcgcccatccttttagcgcagagcagcgcgtcctcaatccgctactccggcaagcccgctccccgactgtatatctactccgctgtcacctagcggccgccctcgtcatgttggttttcgccgaggtatcaggattccaggattccaaatctgagacggatgttgatgttgactataacagtttgtactcaaggcaggactttctaaaaggcaaggacagtgagctttcatggtttaatgctggtgtccctataataccttgctcatttattttttctgttgtaccttag

SEQ ID NO: 31611 - DNA, 729 bp, Zea mays
  Peptide Sequence Number=SeqID_74986
atggatctgatcacaaatcacaaatgtgacaagcttgctaagcttcaagtggatcaagccatagtatggttgttcctgcatatagagtgcaaaaactattgtatttacatttttcaagttgacttccattacactcagattagggattgcattgttaagtttaacagagctcgtattttcaatgcctctgtggcactgggagttcctgtacatagacttgtaaaagctgccgactcagtttcggtatgcctatctaaagggttaggcgcacccatcagatcagttgttgttggttcagaggccttcatcgacaaggctagaattcttaggaagaccctaggcggtgggatgagacaggttggatttctttgtgctgctgcttatgttgctgttcgtgacaccgtgggaaagcttgcggatgatcacaggaaggctaaagccttggcagagggcctgacgaaaattaaacagttcacggtggattcatcttcggtcgagaccaatatggtcagtgtcaaagatgaagcgcgctatattttccttattttccacaatgtaaaccggaaaggtccagcatatgacatacctttactttttataagtgtcaggttcgtcatccattaccagattttagacagtgatgttcaatatgcattgacatgtgtcgagtcgctatttcgcaagatcgtcgtggccctattgggaacggagatgctcttaatgaagtag

SEQ ID NO: 31612 - DNA, 342 bp, Zea mays
  Peptide Sequence Number=SeqID_74987
atggcgtcgcttgggtcggtggagccttggaagccctgcaggtgtggtcgctcccttgtctctatcagcaggaaccacgttgaaagtaaccggctcaggcgctcagcccacgccgatgtcgtgccggacaacgctagagacactgacctagagtcctcacatcgtcatctcgatgttgaggctaggtatagccaaagacgtcggataggaggtccgagacttcgagagcctgtcgtggaggtctatgatcttgaagagtttctaggtgggcgaccgatgctgatggcctcggcgaagctgaagaggtgcagcgcggcgccattgatggccttggcgaagagg

SEQ ID NO: 31613 - DNA, 935 bp, Zea mays
  Peptide Sequence Number=SeqID_74988
atgtcgtcgattccgccgccggcgggcgggttgtcggccgccattgtcgtcgtcgcgcggcggtggaaggagtatcatgtcgtagctgccgtcgagggacatgaactcaagactcccgaaacggagcaccgtcccgggttggagaggttgttggagactgcccatctggagcttgacgggaaactgctcgtcaacacgcagcgtgcccctacctggcgcgccaactgtcggcgtctcgagaccggggggtccctcaggccgacgagtgagtgtaccgcgtgccccagcccagatgggtcgagcgcgtgggcgagcgcgaaggggggaagcgaggtggccggagtcgggcgtgagagaggtggaaatcccgcggccttcgtgttcgtcccgcgcccaggtcggaggccagggcggagtccgagccctggggtcgggcgaagcggagttcgtcgtcttctggggctgagcccgagtccaagccctgggtcgggcggagcggagttcgccgtcttccggggccttagcctgagtccgagccctgggtcgggcggagcggagttcgccgtcttccggggccttagcccgtgtccgagccctgggtcgggcggagcggagttcgccgtcttccggggccttagcccgagtccgagccctgggtcgggcggagcgaagttcgccgtcttccggggctttagcccgagtctgagccctgggtcgggcggagcggagttcgccgtcttccggggccttagcccgagtccgagccctgggtcgggcggagcggagttcgccgtcttccggggccttagcccgagtccgagccctgggtcgggcggagcggagttcgccgtcttccgaggctttagcccgagtccgagccctgggtcgggcggagcggagtttcctatggcgcctttgccaaggcccccctgcct

SEQ ID NO: 31614 - DNA, 354 bp, Zea mays
  Peptide Sequence Number=SeqID_74989
atggtgacctccagcttgatggtgggggaaagcgagccgggctgcggcctctgcccctccctcagcctcaaggattttcatcaccagggctggggaggggagtgtgccgagttgagctggaagaagatccgccgccgacgagtttgccggcgccacccgcggaccgacttccaactctacggcgttctgcccgtccttgcctctcgagttttgggcatgggcgggggcctcctggcagcagcatccgccctgaggtcatcgctgctgctgttcggccccccgggacagaagtcttcatcgtcgccgctgctggggcgggcgacgacaagccgttcatcggtcttctgttgctaa

SEQ ID NO: 31615 - DNA, 732 bp, Zea mays
  Peptide Sequence Number=SeqID_74990
atgcgggacccagcccccgagtcgcaggggagggccttggagcgtgttggagaagactcagcccgcggcgcctgggggcgcacgaacgcaactccatgggagttggtacctctcagccatcgttcggcttcaaggattttcatcacgcagcccggtcgcaccccttcaccggcggtcacccgagatggcgacctccagcttgatggtgggggaaagcgagccgggctgcggcctctgccccttcctcagcctcaaggattttcatcaccaaggctggggaggggagagtgccgagttggggtcggcccctgcgtgggcggtggcccgctccttcactcagtgatggggggagaagcgggcattgcccgtggcgtccggcagctgcagcgtgcctggtcttcagccgcgagtggcttcggggccacttgcggcgccggcgtctgccacggcagctggaagaggttcttccgccggcgcggcggccgggaccggccacgggctgacctccaacttctacggccttctgcccgtccttgcctcacgagttttggcatgggcgggggcctcctggcagcggcatccaccctgaggtcagcgttgccgctgttcggccccccggagcagaagtcgtcgtcgtcgccgctgctggagcagggctcctctagcttagttgaagagacccctcggccgcccttcggtggaccgaggccaggggtagcgatatcagtatga

SEQ ID NO: 31616 - DNA, 1023 bp, Zea mays
  Peptide Sequence Number=SeqID_74991
atgtccttcttcttccgcatggcgtcgcggctgcggccgtcgacgccggaggaggtggtgcgctccatcaaggactccttcctcgcgctccacacgcgcacccacgccaaggctctggaagaggtcgagaaaaatatgtcatccttgagattgttgatctttggtgatggagaagtcgaaccaaatgaagagcaggtcctgcaaataacccttgagatttgcaaggaggacgtcatttccctgatcgtccaggatctgccttccttgggctggggagtaagaaaagatctggctatctgctggtgcatcttgcttaggcagaaggtcgatgaaacttattgctgtgtgcagtatcttgaaaatcatctggagcttttagatttccttgttggttgctacaagaacttggatattgcattgaactgtggaaatatgttaagagaatgcataaagtaccctacacttgcaaaatacatattggaatctggtagctttgagctgttctttgagtatgttgagcttccaaactttgatattgcttcagatgctctgaacaccttcaaggatctgcttaccaagcacgaagttgtagtcgcagagttcttgagttcccactacgagcagttttttgaactctactcaaggctcttgtcatcaactaattatgtaacaagaaggcaggcaatcaagttcctttcagagttcctgctagagactcataactctcaaataatgaagagatacattgtggaagttcgttttttaaatattatgatcaatctactaaaggttattgtgcatgcatcatcacaggattcaagcaaaaatatcagaatatgtgccttccatgtttttaaggtatttgttgccaatccgaacaagcctcgatgtatcgttgtagctttgctagacaatcgtagagaagttctgaagctactccacaatcttccttcaagtaaaggcgacgatgaactcgatgaggagaaagacctaatcattcaggaaatccagaagttggcataa

SEQ ID NO: 31617 - DNA, 231 bp, Zea mays
  Peptide Sequence Number=SeqID_74992
atgctctatggtgcaaagtggttgaaccggtccccatgggcgattcaaccagttttggctaagaacctctttggtaaaaagcggtcgaattggcccccaggggtggttcaaccagttttggccatgaacctctctggtaaaaagttggaatgcttggatgttggaatggaggtggttggggttgtacttatagccaccaaccacttcctagccgttactccattctgctga

SEQ ID NO: 31618 - DNA, 549 bp, Zea mays
  Peptide Sequence Number=SeqID_74993
atgagagctggaggtactggcggtggttgggaggaggatttcttgaagtgtcaaaggttcatctacaactatactaaatcgactgtccggaataccgtagattattccggacaggagaagctttttggaaaaacaggccaagcgcggaccgtccgggcccttgcagcggaccgtccgcgacacaaggatgaccctcggacagaaccaatgcaaaaatccgagtctgcactatggaccgtccggaggataagcgcggaccgtctgagacctcgctcggaccgtccgacctcaggcgcggaccgtccgccgttgatctacaggggcggaccgtccggacctggcgggcggaccgtccgcgctcagcagaatggagtaacggctaggaagtggttggtggctataaatacaaccccaaccacctccattcaaacatccaagcattccaaccttcaacattcaatacaagagctagcaatccattccaagacacattcaaagcctccttctctccaagtttcacaattgagaaaagagatcattagtgattag

SEQ ID NO: 31619 - DNA, 759 bp, Zea mays
  Peptide Sequence Number=SeqID_74994
atgtccagcccgttctttccccatgacccctcccaacacccaccgacgctgccagatgtggatgcgcccgtgtcgccaccgctgcagccgagcgacaccctcgacgacgacaaggacgacgaggacgacgagttcgacccgctgttctcggagaccaccagcggcgcgaggtgtgcttcagctatgcagttcagcagcgtgcttcccctagacggaaaagcgtgtatgagcccagtgaggagaggcagtggaggttatgggagtgagaggatgaggatcaactgctgcagcatcagacgcaacaaggcactgaggaggatgtgtttcagtgcaaggggtgctgtgagcagcacccagtgtgtgctcacatcagatgctggcccagacactcttgttcctattggaggatgttacaggcttattgatatccccatgaacaactgtttcaacagtggcataaacaagatatttgttatgactcagttcaactcagcttctcttaaccgtcacattcatcgtacctatcttggtggggggatcaacttcactgatggatctgttgaggtgctggctgcaacacaaatgcctggggaggctgctggttggttccagggcacagcagacgccgttagaaaatttatctgggtacttgaggattattacaagcataaagctatagaacacattttgattttgtcaggagatcaactctatcgtatggattacatggagcttgtgcagaaacagtcaatggggtga

SEQ ID NO: 31620 - DNA, 1683 bp, Zea mays
  Peptide Sequence Number=SeqID_74995
atggaggtgcttgacgagcctctctacgcaaatttcctgcgtgccacaggcgtcgacaggccctaccggcaggagctcctgtccaaaatggaccctgatggaaataaggttgtcaaggaggtgatttttggcccaggggacaaaaagtatcgttactgcaagcacatctcaaagcaacatctcccaaatctgtcaagcgacctcatgaagaagggaaaacatttcatattgatacggaaccctctagatatactgccatcttttgataaagtcgttccaccatccttcatggagcttggcataggcgaacttgtctcaatatacagtgaattatgtggacttgggagcccaccccctgtgatagatgcagatgatctgcaacaggatcctgaggccgtcctaagtggtctctgtgaggatctgggcattcctttccagccacaaatgttgaaatgggaagctggccccaaggaatttgatggtatatgggcaccctggtggtatgggagtgtgcacaagtcttcaggtttctctaagcctcgccaatatcctctgactttcccattcgtgttttatgacctgcttgagcaaagcttgcctttctacaacatgctgaagcgccaaataaggaagataagaggaccgcagcaaccaccattatcggaccctcctctgcctgtccctgcaaataaaaacattcttgtttgggttggagatgaacttttgccccgtaacagtgcaaagttgtacaaggaggagatgctgtttgggaaggtttacgtatatatgatggaaaaattgtttgattctgcaaaagctatggccttcagcaatgtgcctactcgtgattggattaaggatgccatctttaagactctgattgcaaatggaatgttcaacaatgctcatataaggctcacgctcacccgtgggaaaaagagagtccaagctccgagcataacgagagaattagttccttccctcatcaacccatcagcgagtatagattccaagattcatcacaacaatcttatcaacaatattctggcaaagatagaaggtaatcttgcccaggctgaggatgccattatgctagataaggatggctttgtatcagaaacaaacgcaacaaatattgcgcggacgcgcatggccaaggtgtgtgttgctgctgccgcggcacagatgccactgcagcacatgtcgctgctgccgcagaagctgccctggacgctaccgctgcaggcacagtcggcttgggcatgggttctttccccacactcctgtcgcaaccccttcctcctggtctcctccggtacgatggcgccttgtcagtgccgctgcgggccgctatcccccaacgactcttttaccgcctacttcacccttgttactaccattgccacccaagttgtaatgattgatggacgtgaaatcggcgacgggaaaattggtccagtcactagacaaatccagaaggcatacaagatcctgacagcagggcaaggagtaccgataccgggggttgctgaggatactgctggagattataaacgcaataagccattgcgctggcatgcgctcccttacaggaaagcacgtgcattttcattcttgcgtgtctttaacttggaacagagtctccaaggagctcagtgcagcgtggtaataaggtcatactag

SEQ ID NO: 31621 - DNA, 324 bp, Zea mays
  Peptide Sequence Number=SeqID_74996
atggaagtagatattgaaatggttgttgatgacgaggatgatgaggtgcaaaatgagaatgacttagaaatacttgaaggcaatgccaatgacgaaattgcgccttcagatggtgttgactatgaaatggttgttggacaaagatggtgggcggtgggacgaggacgaggagggggagggggaggaggagcacccgtaggacggaggaggaggcgtagcaggacgacgccgtacagcagcaggtggagcagcaagccgttgtcgatgcggcacagtgaaagggaaatgtgcccttgggccatttctaagtattttggtgattga

SEQ ID NO: 31622 - DNA, 174 bp, Zea mays
  Peptide Sequence Number=SeqID_74997
atggggaagaagcgggcgttcgtggcctgcatcgaagatgagcaggcgaacgcggaatcgggcacggcggcggcgattccaggcggctgcgtgtccgtgctcagcagagccgaacaatgcctgaacgaccaagttgaagagtgctggttggactccaaaaacaaaaaccaataa

SEQ ID NO: 31623 - DNA, 213 bp, Zea mays
  Peptide Sequence Number=SeqID_74998
atggcggctggtctgggcggcgggcggccggaccgggcgggcagggaggcggccgaaccggccatggggaaaggggagaggggatgggggagggaggagagggggaggggggagctcaccggggaggggcgcgacggcgaggggcggccggcggcaggggcggccgagggcggcggttgggcagggggcggcggcggcttagggcaggggtag

SEQ ID NO: 31624 - DNA, 540 bp, Zea mays
  Peptide Sequence Number=SeqID_74999
atggcacacatgtattcaaaggaatatgattttctccttttagattttttttacaaagtgggtattacacccactcggacgcctgtggttcatcgtcgtgcccgaagccggcgccggcgccggcgtcgtgctccccgccgaccccgaaagcgcggggcgacggggacaggtgcccagggtgaacgcgctcaagcttggcgcgtgcgccagcgtgctaggcgggctggtgagcctggagctcggccagcagcgcccggcgtcgtccatgtccagttccatgcagccgtgctgccagctcctgggcgggcttgccgacctggacgcggccgtgtgcctgtgcacggcgctgcgggacaacgtgctgggctccgtgcagctgagctgagggccgttgagctcagcgtcctcgtcaactactgcggcaagaagctcccgctcggatggctgtatttagagctaataataagctctaaattttactttataaaatttaatgatcgaatcggcttagaattagactctatttttacttatttttaa

SEQ ID NO: 31625 - DNA, 228 bp, Zea mays
  Peptide Sequence Number=SeqID_75000
atggaggtcctagagctgcacgtgtctgagacggacgattgcgtgctagtgatgaacgtgacatgcaacaaggccatgacgccatggcctgggtctatcgcgccgtcgaggagcttcaactctgagtcatcaccgccaacatcacctccgtcgtcggttgcctcatgcacaccatcttcgtcgagcctattaaaaacaaaggtcgatgttttcaagtcgtccgactaa

SEQ ID NO: 31626 - DNA, 891 bp, Zea mays
  Peptide Sequence Number=SeqID_75001
atggaggacttgagtcaaatgaccccgaccattgtaattgggaaaattgtggtttttgagatgtcgcgaaaaatgggtcggaaaggcaagaagaaggctcccactccaagctactcaaatgaagaagagaaagaagaaagtgatgatgatgaagataatcaaccatcaacattatcctctgaggacgaagaaacaatccgacgcgccggaaaggtcaaggatcttctctttaacattgacagaaaaaagcaaagaaagagaggatgtttcgcatgtggggagaagggccacttaagggacatttgtccaaatatggccgaacccacaaaagggaggagcaacggcaaggcgcttacaagtgtcaaaatttgggatgactcttcaagcaaagatgaacctccaaggacgcacagccatcgatcctcatcatgctcatcactacgcaagtgccttatggcaagagttcttattaagaatgttgttatagaaacatatttggatgagattgcaatggagaatgagcaattaaagcaagaggtggctcgccttggcaaggctttgtatgaaaagaaagtcaaagccaaacaaatccaacgtcctcaagataacaccactgtgggagtaaacaagcctgtggagggagaaactctgatttgtaggctatgccacaaggaaagccacaagtcttaccaatgcaaggcgaagaccgaggataatcaaaggcaaaagctcaagaaaaagccaacaagcaaaatctccaacacctacatcaacaaggtggacaaaaaggatgctacaccatatttaatcaagaagaaaaagaatggaaaggtgatagtaatcaaggccaacaagcaagccaacaaagaaaaggggggcaaacgcatctag

SEQ ID NO: 31627 - DNA, 375 bp, Zea mays
  Peptide Sequence Number=SeqID_75002
atggctatctgcgccaacggtcgtctgcaaaaggctacagtgaacgtgaacagtgcgcgcctgcgcgcgcagaagtcagagcagcgccagaaggcacaccggacagtgaacaggacctgtccggtgcaccaccggactgtccggtggccccacttgtcagagctccaacggtcgaaccctaacggttttacgacagcagccttccccaacgaccactttggtggttttggctataaatacccccaaccaccacacttcaaggcatccaagtttttcagccattgcattcaatacaagagctctagacttcactccaagacacaaacaaagagatcaaatcctctcccaagtccaaagatcattccaatcaaatag

SEQ ID NO: 31628 - DNA, 351 bp, Zea mays
  Peptide Sequence Number=SeqID_75003
atggctcgccggagtttcttcggcccacccgagaccttctcaccgacgttctcccttctctgctcgtggattcatggcctcttccccgccattgagttcactgtggttctctcttcccctctgcccaactccggcgaccccagagccaccctagcttgcgccagcctcaacttcggcaaactcaccgccgcggagaggagcggcgctgctcgcagccgtctgttttcctctgacaacgagcaatctgaggttcctgagtgtgttgttggagacctccctgagcaacaacctggaggtgaagttggcaacatggatgacttcgaggagttccaggaatacgacgagttctag

SEQ ID NO: 31629 - DNA, 201 bp, Zea mays
  Peptide Sequence Number=SeqID_75004
atgactggaagggggaaagatgggtccgccgccatgggtccaaatccctgttgctgttcggagcacaatcttgaccctgggagcttcaccacgccaccaagtttgtgctccgggtcttcccgagcaaaaagatgcaaagttatcgccgacgggtcctccgccgtggtgcaggcgccgccgcctttggccgtggtgcgataa

SEQ ID NO: 31630 - DNA, 337 bp, Zea mays
  Peptide Sequence Number=SeqID_75005
ccaacaggccagattgagcgtagccaccaaagcggtcgtgtgcccagaagataatgtcagggccatcgccagttgccgcaacctgtgggaatttctcttccagtttatccggatgctcaacggtgactttaattccggtatctttctcgaatttcttacaagggagctccagagattagtggtacttgatcagagatattttggtacaggtggtcatgagattgatggttctggttgtgattatggtgctggttgtcagcattgcaaccactgctcaggcgaagatgaagctgtggaaggagacttccaggagttccaagattacgacgagttctag

SEQ ID NO: 31631 - DNA, 486 bp, Zea mays
  Peptide Sequence Number=SeqID_75006
atgccgagggctatcgatgactgctcactcgggcagccaaccaccttctacctctcgctcatccgccgagcgacctgcggcacgccatcaatagtcgacaggacgcgcgaagctccatcaatgcttcacgcgaacgatgacacgaaaacgagatccgtcgccgagaagagtatgaccgggatcacgacatccctgcgcgaagtcaagccaccagaactgagtcggcaacagcttcgactggtggcaccacccgggggcggtcaaggcaccacgacgaccactcccctccccaggacaaacatcatcatcgacgacaggaagacacctgtggagtatcaatgctcactccacgcctcagggccattcagtggccccctaacttcaaggtctccaacgtcgacaaaaatgaacctaagcaggatctgggaggctggctggccgtttacaccaccgccgcccgagccgctggagcaactgaagacgtga

SEQ ID NO: 31632 - DNA, 171 bp, Zea mays
  Peptide Sequence Number=SeqID_75007
atgaagatgttgattcttggagttgcacgaaataaccttgtgattgtgattagttacttcaaagcgttttttggtcttaatgcatgcgcgcctgtttccagcaaagtttcagagaaggaaaagatggaatgtaactcaaattttggtggccgcacaagtgtggagacttga

SEQ ID NO: 31633 - DNA, 666 bp, Zea mays
  Peptide Sequence Number=SeqID_75008
atggcgattgggtcgattgtcctcgccgataaccagctgaaagaggtgatcggaccaccggcgcccgcgcgttctgttgcgcccccgcacaagaggaaggagctgacgagatggccccagcggcagtgggacgcgacgcgagggagaaaatccagctgggctacgcggctgaccgactggtcccgtctggaagaggcatgctggaatgagatgctggcaaatggaccccgcggcgcggtgacaggggtgcgccaggtgacgagtgaggtatccgtatcccggaggcgtaggagtccctcggctcggtcagccttaccactcaaggcttctcttgctcagttacggaaccctcggctgctctgcgatgagccggagccggaggcagcggtgtcagcatggatagaggtggagtcggctcgagaagaggctttgtcggcccgggggcacgtggcttccctagccgaggaggcgcagcagcggtggttggagcctggccaggtcatccgtgagcgggaccaacttcggagtcgcgctgccgaggccgtgagccgagctgatgtcctcgagggacagctggctgaggctacggagcggtcggtcgagatgtttgctcgggccgagaccctggaggagaccctggctgcgatggcccaagcgcggtgctga

SEQ ID NO: 31634 - DNA, 849 bp, Zea mays
  Peptide Sequence Number=SeqID_75009
atgaacgtatgtgagctcactcttgctgtctcacacccccccacagcacacctggtgattatgttcgcgcccgggttttggaccctaaaatccgggtgtgacacaaggggcgaggacaagccgctaaggccgaagagccggaggtccgaccgcaggtggcgccgacgatctcgtcggcggagaaaccttctctggctgccaccacctcagcaccgacgacggcagccacctgcccaccaacaccgcaccagcgagcaccggccgccccaaagcgcaccggcaggtcctcactcccgtcctcgccgcaagaacgagaacgggaccgtctcagaacacgagtaccgccctcgtggcgtacgacgtgttgtacgaccccccagtgcagccggccacagtcgctcggacggaggacggaatgctgcaccctggccaggcagcagcagtttgcctttccccgcatggctggaggacgcctcctccgcagagctggagaatggtttccacccccagatgctgaaggaagaggtggcccgccggcccatgcgggaggtagagctccggctcagctcgccccccgccacaccaaggatgatgaagatccttgaagctgaggggcggggcagagaccacaacccggcttgcttctccccaccatcaaactggtggtcaccaccctgggtgaccattggtgagggaatgcagccgggctgcctgatgaaaatccttgaagccgagcgatggctgaagggtgccaacctctatgaggttgcgctcctccaacaacaagacgaaggcaacgtgggcactccccatccgggggctcggaaggtggaagggtgcgatgcataa

SEQ ID NO: 31635 - DNA, 966 bp, Zea mays
  Peptide Sequence Number=SeqID_75010
atgcaggtggcgtgcaaccgcaccacggggacgcaccccttcgactttgacgcatccaacatggaggcccaggcccacacgtcatgtaaccgggaccgggaaaggggatattttgaaagggatccttctccgcgaaggaagcgggccccgagccctcctactgatcaggggtttgaaggctggcccctcggaagggttcgacagccgccccagagcactcgggcttcaggctcattactgatcagaggttcgaaggctggccccttggaagggtttgacagccgcctcagagcactcgagctccgcgcccactacagatcaggggttcgaaggctagcccctcggaagggttcgacagtcgccccagagcacgcagagcgagggatgactctgggtcaaggcttcgtctactcaagggacgcaatctcgcctcgcccgagcccagcctcgggcgagaaaaatagtcccaggcgaattcacgcctcgcccgagggcctcctcaagcgacgggcgcaccctcgactcgcccgaagcccagctagggcaggcttcgtagtgaagcaaccttggccaaatcgcctcaccaaccgacagtatcgcaggcgcattcaatgcaaggatcacctagcatcttatcctgaaacgcgtgcctcagtcggcaaggagaggagcgccgctcgcccctctccgactgctgtgccactcgccagggtgaggctgacagcagctgagtccaggctcaggcgcaacaggaagctccgcctcgctcgaccttgggcctcggcctcggaaggtgttctccgcctcgcccgaccccagggctcggcctcaacctcggcctcggaaagtggtctccgcctcgcccgaccccagggcctggcctcaacctcgacctcaggaggaatcgcgtcctcgcccgaccccggcctcggcctcaggaggagtctccgccttgcacgaccttga

SEQ ID NO: 31636 - DNA, 639 bp, Zea mays
  Peptide Sequence Number=SeqID_75011
atggcccttcctgtgacgtggtcggtccgagccctgggttgggcgaggcggaggctcctccgaggtcgaggtggagtctgccttccaaggccgaggtcaagtccgagcccctgggtcgggcgaggcggagaccgtcggctgaggccagggctgagtccgagccctagggtcgggcgaggcggaattcgtcgtcttccggggctgagcccaagtccgagccctggggtcgggcgaggcggagtccatcgtcttccggggctgagcccgagtccgagccctaggtcgggcgaggcggaggcgcgcgtcaggataaggtgtcaggccacctttgcattaaatgctcctgcgatacggtcggtcggcgtggcgacttggccaaggttgcttcttggtgaagactgggcctcaggcgagccgaagctttgtgctaatgggggttaccagctgagattaggagtcttgaggggcgagaggacggtcaaggacagactcgacttttttacatacgcccctgcgtcgcctttccgcaaggaggaggggggaaaaagcgccatgctgcccttggagggcgccgaacatggtgtctccagtgagttgctaatgggtaatccgagtggacgctcgtgccccatctgctag

SEQ ID NO: 31637 - DNA, 324 bp, Zea mays
  Peptide Sequence Number=SeqID_75012
atgcaggcggcatgcaaccgcgccaagtgggcgcaccccttcgactccaacgcgcccagcatggaggcccagtcccacacgtcatgcaaccggcgcgccggttgctacgtgcgagcaactgcaccgccactcgcgccactaccgcgcctcctcgactacggaaccagtaccgcgactcgaggcaaccctgcgtatgacccaacagtgccagccaggcacgtcagtcatgggataggtggcacctttggcaggagaagcgggcgacgcttcgccttcgccataatgaccgcgtcaaaaaagggatcgggaaaggggataccctga

SEQ ID NO: 31638 - DNA, 303 bp, Zea mays
  Peptide Sequence Number=SeqID_75013
atgggggagcacgaggagagggggcacggttggaggagctccagggagcaagagcgtcgtgcagagcagcaggcgcggtccgagctggagtccggagttggggccgacgccgggctgggcgcgaccagccatggggcttggtccaggcgctgtctgatttggggcgagctcggggaaccgcgagaaggagagatgggtagcgatggagctccacggctgggaagaacgccggccggcgaagcaccacgagggagaagagaggagagagcgcgagtggagaagaagcctgcgcgtgggagataa

SEQ ID NO: 31639 - DNA, 966 bp, Zea mays
  Peptide Sequence Number=SeqID_75014
atgagccgtgatcccttttgcctcaggatgtacggacccttaaacccttccaaggcttcttctccacgcgcgctctctcctctcttgtccctcgtggtgcttcgctggccggtgttcttcccagccgtggagctccatcgctacccatctctccttctcgcggttccccgagctcgccccaaatcagacagcgtctggaccaagccccagggctggtcgtgcccagccccggcgtcggccccaactccggactctagctcggaccgcgcctgctgctctgcacggcgctcttgctccctagagctcctccaaccgcgccccctctcctcgtgctccctcgcggcgacctcccatgtcgaagcccagcccagccgctcccttcctccagctccctactatcgcggctcccagcttctccctggccatctgcgcccctactccttgctccctctgctggctcgcggcgccctctgctctagctcgccgtgcgcccaagctcctccagccgcgcagcccagctgcttcttcctcctcccggcgttcttcctgtgccgcgctttctgctcgccgcgtgccctggcgttcgtcgtggccaccgcgccgagctctacgctgttctcatccgccgcgctcgggtctccttggtattccagctcgtcgttcaccgtcgacctcgctaaatcgcccttgctcgacgccggtgatggccatcgtggagtaccgctgcgaactcccagcactcttgctctgctccaggaaataccaagccttgaacaaccatcgttttgttgcgacgtgtgtgtgcgctactcgccccatgtcgttgtcttcgtatttttagcaagccccggcgtgcgctcatgttcgccatcccctgttcgatctcgtcgtcacactcgccagatgttcgttcgaggacttcagctgaaggtcgtcgtcgatccgtgcgtcatcaagaaatcctaa

SEQ ID NO: 31640 - DNA, 381 bp, Zea mays
  Peptide Sequence Number=SeqID_75015
atgtcgaggttgaaatctggtagcacaggcagactggcagcacgtgcaaagcggaacaattcttgtcgtccccgcagatcgcctatggagtcctcgtcccctgacagagcccaggacccatcccccacggatcacctatggagtcctcgtccccctggcagcgcccaggccccggcggcggctgctgcgcgacaggtctcaggcggcggctgctgcgagacaggccttcggcggtggctgcgcgacagacctccggcgttgtgtgacgtgaagaggagacctacgtggaggaggaatcccagccggggcgaccacgatgccgaactcgtacagataatggcgaagtcgaatgaatggagattgtttggaggatgtaaataa

SEQ ID NO: 31641 - DNA, 150 bp, Zea mays
  Peptide Sequence Number=SeqID_75016
atggcgagcacaatttacaagaagcttggcttttggatggaggacctctcttatgacagaacgaagggaaataaagaatgggcgacgaagctgggagccaagggacttcggctggacatgttgacgaagctcaagaatgatgatgactga

SEQ ID NO: 31642 - DNA, 441 bp, Zea mays
  Peptide Sequence Number=SeqID_75017
atgaaggtacgcccttcacgaccttcgtctgaggatcattatatcccaagggagataatgcttcgaaggacgaagcccagatgggtcggcgcgaggccgagcgcgaaggggggaagtgaggtggccggagatgggcgtgagagaggtggaaatcccgcggccttcgtgttcgtcccgcgcccaggtcggcctgagtcagcttggggtagggtaatgatggcgcctcctgtcgacgtggtcggtccgcgccctaggttggtcgatgtggaggctcctccgaggtcgaggtcgagtctgtcttccgtggccgtggtcgagtccgagcccttgggtcgggcaaggcggagaccgtcggctgaggccagggctgagtccgagccctggggtctggtgaagcggagttcgtcgtcttctggggctgagcccaagtccgagtcctag

SEQ ID NO: 31643 - DNA, 198 bp, Zea mays
  Peptide Sequence Number=SeqID_75018
atggcccgcgcccgcgcctataaagcacccagggacttcgaccgtacccctccgcacgcgctcgacctcaccggagcccaaaaccaccggcgttctctggaggatatggttgctggagtgacttggtcgtccatcttgccaccgggttggactgtcgagtgggaccccgcctcggctgaggaggagcatgaggagtga

SEQ ID NO: 31644 - DNA, 576 bp, Zea mays
  Peptide Sequence Number=SeqID_75019
atggcccagcagaatgagatcttgaggcagctagctcagcgtcagccgccaccccagcactatggtggtggtgatcatcagcgacaccccgcagcagccacctaccaggagttcctcagtacccagccaccattgtttactagggcagaggacccactcgatgcggatgtatggttgagagtagtggaatccaaattcccgctactccatggagtttgctcagaggtcactaaggtcagccagatgaccgagaggtggaatggagagagttcaaggcagcttccaggggcaccatataccagcaggcattatggaccgaaagctcaacgagtttctggcactcactcagggaaacatgacagtgttacatatgctgggtatcatgcagacacggacgagaagaagagggacaggttcaggagggggctcagcactatgatccgtgaccgtctcaacatcgtcagggccaatagctataatgagttggtcaacatggccatttctcaggaggactgtatcacagctcgtcaggcagagaagaagaggaagacccctgtggcaggaccttcagcttag

SEQ ID NO: 31645 - DNA, 288 bp, Zea mays
  Peptide Sequence Number=SeqID_75020
atggccgacctgtcggtgccagttgcttcgcccgcgcgcgtccctcttgtctctctgcctcgcgggctcggcgaccccgaaacctccctagcacatgcttgcctccactccggcgacctcaccgccgcggagaggagcagcaccacccgcagctgttcgtccctccctgacaacgagcagtccgaggttcttgagtgtgttgttgtagaccttcctgagcaacaacctggtggtgatgctggcaacatggaggacttcgaggagttccaggaatacgatgagttttag

SEQ ID NO: 31646 - DNA, 669 bp, Zea mays
  Peptide Sequence Number=SeqID_75021
atgccccctgcaccaccacagggcatcccggctgctagaggagaccctgacggagacggagacgacgacgacgatggtggcagtttgagccacgacatggagctctcggaggagctggagccggagggatggatcgctagacccatcactcgtgacgccgctcacgggtgtcacttccatgacgctctcgacaccctgctgtgtcaggccttcgaccgacacacttggtccaacgagtaccattgtgtagtctaccagcatcgtcgtgggctatacccggaccagtgggaggctacttgcttggtgtgccgtcgggacgatgatctccgcggggtagctgatggtctcgacctgaagtattaccctcgccgttcgaccggtagtgctggaggtgtgattgcctcaccagttggtgagggcaatcccagactgaacagtatggtcaatctggctgtcgtgctcaacacagagttggaccatgcccttgacaagttgggcaaggttcgggcagaggttgcggaattgcgtgttgagtgcgcaacatgccactatctggatggtggttctcccgcccctgtcgggattcagcacccttactgttcaccgccccatggtcgcttcgactatggtaccccagactgcaggacccggatagatttggatccctag

SEQ ID NO: 31647 - DNA, 348 bp, Zea mays
  Peptide Sequence Number=SeqID_75022
atgcagtcacaaaagaatgtgttgctccagtatcaaataagacatttgcagaatgggcattgggagctggctgctgctgagctgctttctttgggcaatgattcgcccaatggccctgttctccacagtggaaacacgcacgacttcctccttgtgctggttggttgttctggttggttgctggggcaggaagacgggctgcctggttgctctgatgctggtattgatttcctccttgctggttgttctaacggtactgctgctgctgctgctaaggaaactgcctttggtactgctgctggtggttctgatgctgatgctagtgccagcgctggtgaccttgcttga

SEQ ID NO: 31648 - DNA, 474 bp, Zea mays
  Peptide Sequence Number=SeqID_75023
atgagcacttatccaccgccgacgggggaatggaccaccggcctctgtggctgcttcagcgactgcaagagctgtgatacatggaaagcccatcgccatctgcagcccatgttccctggccgggcccatgtacataaatcctcgtggctgcagcagctagctactagtcatcagctacagctagcctgtggtctggccggcctcctctactgtttgctgctgcatgccggggtggctgtggtcccgtgccactgcatctacacctgcacctaccgtcgcaagctccgggcggcgtacgacctgccgccggagccgtgcgccgattgctgcgtccacatgtggtgcgggccatgcgccatctcccagatgtaccgggagctcaagaacagaggcgccgacccggccatgggatgggaagtgctctcgaaaaagacgactatggctcctgtaccaatgcaagacatgacgcgctga

SEQ ID NO: 31649 - DNA, 144 bp, Zea mays
  Peptide Sequence Number=SeqID_75024
atggtcaacctggccgccgtgctcaacaccgagttggaccacacccttgacgagtcaggcaagcacccttaccgctcaccgcctcgtggtcgcttcgactatggtaccccttactgcaggacccagatagatttggatccatag

SEQ ID NO: 31650 - DNA, 81 bp, Zea mays
  Peptide Sequence Number=SeqID_75025
atgtgccacgtcaccatccagaagcagaaggagatagcagaagcagcagcgcaacaaagtcagccgaagcagaatatgtag

SEQ ID NO: 31651 - DNA, 780 bp, Zea mays
  Peptide Sequence Number=SeqID_75026
atggcggtggcaggcgggcggaagcagcggtcaagtcggaccaggaaaggggataccccgaaagggatccttctccgcgaaggaaatgggccccgagcccccctactgatcagaggttcgaaggctggcccctcagaggggttcaacagccgcctcagagcgctcgggctccgcgcccactactggctggccctcgaagggttcgacagccgcctcagacgcagagcgaaggatgaccctgggtacgttcgatacataaccaaggctcgggctacgctcccgaggctcgggggctgctctcgcaaacccggctccggccaaacagttgacagcgtcaacataccagcccgagaacttggaactcgactgaggacccgggctacggccagctcgcatgagggaacaaccagaccggccgaagcatcacgaaacgcattaagacctcgaaggagtcaaaccactcctccgaggcctcgggggctacacccggcggactcggcctcggccccggaagacgacgaactccgcctcgcccgaccccagggctcggactcggcctcggccccagaagacgacgaactccgcctcgcccgaccccagggctcggactcggccctggcctcagccgacggtctccgcctcgcccgacccaggggctcggactcgacctcgacctcggaagacagactcgacctcgacctcggaggagcctccgcctcgcccgacccagggctcggaccgaccacgtcacaggaggggccatcattaccctacccctag

SEQ ID NO: 31652 - DNA, 786 bp, Zea mays
  Peptide Sequence Number=SeqID_75027
atgaagtcacctagtaatggtgacaagacttcgaagtccttcaagtggaagctcttcgacatcatcttcgacagtaacatactcttcaatttactgcagaagagcaacttttctggagtcttaccaaacgtgctcaacattggtgcccacgagacgaagccacaactttcaggttccactacttcaactaacccatcgcctagccatctgggattccctccaccattcatcctaggaccccaccctatgagtaggtgtggagcacaagaacggtggtcgatggctgaggtgaacgtcatgtgggctcgtgctgatggagcgggagcggtgccaaaggttcacaatagaccaataaaaagaccaagaaagggttcaaacaaaaagagtttaagaaatcccaaaggcaccctggtctggcgcaccagactgtccagtgtgccaccggatagtgtccggtgcaccagggaactcgacgctgaactcctcaccttcgggaaaatcagagggcgctctgctataattcaccggaccgtccagtgtgccagcggagcaatggctacatcaagcgcaacggtcgactgcaacgcatttaatgcgcgcctgcacgcagaggtcagaacacgcgcagttggcgcaccggacagtctcaaggacatgtccggtgcaccaccggacagcccagaggccccacaagtcagagctccaacggtcgaaccccaacggctggctgacgtggctggcgcaccggactgtctggtgcgccatgcgacagcaaacttccaatga

SEQ ID NO: 31653 - DNA, 1236 bp, Zea mays
  Peptide Sequence Number=SeqID_75028
atggcgggggaacgtgggcaagaggatgttacaatgccggtcggcctagcggtcgtggcaaccgtggcgaggggtgacgtggggtcctcgcaggacccgtggtccaagttttgcgccggcggcgagattgccttgtccgccgctgcgaaggacgtggctgcctcagttgcgcagcagctaaaatattcggctgccttcgtcgagcgcattgctttgggggtgctgacctcggagttttctgccgagaggcggcgacttgaggggaggattgagcgcctccgaatgcaacatacggaggcgatcagagacaagtcggtggcggagaacaggagccataacctgctcgagaagctgatggcggtagaggcggagaaagaggacctctgccgtcggcttgcggaggagagagagggtgcggaaaaggcccaagctgcccgcgccgaggccagccttgccctcaagcgcaccatggacgtggagtcagggcagaagagcttacgcgactacgttgagaagacggaggcctccacccgtgtcggggtcaaccgagcgcatgcgttgctcgtggacgcgtaccgtcagctcaccgcacgaactgccccttttgacaaatctggtgaagaggttggcctccgcttcctaaggtggcttcaggaggagctcgagtcgctcccatccatcgtgaccggtctcatgtcctacgcctcgctcgttacctgcgaggaggctacgaatgccttgtcccatgagggatgtaggcatttcgaagtctttgatcgggtaaccgaggacttcgattgtggaatcttccagatcggagacgagatgctgaatgatgaagaagtcgaggacttcggcggccttcaaagctcgctgacctggacagagggcacggggacaggggctgaagagcaatcagcgcctcaagctggccctggcaaagaccctgcagcggcggctgctctggctggcgaagactctgcagcggcggctgctccttcgcaggttccgacatccgggcctccgcaatcaacccccgatgacgttgatactaattttttggcggctgcgaatgcaatgcacattaatggaaatgtgtctggttctgaaactgagactttgtcattggacggtgatgattttgggagcccgttttcatggattgacgagtattctgatgaatatttagactattttgctgtgttggatttggccgcaacagagtcctcgctgtag

SEQ ID NO: 31654 - DNA, 243 bp, Zea mays
  Peptide Sequence Number=SeqID_75029
atgagttccgcctcgccgtcagcaactcgggacacccctcggttcgcccctagcccctctggtttgcccgatccgaactcatcaaagtgtttctcgtgcagccggagtccgccgccgtcaactcgggacttccgcctccctgccgtcctccaggcgctcctgggtttgcgcttgtggggactcaggttgtttcctgagtacctctccataaggacctgtttgtggagtgacaacccaggataa

SEQ ID NO: 31655 - DNA, 207 bp, Zea mays
  Peptide Sequence Number=SeqID_75030
atgggtaatgtgtgcaacctctggagagtgttagaaaatggtatatcagccgagctcacagttaagagcagccttgggatcctctttgattacaagaactttggatacttttatgttgatggttgtccccactgtactcagtgctcaggaggtgatgctggcaacatggaggacttcgaggagttccaggaatacgatgagttttag

SEQ ID NO: 31656 - DNA, 354 bp, Zea mays
  Peptide Sequence Number=SeqID_75031
atgaccagagagcggtcaacccctgagctagatttagcgcccacttcaaagacccctgaaacaagggttgcaatgtcaattgtggcagtcaaagctgctgcaccccaagctaaaggtgttgttgcgaaccttgatgaagggtcagaagatgacagtgaagatattggcatcgaagaagacaacaccattattcgcccaacgaagctgagtcacgtggacttcaaaaaatccaaaataaagggagggcatattgggggtattcacaaccttcgccccaacacagttagggatacaacccagaatctcttcatctacatcaccgaagagcacggacccagactgatagccacctga

SEQ ID NO: 31657 - DNA, 1071 bp, Zea mays
  Peptide Sequence Number=SeqID_75032
atggttcacacttcgatagtggtcctttttctgccgctttgtgtcgaagtccacggtggatcccccagtgatcatgatttggttggtgcggaggcggtggtggtagaacctgcacctcttgatggtgctggtaagcatgattgggttggtgctggatttgctcgttatggtagggttgttggtggtggtaatcttcaccgcgaaacaagcaatagaatcttcgcggctgctgggtccgttctcggcctcttcctcttgcgccgttgccgtggctttgaggggggtattcttgacgacgggtgggctttctggctaggtgctgattggctatggtgtgcacctattgatgattgcgattgtccctaccggagtctgactgcgctggctgggtccaagttctactggacttcagagggtccttgggcttcctctgagtttcaactttgcattgatggagctcctcagacctgtcatacttctcaaacagttggtatagctcctgtagagggatcactcggccagtgcgtctatgtcgggtcggtacccttggaaattgagcagaaatttgtcgtgaagccctttccaggactcaatggacagtggcggtggttgtttttgatgcgcaaagctcgtagctttagctggtcttcagccgagatgcctatgacttctccgtcctctatagtgtcttcgccttctggcggagcgaagcttggtggtggtgcttgtggtgcgccctcggaactgcaagtgcgcatagtgccgtcgagggtgggggtggtcttggcgctgtctcttgctattgacagcgtcatcttcgaaggccttttagggggtggagcccgcgagggctttgcctttcttctccgccaggagtgctgccttcgctgcatcatcaatggacgtgacagccttcgaggttgctctcttgggggccattgcaggttgttttttagtcgcatgaacggtggaagccaaatattggaacttggtgtccaagataggctgatccaatgggaaattggggaaggagtttgcaatgctaacacgggatgtcaaaagccacgttaa

SEQ ID NO: 31658 - DNA, 591 bp, Zea mays
  Peptide Sequence Number=SeqID_75033
actgctgctatcgcgcgtgctgactacgacgatgacaggcattctgcgtatcgtacacgcgagcgagagatgaccgctacgctgaaaagctggacgcttagcggacgtggttatgaagcattgacccgcttcactcactggttggcagaaatccagcgtctggcggagcgggagccgattgccgcggtgcgtgatctgatccatggcatggattatgaatcctggctgtacgaaacatcgcccagcccgaaagccgccgaaatgcgcatgaagaacgtcaaccaactgtttagctggatgacggagatgctggaaggcagtgaactggatgagccgatgacgctcacccaggtggtgacgcgctttactttgcgcgacatgatggagcgtggtgagagtgaagaagagctggatcaggtgcaactgatgactctccacgcgtcgaaagggctggagtttccttatgtctacatggtcggtatggaagaagggtttttgccgcaccagagcagcatcgatgaagataatatcgatgaggagcggcggctggggatcattggctttaacagcgaagtgaagcaaaaacactag

SEQ ID NO: 31659 - DNA, 231 bp, Zea mays
  Peptide Sequence Number=SeqID_75034
atggcgccgctgcggcggtattccctaccgccgcgcttgctccggagggaggaagatggcgtcctgaccggtgatctggtgatggatggctacgatttgtccggccagtggaatgtgcgtcagatcacaatcgtgcgggcctggtactatcgcgtgtatttttcatctgggccatcgactttcgatcctacggttatcaacgcgtaccgattcgggttatgggcgatctaa

SEQ ID NO: 31660 - DNA, 462 bp, Zea mays
  Peptide Sequence Number=SeqID_75035
atggctaatattcctcgaagggttattctcttcgcgcttgagtctgattttgataattttgtcaccctgccggcggcagagagtgctggttgcttggcgacatcgctttgggtattctctgagttcacaaagttgattcctatagtgtggctaattaatgagcttgggctgaaagacatccctcttttgggtcgcaagtacacctggactaatggtcagattgatcctactttgcttcttcagaagtttggtctccagtctctctaccttgaacctggagttgtttctgtcggtgttttaggtccgaccgcacacccggggttgcccctcaaggttctggccgctttgaaatgcgtaacaccctacgttctggcgagtatgctttgtgtaatgggttacaagtggacccgggggatatctgtcccccgcaagcccccgatcttcgggctgattttaagataa

SEQ ID NO: 31661 - DNA, 969 bp, Zea mays
  Peptide Sequence Number=SeqID_75036
atgtaccaaaagatcactgaagtcctgaaggaggggaaaacagggatgggaaagtggacattagaaaccaagccagtacatgttcacatggccaatatattttctgcgctttattttgaagacaccatcaggctagtccaacagaatgcacaactaagaaatcaaactcgcatgctctcagctgttcttgaccagaggacatgcaagcacatatggcgatgtatgggaaactctatgaggagaggcagaaggctcgttcaaatgtttaatcagcacccactactgtggaagaaggagtacggtctacagcagcctgcagctctagtcataatcaacaacactgtggatgcacaaaggattgaagccaggatgtgtgcacccgatgatttttgcaagaactcgaagcaattaggaatcatggctaggtccgggttcagagagcttagaatttggggtgcttggcttcgaaaaggaagaatagggagagaagggagtaggcatacctggtgggtaatagtctccggcgatgaggtggagaagcgaggcagcgttcgcccggccgtccttggtggtaccggtgaagacctgaccgcggcggtggcagttgttgggtcagtcgttgcatggagagagatagcgagtgaggaccaacaaatccagatccgatcgccgtggctctcctcggagcggtggcagaggcatcaacaagagccgacggaggatccgagagggagggggacaggacacggcgatgtttgggatgagtgggagcacgtccgtggtagaggcatcgagccgagcgacggcagcagaggatccggagggggagggaagcacgaagtatgggagagagaaggggacgatgacctcgcgaccagagaaacaagcggactggacgaccgagcaagacatccaacccatccgaacgaccacgattttcctgatgacgtggaccgtcccataacttga

SEQ ID NO: 31662 - DNA, 201 bp, Zea mays
  Peptide Sequence Number=SeqID_75037
atgtgttacctcggcgccaatgatgacggcgccgaggcgcctcgtgaccagaacgcagcggagagagaaagaggagccaccacgagggaacttcgtgtcgtcgtcaccaaggcctttggtgttgcgcccagcgccttctacaagcctagagaagggaggtcgtggctgtaccactcgaaatctaccgccggcgccgcctaa

SEQ ID NO: 31663 - DNA, 363 bp, Zea mays
  Peptide Sequence Number=SeqID_75038
atcctcggggtttcgtacggctggtgtgccgactatgggataaaatacatcggatggcaagggcttcgaatagcggcgagatactgcattaatatgagctctttggcggacgtcagcgcctgcgtgacaccatgcctcattagagtggatggtccagacggtgatgttgtaactggagagttccgccacccatttggttattttggcggacgcctccggattcctgagcaactctctgagacccctatcagaagtgactcgtactttgtgtgcctcaaagtagtgtctcagcttgctcaaagccatgatgaccatccggagtcgagcttcgtgcatgttggcgaatgtttctacgaggtctga

SEQ ID NO: 31664 - DNA, 189 bp, Zea mays
  Peptide Sequence Number=SeqID_75039
atgggtttgaaaaccctgagtacgaagtgtactttcgcaagtcttacccatcaaagaaaagactctcaaggatatgctggcttaagggagtcaagtattagtctgcccgaggcaaagcttacccatgatgagctctacagatttgttatactgaccaatagcaaaatcctcaagaatactgagatgtag

SEQ ID NO: 31665 - DNA, 474 bp, Zea mays
  Peptide Sequence Number=SeqID_75040
atgtccggtgcaccagaggactgcaactgccaacccgtcaccttcgggaatttctggaggcaacatcgctataattcaccggactgtccggtgtacaccggacatgtccggtgctccaagggagagcggcctcaggaactcgccagcctcgggaattctgtttggctgcttcgctataattcaccggactgtccggtgcgggcccagaagtcagagctccaacggtcggaacccaacggctttggtgacgtggctgtcgcaccggacatgtctggtagcaattggcgccgaaatagccgttgcaacgttgatacaacggacagtccggtgaattatagcgaagcagacaaacagaaatccgaggctggcgagttcctgagggcgctcaccttggagcaatggaacatgtccgagtacaacggaaagtccgtgaaatatagcgtgtgcctcaagaaaatatccgaaggtggacgg

SEQ ID NO: 31666 - DNA, 525 bp, Zea mays
  Peptide Sequence Number=SeqID_75041
atgacccaccacctgcagaaggcaccgctgacagccacagatccaccgacggccaacgcccccgacccaggcaccagctacaagcacaagcaagccacgccgccgtcgcagcgggccgaccgccccgccgatccggccttcccaagggcggatcaggtcgccgaccacctccaggaagagggaggagtggagtgggtggaagaagggagggaaatgagtgagagagcagtcccgccgctgccctcctcgctgctcgttgaacttccggaggatctctacttcacccagatttccaggctcccatcccatcctcacctccgacactacgcctcgtacctcgtgaacccgcacaacgacataggcggcgctccgcgcctggctcctatcggctaccgccacgcctggcttttgcctcggcacgcgccgagtcgtgccttagcccccaacccccctcttgcacaggatgatgactatcttgctcctctccaagctgatcaagaaaaagagttgaagcttgtgcagtag

SEQ ID NO: 31667 - DNA, 1356 bp, Zea mays
  Peptide Sequence Number=SeqID_75042
atggaacagagcatactgccagatcttatgcaatctctaggaaatctccataagatccagagtctaaaactggagagtcatcctggttgcggtcgtgccgacaatgcaatgtttgatgcaatggcgctaccgggacatctcagacatttgcttgtgtcagagtactttgtccatttgtacaggctaccgtcgtgcattaatcccctatgccttgttaaactctcccacctggaattatatgtgatcgatatggacgagcatagtatgcaaatcctcggggagttggccgagctccgccatcttgtgctgtcaacgagatccacagtaagagttaataacgttgccgctgatggtttcttccacaagttgagatcctgcaagttttatacctcgatggtcctgtttgtgctcaacgaggactcgagtgtctcgtttaccctgtggaacgggacagatgatctagtgctgagctatggaaagaaggatggtgagtgtccaagtgcgccggccgtcatgccaaacctagaagagcttctgtttagcgcccagccgaagtggtccctgatgaaatgccaaggtagccatggcaacctcggcctggagcacctccgttcgcttcagaaagtcacagcggtgatcagctgcgaactgtatatgtttgaggcggagaagatggaagcagagctcggcatcagctgcgaccggtatttcgttgaggcgtgggtgatggacgcggaggatgggctgagagatgcgatcggtgttcatcccaaccaccctactcttgttctcggtcgcaagaatgaaggtgtcctcgcaagtgatgtgccacaagaagaacatgagggtgagggctcttctgttcacctaaacgcgtgtaaacagccgactacacgcgttcaaacactaaacgggagtggctcctggataaagaccttctctaatagcgaaagtgtacgcggcgtaaaagagcaacccgaaggtgataggaagatgataataatgataaatcattggtatatgacaattattatctttatccctccgtatacttgtgtattctttcatttgtctatttacatttatgcttatatgataaaaatgatgaagtgctggcttagagatgtcaatggggacccgatacccgctaacccgtggggaattccccctattagggtacgggcgcaccgatccaatcctcggagctggcggagtctccggccgcccggcgcccgatgctgcccgccacccgaggcagcaagccaccgcagagaagtcatggacctgtcgtcggacccgaagcgcaagccgcgctgcctcagcaaggtggtcatgctcgcgctcctcatgagctaa

SEQ ID NO: 31668 - DNA, 381 bp, Zea mays
  Peptide Sequence Number=SeqID_75043
atggcgtcttcgcgggcgagagtggaggcgacagtgcaatccgacggaaacgaacaaggccttaatcgtaaccaatcccgagcacttcccccacttcatttatgcaagggacaggggaaacacctaaaaggtgggaccaccacaaagaaagcaacaggggacctgccccttcaaccagggtcacattgtgcgtcgaacacaaacgattgtgctgcaggtcctcaacgcctaggacagagcaccaatagggcacgtgaaagtcgcctagagggggtgaatagggcgaaactgaaatttacaaagttaatcacaactacaagccgggttagcgttagaaatataatcgagtcagagagagggtgcaaacaatcgcagcgataa

SEQ ID NO: 31669 - DNA, 381 bp, Zea mays
  Peptide Sequence Number=SeqID_75044
atggcttccgtcacctcgtctctcttcttcgccacggcgtcgctcgtgatggtggcgctcatcatgcacgggggcgacagcaataccatgtgctacgccgcacggcatcttgccgacgccacagccgcctcgtccgcctgtggccatgctttcaccgatgcccgcgcgtgccgacggttcccgcggtggacgccgtgccacgtgccagtgccaccgatccccgcggtgccaaacaccgccgcgctgccacttatgccggtcgtacctcactactggaatcgcaggctttgccgagtgcctgaagcactcggcaaagctttaaaaacactcggcaaactctttgccgagtgtcgcactcggcaaagagggctcggcatatag

SEQ ID NO: 31670 - DNA, 1164 bp, Zea mays
  Peptide Sequence Number=SeqID_75045
atgatcacggccctgcaggtctccggcggcggcctgccgctcctgttcgcccggcgccggcgccgggcgttccggccgccccaagcggtggcgtccgacgccgccgccgccgccgagggcacggcgagggaggatggcgggaaggtggccctgggcgggtccggcgtagccgtcaccaagctcggcgtcggggcgtggtcctggggcgacaccacctactggaacgagttccggtgggacgatacgaagctgaaggcagccaaaggagcgtttgacgcgagcatcgactgcggaataaccttcttcgacaccgccgaagtgtacggagcaggggtaagaataagagcatggaagcttgacgacgccttacgcccttaccttaccaccacccgtcacaaggtgaatctaacgctgcttccaaacgtgttctgccgccatcaggtatcgggagcgattaattcagagagtttactaggaaggtttatcaaggagaggcagcggaaggagcaggtggacgtggctgtcgcgaccaagttcgcagctcttccatggaggttcggtcgtgggagcgtcatctgcgcgctcaaggcctcgctggatcgccttggcgtctcttcggttgagctctaccaactccattggccagggatatggggcaacgaagagaaacgtctccgagacgcgtacgagcgcctcaggaagaggggggtcccgctcgcctccaaccaggtgaactacagcctgatataccggaacccggaggagaacggggtgaaggcggcctgcgacgagctcggcgtcactctgatcgcgtactccccgatcgcccaaggtgctctgacgggaaagtacacgccggagagtcctcctaaaggccctcgaggacggatatacacgccggagttcctgacgaagctccagccacttatcaaccggatcaaggagatcggaggaagctacgggaggacttcaacccaggtggtgctgaactggctggtgtgccagggcaacgtggtgccgatcccgggcgccaagaacgccgagcaggcgcgggagttcgctggcgctctcgggtggagcctggcgcccgacgaggtggaggagctccggtccatggcgcgccaggtcaagcccgtcatcggcttcccagtggagaagctgtga

SEQ ID NO: 31671 - DNA, 918 bp, Zea mays
  Peptide Sequence Number=SeqID_75046
atgtcgtgcgcgttcgatgactactatatcaaggactatggcgtcatcttggcgccagagcggaacccgcagtgggcaagcgtctcctatggcgtgttcatgtgcctcgagtgctccggcaagcaccagggcctcggcgtgcacatcagtttcgtgcgctcggtcaccatggactcctggaccgaggcgcagctccgcaagatggaggccggcggcaacgaccgcctcaacgccttcctcacagcgtggggtgttcccaaggagacgtctcacgtcgcgaagtacaacttcaacgccgcgaccgcctaccgcgactgcatcgcctcgctcattgagggcaagccttggaccgacccgcccgtagtcaaggagacgcccggatctggcgcgcccgccccggctaggaagccacccttgcacgcctctagaggcggcggcgggtgggacgactgggacgatgattttcggccggacatgaggcggaatcagtcggttggatcattcgccgtcgcgggggcacagtcagggaggcagccgccgaggtctaaatcaacacaggacatctacactaggcagcagctggaggcgtcggtggctaataaggatgatttcttcgccaggaggatggcggagaacgagtccaagcctgagggtatcccgccatcccagggcggcaagtacgttgtgtttggatccagcccagcgccatcggctaataggaacggcggtgctgctcagggcgatgtcttgcaggttgtctctcagggatttggatgcctttcattagttgcagcctctgctgcccagtctgctgctagtgttgtccaagtcggcacaaaagaaatccaatcaaagctcaaggtcattggtgatggtggtgatccaaatggccactatgacaaggatgatcatcaatga

SEQ ID NO: 31672 - DNA, 642 bp, Zea mays
  Peptide Sequence Number=SeqID_75047
atggcacaagaagcttcacgaggtgctaaggatgctaccagtgcaaggaatcgaagaaaggcttaccgtggagctcggtctacgtgcgccggcggtcgggtgaagtccggcgacgtcgatctggtgtctccggcgagggattacaaacgtgcgaatcttgccaagggtcttgtgcaaatctcttcctggcacctagggctagctactatgtggctttgggtaacaccaggaataccactcgccgtcaggaatactctcccaaggccgcggcaatggcaccagagggaggtccaaggacggaggcagcaaccgcgcagattctactgtctgtttcatggcgaggactgcacgcacctaacaagggattgtccagaaacaaagcccactagggacagaatgtccagagcgcagccagccgccaaccagagggtcgtcgcgcacacatatcaccaccaccaccaacaaccctacaacaacgagcaaccccagcatccacccaaccacacgtaccagccccgtcaagaagtgcaggttctgccaccaccgcctctgcatcacccaaatccacaacaccataaccaccccaagcaccctagcaggaagacttcgccgaacaaccatatcgcggagtcatccacatga

SEQ ID NO: 31673 - DNA, 339 bp, Zea mays
  Peptide Sequence Number=SeqID_75048
atgtccggtgtacaccggactgtccggtgtgacaacggaacaacggatatttcggcgccaacggctacctgcagcgcattgaatgcgcgccagcacgcgcagaagtcaggcacgcccatactggcgcaccggacactctacagtacatgtctggtgcgccaccggacatccaggcgggcccagaagacagagctccaaaggtcggaactcaacggctttggtgacgtggctggagcaccggacatgtccggtgtgcaccggactgtccggaactttgtgttccaagtgattgagaagagaaagctcactcggtccgagggaccgtttgagagagggtaa

SEQ ID NO: 31674 - DNA, 321 bp, Zea mays
  Peptide Sequence Number=SeqID_75049
atggggtgcaccggaggtgcacccaatgggtgtagcccccgaccttcaaatggattttttaaagataatccattcgaaggtcttcctttcgcttgtggaaactggcatgaagctattttgcattatgctttggaggtcagcattatgtcatcaatattttgctgcagaggtattcactgcatgccctgcacggatgtgaccgttttgaaaaatatactgataattcctgggcgtccccccctaatgggtgtgggcaagggacgacttgatgggtggaagtgcttattgaatgccttgcgactgttcagtgaccgcagttag

SEQ ID NO: 31675 - DNA, 390 bp, Zea mays
  Peptide Sequence Number=SeqID_75050
atgaccaagacattggcatccaaggtatattacaaacggaactctggttcccctccgcacaacgaacaaccccactcgacggaggagaggcctgcggagcaacagaagaccgatgaacggcttgtcgtcgcccgccccagcggcgacgacgacgacgaattctgccccgggggtccgaacaacagcagcgatgacctcagggcggacgctgctgtcaggaggcccccgtccgtgcccaaactcgagaggcaaggacgggcagaaggtcgtagagttggaggcaagagacaccaaacttgtggtggtccttgtgggaaccttgtgttccaagtgattgagaagagaaagctcactcgatccgtgggatcgtttgagagagggaagggttga

SEQ ID NO: 31676 - DNA, 528 bp, Zea mays
  Peptide Sequence Number=SeqID_75051
atgacgccgggggacgctgggccggaggtgaagtaccgcggggtgaggcggcgcccgtcggggcggtacgcggccgagatccgggacccggccaggaagaccccgatctggctcggcaccttcgagtcggccgaggccgcggcccacgcctacgacgcggccgccaggaccatccgcggcgccgccgccaggaccaacttcccctccgcctccatctcagccacggtggcgccgccagccgcccccgccgcgacgtctagccacagcagcaccgtcgagtcctggagcggcggcagcggcggcggcgcgcccgtcgggatcctccgcgccccggccgccgaggaggactgccgcagctactgcggctcctcctcgtcggcgctctgcgaggacggcgcgtcgggcccgggctgtggcgacgagaccgccgcgccgccgcggtgctccccgcttccgttcgacctgaacgtgccggaccccgcggccgacgagatggactggcgctgcgacacgctgctgcacctgtag

SEQ ID NO: 31677 - DNA, 942 bp, Zea mays
  Peptide Sequence Number=SeqID_75052
atgaacaagacactggcatccaaggtgccattacaaacggaactctggttccgcctccgcacgtacgaacaaccccactcgacggaggagaggcctgcggagcaacagaagaccgatgaacggcttgtcgtcgcccgccccagcggcgacgacgacgacgacttctgccccgggggtccgaacagcagcagcgatgacctcagggcggacgctgctgtcaggaggcccccgtccgtgcccaaactcgagaggcaaggacgggcagaaggtcgtagagttggaggtcctcctctacggcgcgggggctgggtcccacgcgtcatgcaagccggctcaaagcagaagaagccaaaccgccgtgcgcggtgcgtacaaccgcccagcggttacaagcgaccctccacttttgcccagaccagcgagcgaaagggcgggcagccatgcaggcggcatgcaaccgcgccaagtgggcgcacttctccgactcccaacacgcccgacatgggggcccaggcccacgcgtcatgcaaccggcgcgccgaatgcttcgtgcatgcaactgcaccgccacttgcgccactaccacgcctcctcgactgcggaaccaataacgcgactcgaggccacccggcgcacgacccagcggctccagcctggcgcgacggtcaatacggccggagacgggccggcagtaatggcggtggcaggcgggcagggactgggaaagggggataccccgaaaaggatccttccccgagaaggaaccaggctccgagcccccctactgatcagaggttcgaaggctggccccccggaagggttcgacagccgcctcagatcgcgtgggccctacacccactactggttagaggttcgaaggccggcccctcgaaagggttccacggccgcctcaggctactcgggctccgcgcccattactga

SEQ ID NO: 31678 - DNA, 264 bp, Zea mays
  Peptide Sequence Number=SeqID_75053
atgtcgggaggatccgccaagagggagatggaaaccggcgacaaggccataagccacgggaaggctccatcaagggagtctggcgccaaaggaagggaggaatcacctccccgcgttaagtcacatcggagtggcgacaagaagaaaaagacgaagaaagtggtctactacgagaccgattcttcgtcgccaattgtgtggtggtccttgcggggtctaagtgacccgggaaatcaaggaagaaagctcactcggtctaagtga

SEQ ID NO: 31679 - DNA, 780 bp, Zea mays
  Peptide Sequence Number=SeqID_75054
atgaccggggataagcaaaggcaaaagctcaagcaaaagccattaagcaaaatctccaacacctacatcaaaaaggtggacaaaaaggttgctacaccatatttgatcaagaagaaaaagaatggaaaggtgatagcaatcaaggccaacaagcaagcaaacaaagaaaagggggccaaacgcatctgggtgccaaaggaaataatttcaaccatgaaaagaaccaagaaggatgcaagattaacttggactgaggaattgaggaaagcaacacctcaaaagaagacattaaagagatccaagaaaagtccaagtgtgttgcctgcggactatctgtgcgtggagcaccggattgtccggtggcacaccggactgtccggtgcccacacgccggactatccggtgcaccagagaacagcagcccaatggctagttccaggtggaacccagagagaagaccaccgaactgtccggtgtggaaagcctgcggcgccaacggtcacctgctctgatagggcaacggctaggcgcaccggacatgctacagtgcgctatccgagcgaggcgaaggccatcgagggcctccgcgatggtgtcgagatcgctgggcagacgaggccgggtttctggggccttgaccatttcccctgcgtcgttgatgatgaattcgaggctcctaaaatggatggtcattcctggggtctagatgacgtggcaataggccatccggggcttggagaagtcgtcgagaatgtgcaaggcccctacctagcgtgctaa

SEQ ID NO: 31680 - DNA, 768 bp, Zea mays
  Peptide Sequence Number=SeqID_75055
atggcgcttatcgttggccgcattcgtgagctggaggctgaagtgtttcggctcggggtcaaccacgccctggtcgttactcggtctcaatacgaggactcgatcaagctggatcaagtatgtatcaggggcctcaggttacgttctcttggggcccttcccgtcaagggtcccatgcgagggaggcatagagcagtgacgcgttttgctgagcatccttccatagacatcatgcttgatgattccttcggctccaaccgcgcatggcaccccatttcgtcggtgccaccgatggcgtctatccttctaggggtaggggtcatgaggggcatcgaagataagatccccgctttcatcgaccatccctatgaactccaagtcatcggtagtagggagatggtcatgggctacgagggccgcaatcacccgtgggccgtgatacaggtgggacagaaacacctcgaggatgtcactagagctatcatagagggccaccctttcgtcgttgctgatgcaagattaacttggactaaggaattgaggaaagcaacacctcaaaagaagacattaaagagatccaagaaaagtccaagtgtgctgcctgcggactgtctgtgcgtggagcaccagactgtccggtggcacaccggactgtccggtgtaccagggaatagcagcccaacggctagttccaggtggcacctggagagaagaccaccggactgtctggtgtggaaagcctgcggcgccaacggtcacctgctttga

SEQ ID NO: 31681 - DNA, 162 bp, Zea mays
  Peptide Sequence Number=SeqID_75056
atgggcacaaagccgacacggggacaccagagggtgcaggccactgcgaggcgggctaacggcggcgcggatcaactccggcgagcaatcgcgcaatgtccaagggttttcaattcaaattccaatcaacttccaaattcaaaccaaatcaaacatgtgtaa

SEQ ID NO: 31682 - DNA, 243 bp, Zea mays
  Peptide Sequence Number=SeqID_75057
atggccatgatggagagtcttggtgtagtgtctccgtctgagtcgattaaggaccgtctcgatgtaggcttgctgatcgaggaccctttaactggtcacatgcctcgtcgtggtcagcatatccttgagagtcttttactttgtcgggtgaagaagcgacaaacttttgttgcttctgttcaaaggtggtacccaaagaagagaaccaagactaaatctacgggagggaaggccctccgttaa

SEQ ID NO: 31683 - DNA, 639 bp, Zea mays
  Peptide Sequence Number=SeqID_75058
atgtccctaagcacgtgggccagcccgacccggcccgaagcatcaacgggccgtgcctggcccggccctattcgtaccgggccgaaacgggttcgggccgggtccgtgccgggtggcccgtttggacatctatacctcaaccgctcgtgccccaaggagctgcaggtggagcgcggtggcacggtggcgtgccggagcgcgtgtgaggcgttcgggcaggaccagtactgctgcagcggcgcgtacgcgacgccggcggcgtgccgcccgacggcctactcgtccatcttcaagtcggcgtgcccgcgcgcgtacagctacgcctacgacgacggctccagcaccttcacctgccacagcgccgccggctacaccatcgccttctgcctccctccgtcgtccgggttgcacggctctgatgtcactcccctcgtttcgccgccggcgtctgggcaaagcaccggcagagttggcggcgatggcgtcggaagcgccgaccagccgcctcatcctgctactggcaacagtgatggagggggctaccatcagctgtggatgacgatgtcgctagccagcacgctccacgatcagctgtggcttctgctgcctctgcctgcagtgctcttgctcctcctctga

SEQ ID NO: 31684 - DNA, 831 bp, Zea mays
  Peptide Sequence Number=SeqID_75059
atgtgcaatgtccggtgcaccggctgggcgcgcgtggatctgccactgtgcggccctgtccggtgtgtaccggacagcaactgtgcgatgtacggcgtgcaccggacttccactgttcactgtctgcatgacgagactgaggtgcatcctcttgctgtggacccgcgtccgctcaaccttcagagggccatagctatcagggtgtttttgtcttggggacctttggcggagaagaagacccccaacaagtaccaggacccaggagtccttcttcagggctcagttgtcagctcagatagttgtgcatgctcaccgatgtatgttgaggagtgggtccgagtgttctatgccatagtatggatcaaccctggccatcagtggatgaggttccggttcgagcatgaggacgtcactctgcatacaactcagattcgagagttatttggattccctaagtcgactacgaggcttcacaacatgtgttatggtaccttagaccctcctcatcatcctcacaatggagtagctccaagcaccgctcacgtcgctgctctgttcagacctccgttcacatacgagtctcggtgttctcctgttgacttcaccccagcggtgaagttcttatatgagctcatgaggcacaccctgctatcgaggatgggatacagagaggccaccacacatattcaactttggctccttagtgctctggctacccttgatgcctccagacttcagtttggattttaccgcctagctcctgaggacaccactttggattcagtagatccactagcaccggacttcagggatgaggatgaggctatctga

SEQ ID NO: 31685 - DNA, 513 bp, Zea mays
  Peptide Sequence Number=SeqID_75060
atgggagaagcatcaagagccagcagctcagcgtacccgctgctcctcgtgctagcgctggcgcattggcgcggcgtcgcagcggcgagctccaccaccttcaccgtgtccaactactgctcccagcccatatggcccgggacgctcgccggcgcggggacgccgcagctgccgacgacggggttcaggctcgacccggggcagagcgcgctggtgccggcgccggcggggtggtccggccggctatgggcgcgcacgggctgcgcgttcggcgcgggcggcgagggcacgtgtcagaccggcgactgcggggggcgcttggagtgcgccggcgccggcggcgcgccgcccgcgacgctgttcgaggtcacgctggggaagggcgccaccggcctggactactacgacgtcagcctcgtcgacggctacaacctgcccgtcgtcgccgtcccgcgggcgccgtcgggcgccgggtgcaacgccaccggctgcacggccgacctcaacctatag

SEQ ID NO: 31686 - DNA, 783 bp, Zea mays
  Peptide Sequence Number=SeqID_75061
atgtccacggcggtggcgcggccggcgcacggcggcttccggcagtcggggagcgggaagccggatccggaggacgcggacaggatgagggacgccaacgggtacttggtccaagaacgtgagaaggaagaggaagagcgtggcggtgaggcggcggcggcggggagggaggaagaggcgctgtcggaggcctcgtcgatcggcgcggcgtcgtccgacagctcctccatcggcgagaactccgcgtccgacaaggagggcagcgacggggaggaggaggaggtggaaggcaaggcgcaggggctcggcatgatggggctggccacgctccagtccttggacgatgccctgcccaccaagcggggcctgtccaacttctacgcgggcaagtccaagtcgttcacgagcctggcggaggcggctgcgacggcggccgccaaggagatcgcgaagccggagaacccgttcaacaagcggcggcgcgtgctgcgggcgtggtcgcggcggcgggcgtcgtgcagcgcgctggccaccgcgtacctgccgccgctgctggccccggaccacgcggtggtggaggaggacgacgaggagggcgcggacgacgaggacgaggacgagggccagcacgggcgcggcgggctcaggggcaggaggccgcccacgttcccgtccccgcggctgagcgcgcacgccaccgccggccagatggcgagggccgggtcgtttcggtccccgaggtccttctccatgacggacctccacagcgcggagtacgagtag

SEQ ID NO: 31687 - DNA, 459 bp, Zea mays
  Peptide Sequence Number=SeqID_75062
atgggcaagagcaagaaaggtggtggttcttcgcatcattccggcgacaagcgcaagcgcgagctgactcctccctcggaggacttcggcgactcagagtacttggaggaggagttctcctccgagtccgagggctgttcggctcctgcctctcccccggcgtcgtctggtgattcaaacgactcacaggggatcgccgcggaggtatggacttacatccgggccgtcgagcgcgtcgggctcgagggctcggatgagtcggagtactcttcggacgaggagaactcctctgactcgtccgaggagggcagcggcggcgatggcggtgacggcgacgacgacggaggcaacggtgacggcggcggcgacagcagcaagggcggtgacgacaccggcaagggtggcagcggcgacgacagcaagggcagcaacaagggcagcaacaaggccagtggctag

SEQ ID NO: 31688 - DNA, 1944 bp, Zea mays
  Peptide Sequence Number=SeqID_75063
atgaccgaggtcgccgacgcgtcccctccccctccgaccgccggcggcggagaccgcaagcggggccgcgcctcgcccgtgcccccgctgccgggccagcacaagaggcgtagggaggagggcggcggcggcggcttcgaccggcgccggctcggcccggttggcggcggagggcacgagcaggacgacaggagtgatttgaatgttgcagcagttttcaatgctgttgagattagtctcccaggttcgaaattggtcatggtggcgtatgaggcagtggacggaatggagagtttatcatggtatggaaatggtcttggtggcataggaggaagaggtggtgacagtcgatatacaaatcgtgcaccagattctggacgcggtggatggaatgagggttctgggaacagtcgtagggaaggactgatgtcatacaagcagttcatccaggaacttgaagatgatgtttcaccagttgaagcgcaaagcagatatgaggagtacaagtcagagtacatcacaactcagaagaaagcttactttgccctccataaggatgaagattggttaagaaataaataccatcctacaaaccttgaaaatgtcattgaaagaaggaatgaactggcaagaactactgcagatgatttcttcctacaattgcaaagtggaagtctggacaccggtccaggtttgactggttcggcagtgagcaaatcaggaaataacagcagtaaaaatctagatgctgtggaaggggatggtaaaaaggggaaacttggaaaaggttccgacgattcatattatgctgctcccaaggctcacccagttagttctgaagttcgtcgaattcgaattgatattgagcaagctcaaggtctcatttgtaaacttgattctgagaagggtattgaaaacaacatcctctcaagtagtaatcatgaaaagccagacatggataagtcacatggttcaatggggccaattgttatagtacaaggatcatctactgtgaagggtcttgagggtactgagttgctggacactcttgttacttatttatggcgtatccatggtgtggattattatggtatgtctgagacaaacgaacctaaaggcctaaggcatgtgaaagcagatgcgaggacatataatggggctagctcaagtgccaccgaatgggagaataagcttgattcattctggcaagatagaattcaaggtcaggatccattagaaatattgaaagcgaaggagaagatcgatggagctgctactgaagtattggatccatatgtgaggaaaataagggatgagaagtatgggtggaaatatggatgtggagccaagggctgcacgaaacttttccatgccgctgagtttgtccagaagcatattaaactgaagcacacagacttggtggttgatctaacttcaaaagcaagagaagatatttactttgaaaactatatgaatgacccaaaggcgcctggtggtacgcctatcatgcagcaacctgctccaaggggaaaaggcagacaaaggccaccaatagagagtcggctgagggatgagcgtggtaatcataggctcgacagtgatgggtccggtgaaaatcccgacgatcctgtttatgattcgtttggtgatccaactatgcatggcgccttccctccagatattcctgctccccctgttctaatgcctgtgcctggtgccggcctttcaccagttcctgaccttatttaccgtgctttgcagctaccaagacctggatgctcccgaggacgaagtgaccgtcatggactaccgaagcttgtaggcttgcctccagatactcgtttaggtaaacattacagtgcgaaatcaaaacatcttgctctgtctaaaatcaccgcggaggaaccccagcaggcatctcagcacctgtgtctcgactcctga

SEQ ID NO: 31689 - DNA, 813 bp, Zea mays
  Peptide Sequence Number=SeqID_75064
atgaacacggacgtccctggcagcaacgcgctcacagatagagcgaagatcgacctcaacatgcttcttgcgttggtgttggacgaggttgatggagaggtagacaactctgacgttgccgcagtagacacacatacttctagggaggtggttataaagctcctagaggagctagcagaactggctcgcctcagccaccatattagcaatagcctagtatgcagcctcagcactagaacaggagaccaccggttgaagcttggaggaccaagagatgaggttgtccccaaggaacactgcatagctggatgtagaccggcggagacagacctgctggatagcatatgcgatgtcgggcttggtgaaggtgagatactaaagagcgtcaacaaggttgcgataggcagttgggtcattggcagggacaccgtcgcgaaagaccttgacctacgtgtccactgtccaccggggtcgcacatggcttgcagtccagcatggcaatgcactccaggatattttggttggacaacagcacctcagtcctttgactgcaaggacagcgtgattttggaggacagccgcggctgcttggagcgcttagccccggagcgggaggccgggagggtgcaacaggacgtggaggcatgcgagccgccacaacggggatgggagagccagcgaccagcagggggaggacaactggggagggggaggggagcggggaagggtggccggcggttaggtgcacaggcgccgacggccaggggtatggcgataactacaaggcctaaccccaaaaccctaaactggtaa

SEQ ID NO: 31690 - DNA, 875 bp, Zea mays
  Peptide Sequence Number=SeqID_75065
tcagggacgaggtggacaacgcgacgacgctccactggagggcgcgcaggcaggcgagcccgaccgccgccgcgctccacgagagggtgcacaggcaggcagacccgcccaccgccgtcgtcgctccacgggagagagcgcaggcaggcgagcctgaccgccgcccgccgccgctccacgggagggcacgcaggcaggcaggcccgcccgccgccgccgctgctccactggagggaggagggggacagctcgacgggtgggaggccgcctccgcagccagagccgccggttgggggcgggccggatgcggtgagctgctggcgcttgcgctggcgggggaggccaggaagcgcccaaccagaggccgccggcggctgctgggggcggggaagggccgccggtgtctgatccggcgaggagggcggggagcaacgccggtggggaggaaggcagccgtcgcggggaggggcagaggcccagcgacgacgcgcagaaaggctggcggcacgacgcagtgggggagcggcggttgggctggggctagtagccgagccgcgagcgcacgaactccgaggagagcgctggggcggggctggacgcggcgagctgctggcactcgcgtcggcggctgctgctgggggcggggagcagaggatcggaccggccagggcagaggggtggccagtggttgggaagggagccgccccgggagggagggatgggcctcccggggcggcggctgcgtgtggggcagctggctggcggctgtaggggaagaggttgttcttttggatggagatacaccccatccagaatctgctaaggaaacatccaataactgggaagctatactatccttcaaggttggcagttaa

SEQ ID NO: 31691 - DNA, 84 bp, Zea mays
  Peptide Sequence Number=SeqID_75066
atgaccctcaggacctcccctacaccctcgaccacctcaccggagcagtctcaccgccgagaacttaggaaattcataacttga

SEQ ID NO: 31692 - DNA, 411 bp, Zea mays
  Peptide Sequence Number=SeqID_75067
atgacggtggcaggtgggcgggagcagcggtcacatcgtcagccaagctcacgtcccatccgggggcagcaagagaaccccctctcacggcgtgaagacaacgcgcccgtgatccgttcctcgaacggctcacgcacgcgcaacggccgccccgccaaccgcacgccccgtcgcattaactccgcgggaccgggaaagggggataccccgaaaaggatccttccccgtgaaggaaccaggctccgagcctccttactgatcagaggttcgaaggctggccccccgaagggttcaacagccgcctcagatcgtgtgggccctacacccactactggtcagaggttcgaaggccggccccccgaagggttccacggtcgcctcaggctactcgggctccgcgcccattactga

SEQ ID NO: 31693 - DNA, 240 bp, Zea mays
  Peptide Sequence Number=SeqID_75068
atggaggcttactatgaggaagttcggcacctcgaagataaattatttggcctggagctcaaccacgccgcgcgccggtacaacaaggcccttggtgatgcccagcgaggcatccgagctcgcccccacgatgaaacgcccccggttgatgggtctaaggctatgcagatcgatggcgatagtgatagggccaccccggccatggactggaggacaccttacctagagtacctcctctga

SEQ ID NO: 31694 - DNA, 345 bp, Zea mays
  Peptide Sequence Number=SeqID_75069
atgcccgttgccccctcggcgaactttgcgacagggctagaccccgcgccccctcggcgagtcgcggcccccccaggcgaaccgcgccgccccaggcgagccgcgccgcccccaggcgagccccttccgggcacccgcgcccgcggctccctgcacgtgtccggcgccggtgactcgggcccttcccgttgcgccctcgcttcaccgagcccgccccgtcgcaggccccccgctctccggccgtgccccgacggctgcgcccctcgtcgcgcgccccggcggccgtgcctggcctcgtgcccctgccccggcgattcgcgccccgcgtgcctctcggttgtttaa

SEQ ID NO: 31695 - DNA, 257 bp, Zea mays
  Peptide Sequence Number=SeqID_75070
atgactgtggctacgcccgtacatggccctatctcgggttgcaacccgaggtaccttaagacatatccgaaaccctcgggagcgattcgtgacgaagagcgcactcagagaagtaaggacgaaaccctcgaggggaaacatccgtggtacctcttaaaccgaggcttctccccgagagtctcccacctcaggcagaatttcgcctcgcccgaggtcgccaccgctccgtccgtctcgcctgagctgatccccgacag

SEQ ID NO: 31696 - DNA, 1362 bp, Zea mays
  Peptide Sequence Number=SeqID_75071
atgaggcgaaaagacggcgggtatcccccatccgggggcttggaaggtggaaagacacgatgcataagggagcgcgaagacatggtcgccttccaaagggggcaactgcaccgccacttgcgccaccaccgcgcctcctcgattgcggaaccaataccgcgactcgaggcaacccagcgcacgacccagcagcgccagcctggcgcggcggtcaatgcggccaaaagtgggccggcagtaatgacggtggcaggtgggcgggagcagcggtcacatcgtcagccaagctcacgtcccatccgggggcagcaagagaaccccctctcacggcgtgaagacaacgcgcccgtgatccgttcctcgaacggctcacgcacgcgcaacggccgccccgccaaccgcacgccccgtcgcattaactccgcggctccgagcctccttactgatcagaggttcgaaggctggccccccgaagggttcaacagccgcctcagatcgcgtgggccctacacccactactggtcagaggttcgaaggccggccccccaaagggttccacggtcgcctcaggctactcgggctccgcgcccattactgatcaggggttcgaaggctggcccccgaagggttcacagccgcctcagacgccgagcgagggatgaccaggggtacgttcgatacataaccaaggctcgggctacgctcccgagctcgctggagacaccatgttcggcgcccatcgagggcaacatggcgctttcccccctcctccttgcggaaaggcgacgcagaggcaggctcgggggctgctctcgcaaacccggctccgaccgaaccgttgacagcgtcaacataccagcccgagaacttgggccccgaccgtacacccgggctacggccagttcgcatgagggaacaaccagaccagccgaagcattatgcgaggcattaagacctcgaaggagtgaaaccactcctccgaggcctcgggggctacacccggcgggtgcgctcgcgcgcacccaccggaacaaaatgcaaccgagaaaggctggtccccttgcaaaaaagtgcgacgaaagcctccaagcgagtgctaacactcccttcgaggctcgggggctactgtcggggaccataattaggggtatcctcaagactcctaattctcagctgggctcggactcgggctcagcccctgaagacggcgaactccgctccgcccgacccagggctcggactcgggctaagccccggaagacggcgaactccgctccgcccgacccagggctcggactcgggctaagccccggaagacggcgaactccgctccgcccgacccagggctcggactcgggctaa

SEQ ID NO: 31697 - DNA, 682 bp, Zea mays
  Peptide Sequence Number=SeqID_75072
atgggtttcgtggggtactgggaaaatgccctggttttctgaaaggcagaactcctcgaagtcctgggaggggggtctcctcggccgagccccgcaccccctcgcggcctagccgtggccggtcggcaccctaccgcgcccagctccggctggcgctgttggctgcctggccggccgtgcggctacgctggcgcatgagttgtcttggacccgtgactgcttggaggacccccgctgccgtgcggccgactcccggcgcccgtgtcccatcactcgtgcgggcatcctgtgcctgctgcgttgagaagtgcttgcgtgctgctacccgtcccacgggaagccgtgctcgatacacgttgccttcgtcgagctcaccccccggggtgcggctcgtcggctcgagagcgcccgcggcgtttgcctcgtgccgccgtcggcctatggccggcggcaccgaggacacctcgctggcgcttttggtctcggatgtggctcacgctgaaggccggagacgcgttggcgtcacgcgcccaagaatcggtccgcccgaacgaacgacgtccagcccggcacgacgcctccgcgcggaggccggcgctggcccgtctgcgaggacgtgctacctggttgatcctgccagtagtcatatgcttgtctcaaagattaagccatgcatgtgcaa

SEQ ID NO: 31698 - DNA, 249 bp, Zea mays
  Peptide Sequence Number=SeqID_75073
atggggaagcctgtcccatcagtcctcatgctcctcctcagccgagtgaccgcacttgtacccaccataaccggaatgggagaccacgtctcaggtcgcgtgaggggcaaagtctgcgggcaggttcaatcaggtatccgcacgttaatccttattctaattttgtctcgtagaccacgcatccccatggatccgtgtccacagaccaatcatcaatatgatgtgaatgtgggtacaaccaatttctga

SEQ ID NO: 31699 - DNA, 552 bp, Zea mays
  Peptide Sequence Number=SeqID_75074
atggcgcagagactcacccggtccacgtgcgccggcggggttccgaactccggcgagcgcgattgtgcctttccggtggcggaggtccctggttcaagctctggcaagcttcacggcctcctagggaagctacctaggggcttggatcgagcggaggagggcgggaaacagttcggccatggtggttgtcttcgggcggctctgacgggtcgcggagaggtcgccagagctatgggcgagctccgaggagttgggcgcgggacaggggatgcaacagggaagatggctaggcactggggcgggctttatagctgtggcgcgtgcgtggtcacaggcggccgcagacgcgtggggggaactcttatggacaccaaattccataagcatcaggtgattgaatgggaatatatgttgggtcagtctatcatggaaggcttaattgctaagtttcaggcatgtgacttatatgcgttcatgggacagatgactgactacagtgagatggcagtcaagcaatttattgcaactgcagagataaatattgaagattag

SEQ ID NO: 31700 - DNA, 501 bp, Zea mays
  Peptide Sequence Number=SeqID_75075
atgaagactctgacaactttctgtggataccatcccctagagatggtcatgcaccccttgggactcttccctgctgataaaaaggatgaccccatgtggtgtaaccgtgtgagccatgtgaaagatgtgtgggcaatgtatcctgacttggttgggagggtcactgttcagtgcatgagctttgtggtcgacttgtcctccgagttggtggaaaaggatttgcaggtggaaaggttgagccagcgcattaccaccttggagcagcatgtggagatccgagacaacactattgatgtcttggagaaccaactccacgatgtgcagcgggaactcgaagaagcaaatgaccacctggacatgcaccacttggaaatggaggccaatgaggccgaaagcgagggagaagaggctcccgaggagttaggaccagcccctagtgccaacgggactacctccgcgatgcccccttcacccgcatccagtgtcgcttccaccacttag

SEQ ID NO: 31701 - DNA, 462 bp, Zea mays
  Peptide Sequence Number=SeqID_75076
atgggcaagaacaacaagcgcaagcgtgagccgactcctccatcggaggagtttggtgactcagaatactcggaggaggagttctcctccgagcctgaggggtctccggctcccgtctctcccccggcgtcgtccgatgactcggacgactcccaggggatagccgcggaggtctggacatatattcgggccgtcgagcgcgccgggctcgaaggctcggatgagtcggagtgctcctcggatgaggaggactcggacggcggcgacgagggtgaagacgacgacgacgacaacgacgacggctggggtggcggcgacggcagcagggacagcaccaagggcagcagcaggggcagcaccaagggcggcggcggcggcagcagggacagcaccaagggcagcagcaggggcagcaccaaaggcggcggcggcggcaggggcaggggcagggccagtggctag

SEQ ID NO: 31702 - DNA, 522 bp, Zea mays
  Peptide Sequence Number=SeqID_75077
atgccgccgcgcatgagaaagaccgcgcgcaagtcaaccgggccgtttagcgtgccccgtcatcaacttgccccacaacatgaaggtagcagcagtggtggtaatgatccgatcggggatctagaagcacaagttgatcagcttcgagcagaacttcgacatcggaacgatctatgggttgtggatggcgaaagaatcaatgatttgaggacagaaatccgccacctgcaagaccagctagcggatcgggatctagcgctcgactgggctgtgaactctcgttcactagcctgggcaaaggaagctagagctcgagcccgcgtggaagagcatagctcagctgttgataacttgcagctctggcagaaaaagaaaaagagaaggaatgaacagtcttgggccgaaaccagcccaggcggcccaatccgcacagggaacagggacgcgcccgcgcgtgcacgtgcccgcgcacgcacgcgcccacacaactatcttgcaaaaacgccccgaggtcttaactaa

SEQ ID NO: 31703 - DNA, 651 bp, Zea mays
  Peptide Sequence Number=SeqID_75078
atggcgcctcctgttaacgtggtcggtccgtgccctatgttgggcgatgtggaggctcctctaaggtcgaggtcgagtctgtcttccgaggccgaggtcgagtccgagccctcgggtcgggcgaggcgaagaccgtcggctgaggccagggctgagtccgagccctggggtcgggcgaagcggagttcgtcgttcttcagggctgagcccgagtccgagccctggggtcgggcggagtggagttcatcgtcttccggggctgagcccgagtccgagccctggggtcgggcggagcggagttcgccgtcttccggggctgagcacgagtccgagccatggggtcgggcgaagcagagtttcccatggcgcctagggccgggcttggccgctgtcagcctcactctgtcgagtggcacagcagtcagagcggcacaggcggcgctgtccttttgtcagaccggtcagtggagcggcgaagccaccttcgcattaaatgtccctgcgatttggtcggttggcgtggcgatttggccaaggttgcttcttggtgaagactgggcttcgggtgagtcgaggctttgtgctaatgggtgttaccagctgagatttaggagccttgagggtacccctaattatggtccccaacagtag

SEQ ID NO: 31704 - DNA, 153 bp, Zea mays
  Peptide Sequence Number=SeqID_75079
atggagctctttcaacggccttcactttgtatttcagaaattagtgctcggttaccagcttatgctttagagatcagcattttggccttaggggttgaggattcattgggtgcaccggaggttcacccaatgggtgtagcccccgagctttga

SEQ ID NO: 31705 - DNA, 204 bp, Zea mays
  Peptide Sequence Number=SeqID_75080
atggggagtcatgatccccgggcaaaacgggaatcacggctcatgggtaaagtgtgcgacctctgcagaggagatacttcgatcagagatggttggtttacagatgatgacgaggatggttatgatcatgcttatggtaatggtaaacaaggcgtcgaggcggatctccaggagttccaggacgtcgacgagttcgaggattag

SEQ ID NO: 31706 - DNA, 219 bp, Zea mays
  Peptide Sequence Number=SeqID_75081
atggccactgcacgccctggccagcgagcggccacgcccgccccaaccggtgggctccttccccttactgctcgtccatggaagaactgtcgggcgctgctaccctgctccactggccgcatcaccgtcgcctggccatggccgccgacaccgacgtggtccacctcctggccagcaactaactcgcttgaatgccccttgcggtcgtcgtggtggtag

SEQ ID NO: 31707 - DNA, 335 bp, Zea mays
  Peptide Sequence Number=SeqID_75082
atgaccatggggaccctccaagttgcaacttttactgccctcttgttcagggttttcgttgcaggactagactgtttcggtccagtaaggtcgggatattcacacacaatacatctaacaatgatcatacgagtctgtggggtgctccacgttgctattgcaatcgctagctttgtcggtactctcttgcgatgtcagctgatagtatttttcttgtggacaggagatatgcctcgctatgatgatcgctatggaggcacgcgcttgtatgttggcagattggccccccgtactcgttctcgtgatttagaatatctcttcggcaaatatggaag

SEQ ID NO: 31708 - DNA, 792 bp, Zea mays
  Peptide Sequence Number=SeqID_75083
atggcgcctcctgtcgacgtggtcggtccgcgccctaggttgggcgatgtggaggctcctccgaggtcgaggtcgagtttgtcttccgtggccgtggtcgagtccgagcccctgggtcgggcgaggcagagaccgtcggctgaggccagggctgagtccgagccctggggtcgggcgaagcggagtttgtcgtcttctggggctgagcccaagtccgagccctggcccaagtccgagccctgggtcgggcggagcggagttcgccgtcttccggggcttagcccaagtctgagccctgggtcgggcggagcggagttcgtcgtcttcaggggctttagcccgagtccgagccctgggtcgggcggagcggagttcgccgtcttccggggccttagcccgagtccgagccctgggtcgggcggagcggagttcgccgtcttccggggccttagcccgagtccgagccctgggtcgggcggagcggagttcgccgtcttccggggccttagcccgagtctgagccctgggtcgggcggagcggagttcgccgtcttccggggctttagcccgagtccgagccctgggtcgggcggagcggagttcgccgtcttccggggccttagcccgagtacgagccctgggtcgggcggagcggagttcgctgtcttccggggccttagcccgagtccgagccctgggtcgggcggagcggagttcgccgtcttccggggctttagcccgagtccgagccctgggtcgggcggagcggagttcgccgtcttccggggctga

SEQ ID NO: 31709 - DNA, 696 bp, Zea mays
  Peptide Sequence Number=SeqID_75084
atgggcagcagatccctgccagttcctcgcaagaatctccggctccgagtcaaagtgccgacggtggactcgtgccggcggtggactcgggaagcctctcgtctgggtgtggcgcctcctctctcacctgtcccagagcatcagcagccgcaggcaaagacaagcgaagaagtgagcgaacggaccaagaaagaaccaatcgcgagaggtggcggcgtcggcggctgcgggggcgggaggatctcggcggtgagcacgaccgcgacagtggaggacgaggccgggaaggcgccgaacacggtgacgtcgcgaactcgctggcggtcaagagcgcccagagagtgctccgcccgcgcacgtcgcacgaccgcctgcaggagaaggacttgcaacggcggcggaggtgcgatggggcggatccgaggccatccgttgatggtaggagatccccttgatggcggcgcggatggcggcgacggcgtggggttcgacggggatggggcggagttacgggctggttgggctggcggggcgcaggaggatttccacgcgcgggggcgcgcgaggatgacggcagcgggggtcacgcgaatcacggcggcggtgtcgcgggtgcagactgcggaggcagaacagggggtgtgcacgcctacaataaggacatatagagtagtagagactagtacggtgtactag

SEQ ID NO: 31710 - DNA, 1308 bp, Zea mays
  Peptide Sequence Number=SeqID_75085
atggggagcgcccgcgttgctttcgtcttgctgctgttggaggagcacaacttcgcagaggttggcaccttccagccatcgctcggcttcaaggattttcatcaagcagcccggttgcatcccctcactaatggggagaaggcgctcaccggcctagcagaggaggcggacttcgacaacgcggggtcgatcggccgcaagcgtcgtcagctccagcatgcatggttcgctggctcagctggctctggcacagcttctggtgccacctccccccgctgggcggagtgtggctatctgcccgccgtacgggcagctgttgcgccgcgcgcaccgggggaccgcccaagacatcgcacgccgctagggctgcgttcgtgttcttgggttgtcctgcccttgctccggcacgacaccttcgcgcggaggttggagctcgcccgtccgggaggacttgagtggggatctgccggtgggcaggtggacgccaccgtcggtgctgaggtggtggcagccggagaaggtttctccgccgacgagatcgtcagcaccatctgcgctccgggcctccggctctctggctttaatatctggttctcgtcccccgcgaggggacacgaacgagagccttctagcggtagcgtttgccctgggaccatcgctgctgctgcagaggagtccctcagctcggtcggccttgccacccaaggcttctcttgctcagctaaagaaaccctcggccgctctgcgatgagtcggagccagaggcaacagtgtcagcgtggacagatgcggagtcggctcaagaagaagcttcgtcggcccaggagcaggagacttcccaggccaaggaggcgtagcagcggcggttggaacctggccaggtcgcccactggcgggaccaaccccggagtcgggcgcggtgctgacatcctccttcgaggtggagatcctccgaccgtgtcgctgtccgaggccgggtcggattctgccgaaggtggagtcgacgccgagagtgctgctgctccccctattgatgacttgtttgtcggtagcaaaatcgcttatccgagcgagagttacttatcgcggaaggtgatgagtgaggattctgttatcgatatagtcgagaaggcacgaaaaatcgtttcggcagaaaagttttcgagcattaagacttgttcggtcagcggaatcgcttatccgagcgtgagttacctatcgcagaaggtgatgagtgagagggggttcccccttctagcccccgagggagggtcgggctttgctgaggcaaggctgacccttccttga

SEQ ID NO: 31711 - DNA, 981 bp, Zea mays
  Peptide Sequence Number=SeqID_75086
atgcaggcggcatgcaactgcaccacggggatgcaccctttcgacttcgacgcatccagcatggcggcccaggcccacacgtcatgtaaccggcgcgccggttactacgtgcacaaaactgcaccgccacttacgccaatgtcatgccttctcgactgcggaacctgtgccgtgactcgaggcaaccctgcgcatgacccaacagtgccaaccaagcacatcggtcacaggtcagtcagccgcgagagaaggcgcgacggtcgatatggccaaaagtgggccggcagtaatggcggcagcaggcggcagaagcagcagtcaaattgtctgcaggctcacgtctcctcctggagcagcaggggagccctctcccacggcatgaagacgacgcacccatgttccgtccctcgaacggctcgcgcaacggctgccccgcgaaccactcgtcccgtctcattaactccgcggcagggcaggcgacacctttggcaggcgaagcgggcgacgcttcacctccgccatgatgaccgcgtcaaaaaagggaccaggaaaggggatactccgaaagggatccttctccgcgaaggaagcgggccccgagccctcctactgatcaggggttcgaaggctggcccctcggaagggctggcccctcagaagggttcgacagccgccttagagcactcgggctccgcgcccactactgatcaggggttcgaaggctggccccccgaagggttcgacagccgccccagaacacgtagagcgagggatgactctgggtacgtccgatacatggccgaggctcgggctacgctcccgagaggctcggaggctgctctcgcaaacccggctccggccaaaccgttgacagcgtcaacataccagcccgagaactcggaacctgaccatgcacccgggctacgatcagatcgcatgagggaacaaccagaccggccgaggcgccacgaaaggcactaa

SEQ ID NO: 31712 - DNA, 1870 bp, Zea mays
  Peptide Sequence Number=SeqID_75087
atgcaggcgacatgcaaccgcgccaagtggacacgcttctccgactcccaacgcgccagcatggaggcccaggcccacgcgtcacgcaaccggcgcgccggatgctgcatgcaggcaactgccccgccacatgcgccatcgtcgcgcctcttcggttgcggagccaatgccgcgactcgaggcgacccagcgcacgacccagcgacgccagcctggcgcgacggtcaatacggccaaaagtgggccggcagtaatgacggtggcaggcgggcgggagaagcggtcacgtcgtcagccagtctcacgtcccatccaggggccggccccccgaagggttccacggccgcctcaggctactcgggctccgcgcccattactgatcaggggttcgaaggctggccccaaagggttcacagtcacctcagacaccgagcgagggatgaccaggggtacgttcgatacataaccaaggctcgggctgcgctcccgagggctcggactcgggctaagccccggaagacggtgaactccgctccgcccgacctagggctcggactcgggctaagcctcggaagacgacgaactccgctccgcccgaccccagggctcggactccgccctggcctctgccgaacgacctccgtctcgcccgacccaggggctcgggctcggcctcggcaacggaagacagactcgaccccagcttcggaggagcccccacatcgcccggcctcgggcgcgggcccgccacgtcaacagggagcgccatcatcaccctaccccgagccgactcgggccgcagagaacaagaccgggggacgtcagcaaggactcgaccgctccgacagctgtccctctgccaagctccgttgcgcctccgacagccacgacatcacactagcagggtgccaagatctctccggctgccacattggcatggccttcttagagaaggttggccgtgcgggaccgaggacgggacaggcgctctcttggggccgctcgcttccctcacccgcgtggacgcttgtaaccccctactgcaagcgcacccgacctgggcgcgggacgaacacgaaggccgcaggatttccactcctctctcacgcccgtctccggccacgtcgctttccccccttcgcgctcgcccacgcgctcgacccatctgggctggggcacgcggcacactcactcatcggctcagggacccccggtctcgaaacgccgacaagtgtcgtgggcgagccgagcacggaggggcgttttgggcatttttcgggggcgttttgggcatttttcgggtactttgtgcgaaggaaggatgtccagtgccgtgggcgagccgagtacggagggacgttttgggcatttttcgggtactttgtgcggaggaaggatgtacagtgccgtgggcgagccgagcacagaggggcgttttgggcattttttgggtactttgtgccgaggaaggatgtccagtgtcgggggcgagccgagcacggagggacgttttgggaatttttcgggtactttgtgcggaggaaggatgtacagcgccgtgggcgagccgagcacggaggggcgttttgggcatttttcgggtactttgtgcggaggaaggatgtccagtgccgtgggcgagtcgagcacggaggggcgttttgggcatttttcgggtactttgtgcggaggaaggatgttcagtgtcgttggcgagccgagcacggaggggcgtttttcgggtactttgtgcggaggaaggatgtccagtgccgtgggcgagccgagcacggaagggcgttttgggcatttttcgggtactttgtgcggaagaaagatgttcagtgccgtgggagagccgagcacggag

SEQ ID NO: 31713 - DNA, 939 bp, Zea mays
  Peptide Sequence Number=SeqID_75088
atgggcgtcgaacatggtgtctccggtgagctgcaagcggggcccacgcgatctgaggcggctgttgaacccttcggggggccagccttcgaacctctgatcagtaaggaggctcggagcctggttccttcacggggaaggatccctttcgggccgttgcgcgtgcgcgagccgttcgaggaacggatcacgggcgcgttgtcttcacgccgtgagagggggttctcttgctgccccggatgggacgtgagcttggctgacgaccatccggcgcgccagttgcgcgacgcgtgggcctgggcctccatgctggtgtgtcgggagttggagaagtgcgtccacttggcgcggttgcatgccgcctacatggctgcccgcccctttcgcccgttggtctgggcaaaagtggagggtcacttcccggccgcacccctccaccggcggtcacccaagatggtgacctccagcttgatggtgggggaaagcgagctgggctgcggcctctgcccctccctcaacctcaaggattttcatcaccagggctggggaggggagtgtgccgagttgagcgtgcctggcttttggacgcgagtggcttcggggccgctcgcggcgccggcgtctgccacggcagccggaagaggttcttccgccggcgtgatagccaaggctggccacggaccgacctccaactctacggccttctgcccgtccttgccttatgagttttggcatgggcgggggcctcctggcagcagcatccgccctgaggtcagtgccgccgctgttcggccccccggagcagaagtcgtcgtcgtcgccgctgctggagcaggtgatggcgcgccgttcgtcggtcttccgttgctccgcaggccttcccccatggagtggggttgttcgtacctgcggaggggggaaccggagttccgtttgtaa

SEQ ID NO: 31714 - DNA, 678 bp, Zea mays
  Peptide Sequence Number=SeqID_75089
atgggtgaccgttctcgtgttaaattaccttttatttgttttaatgggcgtttttcgggggcgtttttcgggtactttgtgcggaggaaggatgtccagtgccgtgggcgagccgagcacggaggggcgtttttcgggtactttgtgcggaggaaggatgtccagtgccgtgggcgagccgagcacggaggggcgtttttcgggtactttgtgcggaggaaggatgtccagtgccgtgggcgagccgagcacggaggggcgtttttcgggtactttgtgcggaggaaggatgtccagtgccgtgggcgagccgagcacggaggggcgtttttcgggtactttgtgcggaggatggatgtccagtgccgtgggcgagccgagcacggagtggcgtttttcgggtactttgtgcggaggaaggatgtccagtgccgtgggcgagccgagcacggaggggcgtttttcgggtactttgtgcggaggaaggatgtccagtgccgtgggcgagccgagcacggaggggcgtttttcgggtactttgtgcggaggaaggatgtccagtgccgtgggcgagccgagcacggaggtgtgggcataagaggaaggaggacgcaggatatgacggatgcgatcataccagcactaaagcaccggatcccatcagaactccgaagttaa

SEQ ID NO: 31715 - DNA, 1493 bp, Zea mays
  Peptide Sequence Number=SeqID_75090
gagcgtttttcgggtactttgtgcggagaaaggatgtccagtgccgtgggcgagctgagcacggaggggcgtttttcgggtactttgggcggaggaaggatgtccagtgccgtgggcgagccgagcacggaggggcgtttttcgggtactttgtgcggaggaaggatgtccagtgccgtgggcgagccgagcacggaggggcgtttttcgggtactttgtgcggaggaaggatgtccagtgccgtgggcgagccgagcacggaggggcgtttttcgggtactttgtgcggaggaaggatgtccagtgccgtgggcgagccgagcacggaggggcgtttttcgggtactttgtgcggaggaaggatgtccagtgtcgtgggcgagccgagcacggaggggcgtttttcggttactttgtgcggaggaaggatgtccagtgccgtgggcgagccgagcacggaggggcgtttttcgggtactttgtgcggaggaaggatgtccagtgtcgtgggcgatccgagcacggaggggcgtttttcgggtactttgtgcggaggaaggatgtccagtgccgtgggcgagccgagcacggagtggcgtttttcgggtactttgtgcggaggaaggatgtccagtgccgtgggcgagccgagcacggaggggcgtttttcgggtactttgtgcggaggaaggatgtccagtgccgtgggcgagccgagcacggaggggcgtttttcgagtactttgtgcggaggaaggatgtccagtgccgtgggcgagccgagcacggagtggcgtttttcgggtactttgtgcggaggaaggatgtccagtgctgtcggcgtttcgagacaggggggtccctaagccgacgagcagggcgacgtggggtttcctccgaagccgaggttgagtcttgccttcagttgccgtggccgagcccgagccagggggtcgggcgaggcggaagtcgtccggccgaggccagggcggagtccgagccctggggtcgggcgaggcggagtttcgtcgtcttccgggtcttagcccgagtccgagccctggggtcgggcggagcggagttcgccgtcttccgggtcttagcccgagtccgagccctggggtcgggcggagcggagttcgccgtcttccgggtcttagcccgagtccgagccctggggtcgggcggagcggagttcgccgtcttccgggtcctagcccgagtccgagccctggggtcgggcggagcggagttcgccgtcttccaggtctttgcccgagtccgagccctggggtcgggcggagcggagttcgccgtcttccgggtctttgcccgagtccgagccctggggtcgggcggagcggagttcgccgtggcgcctttggcaaggcctaattgcctgtcagactcactctgtcgagtggcactgcagtcggagtggcgcaggcggcgctgtccttctgtcagactggccagtggcgcggtggagtga

SEQ ID NO: 31716 - DNA, 961 bp, Zea mays
  Peptide Sequence Number=SeqID_75091
atggcgctcggcacccagtgtctctgctcacccttggcgaccgaacaggggcgtttttcgggtactttgtgcggaggaaggatgtccagtgccgtgggcgagccgagcacggaggggcattttttcgggtactttgtgcggaggaaggatgtccagtgccatgggcgagccgagcacggaggtgtggacataagaggaaggaggacgcaggatatgacagatgcgatcataccagcactaaagcaccggatcccatcagaactccgaagggggtttttcgggtactttgtgcggaggaaggatgtccagtgccgtgggcgagccgagcacggaggggcgtttttcgggtactttgtgcggaggaaggatgtccagtgccgtgggcgagccgagcacggaggggcgtttttcgggtactttgtgcggaggaaggatgtccagtgccgtgggcgagccgagcacggaggggcgtttttcgggtactttgtgcggaggaaggatgtccagtgctgtgggcgagccgagcacggaggggcgtttttcgggtactttgtgcggaggaaggatgtccagtgccgtgggcgagccgagcacggaggggcgtttttcgggtactttgtgcggaggaaggatgtccagtgccgtgggcgagccgagcacggaggtgtggacataagaggaaggaggacgcaggatatgacggatgcgatcataccagcactaaagcaccggatcccatcagaactccgaagggcgtttttcgggtactttgtgcggaggaaggacgtccagtgccgtgggcgagccgagcacggagggcgtttttcgggtactttgtgcggaggaaggatgtccagtgccgtgggcgagccgagcacggagggtcttttttcgagtacatttgtgcagctttactatgttccgtgccgtggatgcccctactactacgtgtggtcttcga

SEQ ID NO: 31717 - DNA, 477 bp, Zea mays
  Peptide Sequence Number=SeqID_75092
atgcccgcttcgcccgagcccatctcgggtgagagggacaagacttgtggcaagcctcccaaaggccactgggggacagtcatattcaatgctcgtacctaccccatgcagggctgctcggtcgcgacctcgagcggaccttcgcctcgcccgagcctggttctgccctcgatatctgtgacagaggacgcccccagcgtcatcagatacagtgaagctgacacattccttaagaaactttttcccatactaagcactgtgtcaaccactacggtatgggcaacccctccccagggggctcagaacatcttccaccactaccatccaccacttctacgcaaagcacgtggcatgcaaatagagacgaaggaatcatggatttggggtaaaggacaaacgttaaatattagtgatgacaatgaagacctgattcctcacgtgaagatcttttatgggagaaagatgagaataatttaa

SEQ ID NO: 31718 - DNA, 393 bp, Zea mays
  Peptide Sequence Number=SeqID_75093
atggaggggaatcagcagccagagaagtgttgggacaagatgtcaagagatgaagccctcgagatcccgactactgacttcattaagttagacaccctgttcttcggcatcgtcccgactgaaggagagtactcgttggggcacctcttcatgctggagtggcagagtgctaccaggggccatccagatggctctcatcatcggtccctcggtggtaccacaacacctgatgacgaacgtcaaaatatcaccatgggtagacctcacgatctcggtgaaaaagcaatctcgtccactaccatgtggtcggttgaagaaaccaagaaagccaatcttggcttcttggatgaacacaagacgatgatcatcaactccagcctcaccgccaaatag

SEQ ID NO: 31719 - DNA, 1095 bp, Zea mays
  Peptide Sequence Number=SeqID_75094
atggggggcgcggagcccggttccttcgcggagaaggatccctctcgggcaactggcgtgccagttgctcgacgcgtgggcctgggccccaggctggcgtgtcagaagttggagaagcgcgtccatctggcgcggttgcatgccgcctgcatggctgctcgccccttctgtccgttggtctgggcggaaatggggggtcgcctcgccgggtcttcccgtcttccaagcccccggatgggggatatccgccgcctttccgcctcctcgttgaaggaacgcaactccatgggagttggtacctctcagccatcgttcggcttcaaggattttcatcatccagcctggccataccccgccaccggcggtcacccaagatggccaagatggaagatgaggcgagtcggggagccgcctccgcgtgggtcggctgcccctttcttccccctgcgcccgggggtgaagggcgtccttgagccccacggagacttcctccagccatgccaggatatgcggggcgctaggggccctgggcccccgtttccttgcctgaatggctggttctcgtcctcagtgggggggagcccttccgccgtgacacctcccctaaagctgctgcctaagctgcttcgctgtctggggcaggggtggtggccatcgcgggacccctcggccgccctttggtggatcaaggccgggggtagcgatatcagtatgaacagaggcggagttggctcgagaatggggaacctggtcggccggagcctagccgtgtcgcccgtcagcggtgccgacgcccaagtcggtcagtcgaggcctcggatcgggctagcgcccttggaagccggttgcccgaggccccaagggagcccctggacctcggcgccgcccgaggctgggtcgggctttgctgtagacgtcgtcgatgccgagggtgctacggctcccttcggcgtgaagacccgagcctgcaggatcagatcatcttgtagtgtgcgctttctgcggccgccgaggccagaagaacacgccctcgccgcgcttgcgaagctgcgtctttttttcctcttgtttcgagcatctggactctgtcggtaa

SEQ ID NO: 31720 - DNA, 1428 bp, Zea mays
  Peptide Sequence Number=SeqID_75095
atgggtgaccgttctcgtgttaaattaccttttatttgttttaaggggcgtttttcgggggcgtttttcgggtactttgtgcggaggaaggatgtccagtgtcgtgggcgagccgagcacggaggggcgtttttcgggtactttgtgcggaggaaggatgtccagtgccgtgggcgagccgagcacggaggtgtgggcataagaggggcgtttttcgggtactttgtgcggaggaaggatgtccagtgccgtgggcgagccgagcacggaggggcgtttttcgggtactttgtgcggaggaaggatgtccagtgccgtgggcgagccgagcacggaggggcgtttttcgggtactttgtgcagaggatggatgtccagtgccgtgggcgagccgagcacggaggggcgtttttcgggtactttgtgcggaggaaggatgtccagtgccgtgggcgagccgagcacggaggggcgtttttcgggtactttgtgcggaggaaggatgtccagtgccgtgggcgagccgagcacggaggggcgtttttcgggtactttgtgcggaggaaggatgtccagtgccgtgggcgaaccgagcacggaggggcgtttttcgggtactttgtgcggaggaaggatgtccagtgccgtgggcgagccgagcacggaggggcgtttttcgggtactttatgcggaggaaggatgtccagtgccgtgggcgagccgagcacggaggggcgtttttcgggtactttgtgcggaggaaaggatgtcccatgccgtgggcgagccgagcacggaggggcgttttgggcatttttgggtacttcgtgcggaggaaggatgttcagtgccgtgggcgagccgagcacagaggggcgtattgggcatttttcgggtaccttgtgcggaggaaggatgttcagtgccgtgggcgagccgagcacggaggggcgttttgggtatttttcgggtactttgtgcggaggaaggatgttcagtgccgtgggcaaaccgagcacggaggggcattttgggtatttttcgggtactttgtgcggaggaaggatgttcagtgccgtgggcgagccgagcacggaggggcgttttgggcatttttcgggtactttgtgcggaggaaggatgttcagtgccgtgggcgagccgagcacggaggtgtggacataagaggaaggaggacgcaagatatgacggatgcgatcatactagcactaaagcaccggatctcatcagaactccgaggggtgttttgggcattttttgggtactttgtgcggaggaaggatgttcagtgccgtgggcgagccaagcacggaggtgtgggcataagaggaaggaggacacatgatatgactgatgcgatcataccagcactaaagcaacggatctcatcagagctccgaagttaa

SEQ ID NO: 31721 - DNA, 1026 bp, Zea mays
  Peptide Sequence Number=SeqID_75096
atggtgtcaccggcgccgggatgtagggattcgggggaggatggcggcaaggcggagtggctgatctacgcctttgtcgcgcgcggcatcgcggtgctggcggagtacacggaattcaccggcaacttccccgccatcgccgcacagtgcctgcagcgtctacccgccgggtcgtcctccgccagcaccgggcctgacggccgcggcggcgcgccggtacggttcagctatgcatgcgacgggcacacattcaacttcctcctgcaccgaggctacgcctattgtgtagttgcgaaggaatccgttccaaagaatgtctcagtggcatttcttgagaggttaaaggatgacttcatgaagagatatggtggcggtaaagctgatacagctcttgcaaaaagtctaaataaagaatatggaccagttataaagcagcacattcagtatgttcttgatcattcacaggaactagataaaacgttaaaagtgcaggcccaagtttcagaagttaaaaatatcatgttaaacaacatagaaaagactttggaccgcggagaaaagttgagtgaactccaagacaagacttctgatctacatagtcaggcccaggagttcaagaaacagggggtgaagattcgtcggaagacatggctgcagaacgtgaaaattaagttgtctgggtatctgtttgtcaaggctttgactgcaccaagcatgaaacatagtagtaataagaatggtgcagcacgactgtggcagagctgcgatggatgcgagtttgtgctggtgaggtcaagtgtgtacccacatatgctttggctctcaagttcgattccaccagacaagtatcacggtacaaatgtaaacgacatatatgatacaaaaagcattacgggagaaggtggctccttgaacatgttagcacaagctagcagaaactgtaaatccaggttctctgatcactataatgctattgttggacctattgttttatcaaatgagcctttatggtcacttcaagagtag

SEQ ID NO: 31722 - DNA, 996 bp, Zea mays
  Peptide Sequence Number=SeqID_75097
atggcgggcccgtccggcgcctcttcctcctcgcgcggcgccggcgtcgtcgtcgaccgcttctacagcccgccccacgtgcgccgccagcagcaggaggagcagctgcagcggctcaagggcctggcccaggggcagcgcccgtcgtccccagcggcggggacgctcacgcccagggccgccaagcagaagacgccaccggctgagatgcctgtcccggtcaaggagtccgagaggcgggccgacgcgtcctccaagcccgtgtcagccccggcctacaccgccaaggcggctgcgacggctgacggggtgacgaccccgccgccgtcgcccgcgggactggatgaggctgggaatctcgacaggttcctcagctccaccacgccatctgtgcccgtgcactacttgcccaagaccagcatgaggggatggaggatgggtgatgttacaaattctcgaccatatttctgccttggagatctctgggaggctttcaaggagtggagcttttacggggctggtgtcccccttgtcttaagtggaggtgaatctgtgattcaatactatgtgccatacctttccgctatacagctgtacgcagacccttcaaagtttcaatcgaagatcaggcccattgccggaagctcccacagtggggtcttgggaagggataaaccgaggcacgccttttcgtcgcaaatgcggataggctgcttcgaacccgcgacatggtaccctatctatagaatcccaactggaccaacactcaaggatttggatgcatgtttcttgacatttcattacttatcaacacctaccaagggtatgtttcatcttctgctgatactgatcccagtacaccagcatgccccagatttgggggccttaattgcaatatggacgccgctgacagcagatgactggcttcgccatcgccaagtgtaccacccagacttccgattctttcttacccattacaacacagcattgagatga

SEQ ID NO: 31723 - DNA, 480 bp, Zea mays
  Peptide Sequence Number=SeqID_75098
atgtcttcttcttctgatagtgaaagggactcaagtgattcagaagatgacttgagagttcttcaagttattattgggaaccaaaaaaatattgtggctgctacatctcttttatcatggtactatgcatcatatgttggtacatacaaccaaaggaccctaatttccgtacagtgcatagaagaattagcaacgatcaaagaatgtggcctcactttaagggttgtatttgtgacagaacctcccaagtcattaggcccacctacagttgtccttgtccaacggacctcagacaaccctgcaggtgcccctgaatcacttgacaagtttggtatctgtattccttacctttcccaagagcgttttacccgtcacaataaaagactctcaaggatatgctggcctttgggaatcaaggtcagtgaccaagtcttcatgtccgcgaagttacgacaatctgaatcgattatactcagctga

SEQ ID NO: 31724 - DNA, 138 bp, Zea mays
  Peptide Sequence Number=SeqID_75099
atggccccgacgtcatggactgccggcgggaaatttgctattttgtcactctcagttgtgaacttctctattttagacccagacccacaaatcatagacacagatggtcccacaagtcatagacagagggtcacataa

SEQ ID NO: 31725 - DNA, 432 bp, Zea mays
  Peptide Sequence Number=SeqID_75100
atgggcaagaaacgcaagcgcgagccaactcctccgtctgaggattttggtgactcggagtattcagaggaggagttctcctctgaatccgaggggtctccggctcccatccccctgcgtgagtcgtctgacgactcagacgactcccaggggctcgcggcggaggtctgtacgtatatccgggccgtcgagcgctccgggctcgagggctcggacgagtcggagtactcctcggatgaggaggactcggacggcggtggcgaggacgaggacggcgacgacgacgacgacgacgacgaaggctgtggcggcggtgacggtgacggcagcggcaggggcggcagcagcggcagcaaggaaggtgatggcggcggcagcaggggcagcaacaggggcggcagcggcggcggcagcaacagggccagtggctag

SEQ ID NO: 31726 - DNA, 438 bp, Zea mays
  Peptide Sequence Number=SeqID_75101
atgggcaagaacaagaaaggcagcagctcttcgcatcactcgggcgacaagcgcaagcgcgagccgactcctccttcggaggacttagcgactcggaatactcggaggagaagttctcctccgagtccgagggttctccggctcccgcctctccccccggcgttgtctgatgattcagacgactcccaggggatcgccgcggaggtgtggacctacatccgggccatcgagcgtgccgggctcgagggctcggatgagtcggagtactcctcggacgaggagaatccctccgactcgtccgaggagggcagcggcggcgacggtggtgacggcgacgacgacggaggcgacggtgacggcggcggcaacagcggcaagggcggacgcgacagcagcggcggcggcagcagcaggggcagcaacaaggccagtggctaa

SEQ ID NO: 31727 - DNA, 120 bp, Zea mays
  Peptide Sequence Number=SeqID_75102
atggcgcaccggacagtccggtgcgccaccgggaaggcactgccgtggaccagcctggccccacctggcagagggtgcaccggacagtccggtgcacaccggacagtccggtgcccctaa

SEQ ID NO: 31728 - DNA, 2376 bp, Zea mays
  Peptide Sequence Number=SeqID_75103
atggagaagtgcaaaccaatcaagacccccatgcctacaaatggacatctcgacttagatgagggagtggcgatttcccccccgccggcgatctccaccggcggccaccgtcttcgactgtgctccggcgacaccgagcccctctccttccctccctcgtgcccttgtttgaccgtgtgccgtctcccgttccgcctggatcgtcacctctcgtgtgagctttccagacatcagatcaggatgccgcgcacgaagaatgcgtcggcgtcagggggtggcgatgatgaggaccctcgtcgcccattcaggcaggtcaagggcaagactgtgtatttggagcagcaagaaggccgcaagaagcggcgtacggacagagaggcccgtgcagcggcagtagctgcagcagccgctgcgcaggctgcacttggagatcagccgcagattccatccgatcagattgcattccgtgctcgtcgtctcacctcccggtctcgctcctcctctcacacctccacttccactccgccacccactctgcctgctcccgtcactcctattgctccatccacctccacagccatacccactacctcctctacgccagcttccactgcttcccctgctcccgctcccgcttcagctcctcctgtccctccacctcgcttctgggagcgtgatgagactgaggtccgtcctctggttttggatcctcgtctgtttgatcttcagcgtgctactgcagcacgggtacgtcggttcaggtacgtacccgtggagtcttggctacctactcagagagacccagcagcaggtgttcttttcagcacacggattcaggagtcattcttcagagctcagatgtctgctcagatagcgctgcgagtgcaccgcctcttggatcttccagcttttctgcttgcagccggtgctgagtctgaggcgcatctcacctatctgcctggcctcctgacccttctgactctcagcggcagatatgttgaggagtgggtccgcgtcttctacgcctccgtttggattgacccggatcatcactggatgaggttccgctttgagcgagaggatgtcacgatcactgccagtcagatccgacagctctttggattcccagaatcgacgactcgccttcacagtctctgctacggctcttctgaccctccgcgtcgccctcacggcggtgtggctccagggacagctcacgtcgcggctctgttccgcccgcctttcacagatgggtcacgacgttctccagcagactttactacagcagcgaagtacttatatgagctcatcagacggacactcctgccgaggatgggatacagggaggctaccactcatattcagctttggctccttggtgccctggtatcccactctgagtttgatgttgtggactttctgatctgtgagatcgaggacaccgttctggatgggattcgtgctcgtcggcagctaccttatgctcactacttgtgccacatctttgcgcagctgattcagccacctcgatttcagagcactcttgaggcctcacgccttgtatttggatattaccgtcctgctcctgagattcctgtgccagctactgcttctgtgtttgactctcaggccgaggatgcagctcttcgacagcttgacacccagggtacaacagctgatgatgatgatgatgatgatgatgatgatgattttggggttcctcctctgcctccacgctcacatgatcatgaggctgggagttctagtgctgcccctcctcatcctcaggctatggaccctgctcttgcttcgattctccagactctcacccagcagcaggctcacctggcagccgagcaggcccgtttatccgacaggatgctctcgatgtttcagaacatgcaggacaggcaggatgcgcttcagcagcagctacttcaggatcgggctgagagtagggcattcatggctctcatgctacagcagtctggtgtctcagtacctccggttcagtctgctccacctcctccgcttcacgctccagtggtgccatcgattttgtcaggaccccctgttggtacctctccgctccggccggtcactttggcgttcacctctccggttctcagctctgtctgtccgcagccgccagtgccaccagcatctgctgttaccactaccgctgtggcagtatctgtgaccgcttctgttctggtagctcctgcagcgcggcctccgtccgagtcagtaccagctccagcttctaccgcagatcctggatccgagactgactctgaccctccatcggcgttcgctctgctacctcgacctcgaccggatgcgcccccgccgcctcctcctgcttcaggcgtttag

SEQ ID NO: 31729 - DNA, 612 bp, Zea mays
  Peptide Sequence Number=SeqID_75104
atggctatcacctcccgcgcgctcgtcggcaagccggcggctggcacgagggacgtcttcggcgagggccgcatcaccatgcgcaagaccgccgccaagcccaagccggcggcgtccggcagcccatggtacggtgccgaccgcgtcctgtacctgggcccgctgtccggctcgcccccgagctacctgacaggcgagttccccggcgactacgggtgggacaccgcggggctgtcggcggacccggagaccttcgccaagaaccgcgagctggaggtgatccactgccgctggggccatgctcggcgcgctcgggtgcgtgttcccggagctgctcgcccgcaacggcgtcaagttcggcgaggcggtgtggttcaagggcgggctcccagatcttcagcgagggcggggctcgactacctcggcaacccgagcctggtccacgcgcagagcatcctggccatctgggcgtgcccaggtggtgctcatgggcgccgtcgaggggctatcgtcaccggcaagggccccctcgagaacctcgccgaccacatcgccgaccccgtcaacaacaacgcctgggcttacgccaccaacttcgtccccggcaagtga

SEQ ID NO: 31730 - DNA, 810 bp, Zea mays
  Peptide Sequence Number=SeqID_75105
atgggggcccaggcccacacgtcatgtaaccggcgcgccggttactacatgcgggaaactgcaccgccacttgcgccaataccgcgccttctcgactgcggaaccagtgccacgactcgaggcgaccctgcgcatggcccaacagtgccaaccgagcacatcgatcacggggaccgggaaaggggatactccaaaagggatccttctccgcgaaggaagcgggccccgagccccctactgatcagaggttcgaaggctggcccctcggaagggttcgacagccgcctcagagcactcgggctccaagccctcctactgatcagaggttcgaaggctggcccatcggaagggttcgacagccgcctcagagcactcgggctccgcgcccaccactggtcagaggttcgaaggctggcccctcggatgggttcgacagccgcctcaagccactcgggctccgcgcccactactgatcaggggttcgtaggctggcccccgaagggttcgacagccgcctcagagcacgtagagcgagggatgactctaggtacgtctgatacatggccgaggctcgggctacgctcccgaggtaccctaggacatttccgagaccagcaggagcgattctgtaacggaatcccatctgagcgcgcctctgggccactagccgacccttatcgaatggggcacgggcgtccactcggatcactcgttagcaactcactggagacaccatgttcggcgtcctccgagggcagcatggcgctttcccccctcctccttgcggaaaggcgacgcaggggcgtatga

SEQ ID NO: 31731 - DNA, 105 bp, Zea mays
  Peptide Sequence Number=SeqID_75106
atgtcgatcagatcgcagctgcttctgatgctctgcgttgtgtatgcagttgtccaccaatggacctactgcaaaaagtgctcctccacccgcgtgcctgtataa

SEQ ID NO: 31732 - DNA, 2313 bp, Zea mays
  Peptide Sequence Number=SeqID_75107
atgtcgaccgtcgcgggaagaaacccggcggcagagactggagacgaccccgcgccggcggccgccccatcctctgagaagaggaagctaggtactgctacgggaggactgggggtctccgatagttttgctatggagttgatggagacatgcgcggcccccgggggaaggatgtcttcgcccgagctccgggagtcttcggcgtggatgctgaaggttaccgggggttggtggcctaagaacgttcctatcccccgcgcggccggcgaagacttttttacatctcgcatggttcgtgacttgagagtgtttccttatggacggaatattgctgctgttgtgtcggcagtgatggataaggatcgtcaggaagctgcgcaaaaacgccgggcggtcatcaggctgcccgaggctaggccgaagagggcacgggggaccgcgagggctgcagccctcggcggtagccagccgacgctggcggcgaagtcggccggccctgggtccagcaaggtgccggatgtcgtgaaggcagccggcgccggcagagccaagtctacctcgaccggagccgcgaaggcccgagaattgcctccgccgggaaagcgcattgccgatttcggcactgatattagtgtggatgattatctcactggatcgggtgaagggcaacttgttgttgtttcgcctgcggtggcgacaacggtgtctgccacagtgcctggggcgaagggtggcgctctcagcgctggcggtgagatttcggcgctcgctgccgtcaaggacgaggcgggcgatgtgtcccgccggctgaaggaggcgtcgcagcggctaagtcaggcggctgacttcgctgaccgcgtggcgtcgggggcccttacggcagttgtgtctgccgaagtcgagagacttcgggcgcagcatgctgaggccgtccgggaaaagtcggccgccgatagcaagtgccgcaaactggcgaagaaggtggccgcgctggagagcgagaggactgagctccggcgccagctgacggaggagaggagggaagctaatcaggccctcgccaaggcgcagtctgcgcaggcggatgccaatgtggcgcgggtggagggtagcctcgccaggcaacgcgccgaggaatgggaggagcggttcaacgctctgcaggcccgcatggggagggccgaggcttctacgcgcttggaagttgagcggacgcgcaagcagcttatggactcataccacgagctgggcgcgcggaccgctgacttcgaagtgcctgaccgagagtcaggccttcgttgcctcgagtggctgcaagaggagttgctggcgctcccgaccattgtggagggatttatgtcctatgcctccctggtcacctgcgaaggggcgatgaacgcgctgtcccgcgaagggtgccgtcactatgaggtcttcgaccgatctgatgaggatttcgagcgcgagatttacaaggttgaggaccctatggtgaaggaatctgcgggagccctctttgatcggatgtggggcccccacggtcgagaggtggtcagggagcggtccgacacgacgaggggtcagccggcgcgtgacgagaaagtggaggacttcgaggctttgaacagcgcgcggcctgaggcggagtcgaacccggtggcggctgggcccgaggtcgccccggcgccgcccccagaaaccatcgaaggctccctcgatgcccctgcagccattgcggccggtggtggctcgtcgccaaccgctgtgccgaaggctgaggatcccccgaagacggcgacggagctggcagcggaggatcccacggcggctgggtcttcgcaggttcaagattttgggcctgcgcacgcaaccgctactgctaattttttggcggcttcgaccgtggatgctgggaatgaatcggatgagtctgcgtctaagttttctgattttggtgactctgggagttcggttgagtggacggaagagtcgtcggatgaggacttggattactttgtggccttggatgtggcagcggcggaggcttcgccacgtgctgcggatgctgaagttgtgcctggtccaagtgctgggcgtaagcggcgaagggcggttgcgaagcgtagagtgagtgaggcggacggcggtcggcttcgtgtgggcagggctggcaagcaggaactgttgtcctcgccggtcgttgcgagtgtaggtgagggggagctgcgaagtctttttgagggtgaggagctgaggataatgctatttaactatagggagatgggaatcattccgaaggttgaaccgatgtaa

SEQ ID NO: 31733 - DNA, 1092 bp, Zea mays
  Peptide Sequence Number=SeqID_75108
atggctatcacctcccgcgcgctcgtcggcaagccggcggctggcacgagggacgtcttcggcgagggccgcatcaccatgcgcaagaccgccgccaagcccaagccggcggcgtccggcagcccatggtacggtgccgaccgcgtcctgtacctgggcccgctgtccggctcgcccccgagctacctgaccggcgagttccccggcgactacgggtgggacaccgcggggctgtcggcggacccggagaccttcgccaagaaccgcgagctggaggtgatccactgccgctgggccatgctcggcgcgctcgggtgcgtgttcccggagctgctcgcccgcaacggcgtcaagttcggcgaggcggtgtggttcaaggcgggctcccagatcttcagcgagggcgggctggactacctcggcaacccgagcctggtccacgcgcagagcatcctggccatctgggcgtgccaggtggtgctcatgggcgccgtcgaggggtaccgcgtcgccggcggcccgctcggggaggtggtcgacccgctgtaccctggcggcagcttcgacccgctcgggctcgccgacgacccggaggcgttcgccgagctcaaggtgaaggagatcaagaacggccgcctcgccatgttctccatgttcggcttcttcgtgcaggctatcgtcaccggcaagggccccctcgagaacctcgccgaccacatcgccgaccccgtcaacaacaacgcctgggcttacgccaccaacttcgtccccggcaaagccttcttcaggagtcctgatgggtttgctttgtggaccttgtattttgattgtgttattgttaggaataaggtctttggtgaaaggaaaggggccaaagctggtagagagcccaaagtgaagcaaagcttcggtgcctccgaggtcgcgcttcataaaagggggagaagcaataacacggtggtactggctaaatcattcatcatggttgtaagagacatagctcgaaactggaaggcagacgggtcttctacagcttcttgcgtctctactgctgacgggagggaagagagcggatctggtgatccgtggtaa

SEQ ID NO: 31734 - DNA, 1779 bp, Zea mays
  Peptide Sequence Number=SeqID_75109
atggcgacatcaactagcaaatcccaacctctgctcttgaatagagcatgtatgtggatacttctgggcaagttacctgatggaaattgtaagatgtctagggattcgattcttgtagcggagcttccatctgcatactctcgttttagttggcaaggcctctctccacgagatctcctttgctcattttgtcgccttcagaggttgccagagccccattttgctgtcagtagggtctcctgtgatacattaatgtcagctttgagctctaaagaaagaggagcgccagcaggcagcgcagaaaatcagtacaccaatgatgtcaggatcaacaaggaaaaaccagatctttttaaatgtgaagtgaacatacgttcacggaagcaagaaattttactagagtattctgcagctgacacttggagcaaggaatctgatgctattcagaattcttcattgaaggtcttgatttggttcaataattattttaagaaactaacctcaaaaacaggcaagctatatctttctgagtctactgctgatgtcaaggtacattcaaatatttttcttcaagagtttgcaatgtgtctatctgtttatggcaagaatggaggcagtgattcagcaatgtgcagtgcagttggaccattttctatggatacacaaaagaagcaccttgaaagcactgcaaagttaacacacattgaaggtccagactctggtgttttcccgtcccacggatcattgacttgtataagttatactgcttcccttgtgacaaaggataaagcaaaaacatatttgttggagagccacaatgagtttgagtttgagattgggacgggtgttgttagtaatcagcttgaatcatgtgtaactcagctgtcagtgaatcaaactgcacgttttgtagctgaactgcctcctagggatttaatcatggctgcatcttgtgagttctcacatgacctctccaatgtatctagcggtgtacatattttaaacattgttgcagagagctgcttcctggagttctctgtaaaggttctgcaggttgattttggctgtggatctggtagccttcttgattcattgttagagcatccaaccacgctggaaaagcttgttggcgttgatatttctcgaaaaggcctcacacgtgcagcaaaggtgatcgagcacgtcgaggaggaccaggcgactttatttggcaacatcgtcttgagttcattccgcccgaccgtgctcattgtttccacacccaactacgaatacaatcctatcctccaggggtctgctatgcccaacaaggacgacgaggcagacgaaagcactggtccctacaagttccgcaatcacgaccgcaagttcgagtggaccaggctacagttccagtgttgggctactggcctcgcggtgaagcatagctacagtgtggaattctccggcgtcggtggctcaggcgaggagctaggctacgcttcccagatcgctattttcagaagactggtgcagggccaggaagcgatgtgcctggacaaggatggcgatcagccttacgaggggtactacctcgctgatgagcccggggtgcacttcgtttggcagcccaaccaagagtcatcggtactcgtcatgtcacgcgcgttcgacgactactatatcgaggattgtggcatcatcttggcgccagaggtgacgcagaggatgatcgacaacagtgaccagttcgtcatcctcgccaccgtcagggtagcttttgtgctggcctgcctttaa

SEQ ID NO: 31735 - DNA, 1095 bp, Zea mays
  Peptide Sequence Number=SeqID_75110
atggctatcacctcccgcgcgctcgtcggcaagccggcggctggcacgagggacgtcttcggcgagggccgcatcaccatgcgcaagaccgccgccaagcccaagccggcggcctccggcagcccctggtacggtgccgaccgcgtcctgtacctgggcccgctgtccggctcacctccgagctacctgaccggcgagttccccggcgactacgggtgggacaccgcggggctgtcggcggacccggagaccttcgccaagaaccgcgagctggaggtgatccactgccgctgggccatgctcggcgcgctcgggtgcgtgttcccggagctgctcgcccgcaacggcgtcaagttcggcgaggcggtgtggttcaaggcgggctcccagatcttcagcgagggcgggctcgactacctcggcaacccgagccttgtccacgcgcagagcatcctggctatctgggcgtgccaggtggtgctcatgggcgccgtcgaggggtaccgcgtcgccggcggcccgctcggggaggtggtcgacccgctgtaccctggcggcagcttcgacccgctcgggctcgccgacgacccggaggcgttcgccgagctcaaggtgaaggagatcaagaacggccgcctcgccatgttctccatgttcggcttcttcgtgcaggctatcgtcaccggcaagggccccatcgagaacctcgccgaccacctcaccgaccccgtcaacaacaacgcctgggcttacgccaccaacttcgtccccggcaaagccttcttcaggagtcctgatgggtttgctttgtggaccttgtattttgattgtgttattgttaggaataaggtctttggtgaaaggaaaggggccaaagctggtagagagcccaaagtgaagcaaagcttcggtgcctccgaggtcgcgcttcataaaagggggagaagaagcaataacacggtggtactggctaaatcattcatcatggttgtaagagacatagctcgaaactggaaggcagacgggtcttctacagcttcttgcgtctctactgctgacggaagggaagggagcggatctggtgatctgtggtaa

SEQ ID NO: 31736 - DNA, 525 bp, Zea mays
  Peptide Sequence Number=SeqID_75111
atgatggtcctcgcctcagttgccgccacctcattcgccatcctgcttcttttctctctcccctcatgcctctgcctccgcgtcaccccattctcggcagaggacgtgggagcaggcgcctcctccccgtattcgttccactccagtcctgacaccgacccgtgcagtggctattgcacgtccatgaggatgtttcccaacatgcgcgcaccatcattttcgccgtcgtcagacgtcccgttcgtcttcccggccttcgccctgttcttcctccccaacctgctgcccctgcccacggtcgtagccgcgagccgaccaacgctcgccaacacgggtacaggcggtatactacctatgtcgcctccagatgcccaggtcttcgtcgtgtccttcttgggcaacgaacaggatttggagatccatgcgggcactaacagagggtgctcgtccgttgtgttcttggctcttgcatacattaggtcatttatgagaccacattggcgcaatagactccatggtgtttga

SEQ ID NO: 31737 - DNA, 1524 bp, Zea mays
  Peptide Sequence Number=SeqID_75112
atggccgccggctccatcgtggtggacttcccttccatgggcgccgccctctgcttccccagcctcgattcactcctccgcgactccgcctcgggcttcctcgctgccgtctccaacgccccagcccccggcgcagccgacctcaccaactttcaccgcgtcttctcgcgcgtcctcagcgcctacccggacccaccgctcgaggctgtctggttcttctccgcgctctccttccacgaccgtcccgacgacctccgctccctgctccagctcctctccgccttcaccgcctcctcgcccggcaccgccaagccgcttgcccttctcgcccctgtcgtttccgagctcttccacgccgacaagccgcgcagggagaccgagaccctcgttgaggccgtcctcagctacatcagcatctgcagcaaccgctctgcccccctcttcgaccgtgggcgccaccgcagacgcttgtggagcgtgcgctactcgagggagaggtgcccgttccaagtgctgttcccgctcgctggggacgaggccaggcgggagctcatgaaggaaggctgcagcgttgactacctcgccggggtggtgctggctgaggcgttccttctcaggctctgcctcaaggtgcagaatgcaacaggggtgcctcgctctgagctgcagaaggagctcaagatctgggcagtcagctccatcccggtcttccagaaccaccgattcttcggggtcttgctgaacatgctcttgaactctccactgcctgtttactctctagtgagcgctgatgatgaaatcttgttgagagatgtcctttatgattctcttatcctggtggactattctttcattaacaatggtgttggagttgatcttttgcctatatacgtgttgagattggttatcactcttgatgctgtcaatgatgccaggaggaaaggtgatcaagggagagcagtgtcatttatcaatgctttctcaacctcaaatgttcccaattttctcatcaagtgggctacttttcaagctggctctggtgcactcagcaaaccaattgccaatacaccgcaatctattattaagtggcttgtcgaccttgaagtcaaggggctcaaagtgtttggagactacagttcttgtattatggagaggtttgcttatgatggggtcaagaatggccatgggaacatgattcattcagatgcggaccttttcttttttgataagcagagtggtagggagtttatggacaccaaaggcagcgaggatgaagctgtggatgagatggagactgcaggtaataatgcttttatggctgctgcccagtcaatgaagggggtgactgacggcatgaggaagaggaagagctgcggatacgaagatgcaacagctgtgaagtttgtgaagtacaaggttgaagacagctcgctgaaggactacctatcagcagctaatggcataagcagtggcagtgaggtagagaacccgcagtctgatgatgagatggaagaatcaaactga

SEQ ID NO: 31738 - DNA, 363 bp, Zea mays
  Peptide Sequence Number=SeqID_75113
atggggcagaagccgtcgtaccttctgctgctcgtcggcctcctcgccatcgccatgctctgcgctggcctgggtcacgcgaagcgccaactgaacgacgccaacggcggtggcctggagttatccttgggctccaaggcggccacggcgggggccaagaccgagccgctggacccgtccctgagcgacgactacgaggtttgtgctgttatgggttatgggggtggctgtttcgtggctggtgggggcaggatggctgtggcgttgcggtggggctgcgcgctgctgtctggggcaggttgtggttcgtgcaggcgggcacgcgggtgggtggcgggggcactgtggacgcttatgttttag

SEQ ID NO: 31739 - DNA, 552 bp, Zea mays
  Peptide Sequence Number=SeqID_75114
atggcgccctcatcgcgccgccagcacggcagcaccccgcatgtcgcgcaccccacaccgacatctacgcagcctcctccccatctatccacatccccatccgagcccctacaaccttgctctgcatcccgatcccgcccccgccacgtcgcttgctccaaccgcgttctgcctccatcatgctgccacacggccccctcctaccacgctcctcacaacagtggatctagcgtcctaatcgccagcaaggagagtctagccgaggactccaacccatcccaatgtactctcctccgattcgccgatttggcgtcgttctattcaactcataagggactgttaacactttccataagactctttttcatttaccagctctccaagtatcttagttgtgcaactattgagatggacagcacacaagctccaatttctcagggtgagtttgcttgtagcacttatttgtttcgtgattggatcccagatttgtcagtcaagtcattagacctggggctgctacctgttcacttagtgaagaatcatctagattaa

SEQ ID NO: 31740 - DNA, 804 bp, Zea mays
  Peptide Sequence Number=SeqID_75115
atggagttggacgatgttatcagactcgactggagccgaagtgaccgcagtcacttcgccgctccactgaccggcctgacagaaggacagcgtcgcctgcgccgctctgactgctgtgccgctcgacagagcgaggctgacaggcagccaggcccggcctcaggcaccataggaaactccgcttcgcccgacctagggctcggacttgggctcagccccagaagacgacgaactccgctccgcccgacccagggctcggactcgggctcagccccggaagacgacgaactccgctccgcccgacccagggctcggactcgggctcagccccggaagacggcgaactccgctctgcccgacctagggctcggactcgggctcagccccggaagacgacgaactccgctccgcccgacccagggctcggactcgggctcagccctggcctccgtcgacggtctccgcctcgctcgacccaggggctcggactcgacctcggcctcggaagacagactcgacctcgacctcggaggagcctccacatcgcccaacctagggcgcggaccggccacacaagcaatgacggcgccccgcacgctctacgacgacggcggctctcagcccccttacggaagcaagaggacgtcagtaaggactcaacagctccgacagctgtccttccgccaggcttcagcgctcctccgacggccacgacaccacacgaaccgggcacactgttctatcagtgagaaatttgccattatagaagtcctcagacgcggcttcgacgatttggaggcgtag

SEQ ID NO: 31741 - DNA, 714 bp, Zea mays
  Peptide Sequence Number=SeqID_75116
atgaaaccaaaagcaggaggtatcgtatctgccagaggtaactctaagcttgaagatgactcagctgaatccaatgaagccactggtgttttcggatcaaatgagactggtctgggaagatcaagaaccaaggcctcggctaaagttgttctccctgctaagtcaacaaatagttttgatcataaagatagtactgggttaagctcccttaaaggtgctcttctcggcctcgctagttatgattcagatgatgacgacgatgctgacactgacagcaaggataagatgccaatatcaaatttatcttctaaagataatgctggtgatataaatactgaagaacctgaacaaatgcatattcgtgatacagagaatggggagttccgtttcaaggccaaaacttgtactgagccaatgggtgcatttgacagaatggatgagaaggcaaatacacattcagaaaagagcagcacagaggactttgttaatgaggtgaaggctgatcatacaaaagaactcgaatattctagagcagaaaaatataataacgatgacaaatacagcatgtatggaaatattgacaaaaggggtagctgcaaggagggaaaaggttctggtagggctgcaaagcatgaatctgatacaagggagccacattacagagcaagggctttcgcctggaaattggtaatgatgaggactgccataggctag

SEQ ID NO: 31742 - DNA, 774 bp, Zea mays
  Peptide Sequence Number=SeqID_75117
atggcgtcgtcgcgggtgatggcgtcctcgtccccgccgcagcacgccggcgccggctcgtcctcggacctagcgcgattcaggagcagcggcggcatcggatccatgaacatggacaacattatgcgtgaaatctacggccccgaggccgtcaacgccaccgtcaacggccgggtggagccctccccggcggccccggaggctgctgcccggcggacgtcggaggaggtgtggaaggagatctccgccgccggggggctctccgctcccgtcctccctccccctcccgccgccagcaccggcgccggggccagaggcggcggcggcggcgcctcggagatgacgctggaggatttcctcgccagggattcctgcgccatggcggcggtgatggagggggacatggcgctagggttccctaactgtgaaggagacgcggcagggagcgtggcgggggaagcaggcggcgggaggggaagcaggaagcgggctcttctggatcccgcggaccgtgccgtcatgcagcggcagaagcgcatgatcaagaaccgagagtccgcagcgaggtctagggacaggaaacaggcctatatcgcggagctggaatcgcaggttatgcagctggaggagtatcaagcggaactgttaacggagcaggaggaccgacgccaaaagagacttaaggagctagttgaaagggtagttccagtcatcaggaaaaaatcaccacaagatcttagaagaaacaactccatggaatgctatttagattag

SEQ ID NO: 31743 - DNA, 501 bp, Zea mays
  Peptide Sequence Number=SeqID_75118
atgaacatctacgacgacaacagcctcgcctgcctcaccaagatcttcggcgcctcctccgcgtccacggtctcgccgctgccccacatgctcgtcgtcaacgacctggtggtggacatggacctagtggtggacatgaacaacttctacaaccagtacaagagcgtcgagccatggctcaagcgcaaggaccatcccccgcatgacattagacctaaggctgcagaaggtactgcatcagaaactattctaaaatccagagaagaggatcttaatgttcagagaactaaagtgaggaatgacataaaagaggctgaaggagaactcgagaaggagagagctacaagagaagcacatgagagggcattcgccgaggttcgagctaaggctgaaagaatagcattagaaaggatcacctcagcacatcaaagagcatctgcagaagcccacgagaaagaagagaaaggcaaccgctcaagcagctcgggagaaggccattga

SEQ ID NO: 31744 - DNA, 1209 bp, Zea mays
  Peptide Sequence Number=SeqID_75119
atggcgctccacaagctctatgacgacggcggcccccagctctcttacggaagcaggacaacgctccgccgcacctccgacagccacgacatcacgccagcagggtgcccagatctctccggctgccacgttggcatggccttctcagagaaggttggccgcgcgggaccgaggacgggacaggcgctctcttggggccgctcgcttccctcacccgcgtggacgcttgtaacccccctactgcaagcgcacctgacctgggcgcgggacgaacacgaaggccgcgggacttccacctctctcacgctcgactccggccgcctcgcctctccccccttcgcgctcgcccacgcgctcgacccatctgggctggggcacgcagcacactcactcgtcggcttagggacccccctgtctcgaaacgccgacaaacatctatacccgaacccgtacccggacgggcggttccccgccgtggcggggtggtaccacctctacgtctcgtacgcgtgcgcctgggcgtctcggtgcctcgccttcctcaagctcaagggcctcgaccacaccatatgcatcacggtcgtgaagcccatcttcgagcggaccaaggagagagacgggcatctgggttgggtgttccccgccgccgccgatgaggagcctagcatcgagaccgaccctctcaacggcgctcggagcgtgagggagctctacgagatcgccagctccaactacgccgggaagccaaccgtcccagtgagcctccaatctcgtcactccaaatccaccaaacaagcagcggatctgattcccccctcctcctttccagcacgcagaagtgctgtgggacaagcagctgaagacggcgtctacaagtgcggcttcgccaagaaggacgaccgcgtgctcgtgccggatttggggtcgctcaccagcatccatgacagggcacgtgaactcttctactacctcaagggtgggcaggtggactatagcgaggagcacagcaaggcttgcagccacaacaggtttgggagaatatatcacacagggcactatcttgtttgttacgagcacaacccagtgcattttgtggggcactctgctggcgcgcaggttgtgagggtgctgcatcagatgtttgccgacaagagggatgggatagtccaagaatatgtttttagcaatgttatcaagtcgtatgactaa

SEQ ID NO: 31745 - DNA, 513 bp, Zea mays
  Peptide Sequence Number=SeqID_75120
atggcggcgcacccggacgggtccgcccgcgtgttcctcagcacccaggccggcaaggtgttcctggccaccgtgccgccgcgagaaatttgccattatagaagtcctcaggtctcgacgcgcgcgcagactccgcctcggcgtgccgctgccgtgccccgtctaagagctgccgctccggacgccacggacgcggcggcggccctcatggtcgcgtgcgccgaggccggggacttcgcggaggcccggtccctctgggcgcagctcctgcacagctccgtcgcgccgtgcctgcccgccgtggcgccgtgccttctgccggcgtacccgttcctcgacatcaccgacgaggtgcacatggacaacgagttcggcctcatgggcctagccaccaccatttcagaatcagtgcacagaactattgatgcgagtataaatcatcttccagtcttggtatgtctgttgcaagctcctagatatatggagttgctggcaatggcaagcacattttaa

SEQ ID NO: 31746 - DNA, 987 bp, Zea mays
  Peptide Sequence Number=SeqID_75121
atgtctagtggtgtaccatacatggcaccgtttggcattgtcccattagtagccgttctgaaaattttcaagaatattcagtccctggaggtctgcggtgggttgattactgatgctggcgtgaagaacatcaaggtcctgaaagctctgacgttactcactgttttcactgtttcgggtagtttgatattacccgaacccgtacccgaaattatgggtacccgaaattacgggtacgggttcgggtatagatgtttgtcggcgtttcgagacaggggggtccctaagccgacgagtgagtgtgctgcgtgccccagcccagatgggtcgagcgcgtgggcgagcgcgaaggggggagaggcgaggcggccggagtcgagcgtgagagaggtggaagtcccgcggccttcgtgttcgtcccgcgcccaggcagggcgacgtggggtttcctccgaagccgaggttgagtctgccttctgttgccgtggccgagcccgagccaaggggtcgggcgaggcggaagttgttcggccgaggccagggcggagtccgagccctggggtcgggcgagtcggaagtcgttcggccgaggccagggcggagtccgagccctggggtcgggcgaggcggagtttcgtcgtcttccgggtcttagcccgagtccgagccctggggtcgggcggagcggagttcgccgtcttccgggtcttagcccgagtccgagccctggggtcgggcggagcggagttcgccgtcttccgggtcttagcccgagtccgagccctggggtcgggcggagcggagttcgccgtcttccgggtcttagcccgagtccgagccctggggtcgggcggagcggagttcgctgtggcgcctttggcaagacctgactgcctgtcagacttactctgtcgagtggcactgcagtcggagtggcgcaggcggcgctgtccttctgtcagactggccagtggagcggtggagtga

SEQ ID NO: 31747 - DNA, 465 bp, Zea mays
  Peptide Sequence Number=SeqID_75122
atgggaaacagtaaccattatatcaactggctatccagccatatgttcctcaaaacatcatcacttatccttgagcattttgtgattccagggacaactgttattcttggtgctgttgctgtagcagtgttgggaagtcgttgcaatgctgttactgttatggttttaaatttggccgccactccaattgagctaagcttgatcgtccctttcttgcgtttgggggaaaccatcactggcagtgggcacttccccttgacagccaacgcactgaagaatgttctcactggtcatgcatcaaaggatgtgctgctgagcatcgtcaatgcgatgctgggttggcttattgctgcaccatttgtacttgccgtgctgtacgctgtttcgttcccttgtttcaaggtcctggttaacaggtttggcggcattccatcgagccccaggaccccactcaaggcggtgtag

SEQ ID NO: 31748 - DNA, 822 bp, Zea mays
  Peptide Sequence Number=SeqID_75123
atgtcgtcgattccgccgccggcgggcgggttgtcggccgctattgtcgtagtcgcgcggcggtggaagaagtgtcatgtcgtagctgccgtcgaaggacatgaactcaagagtcccgaaacgaagcaccgtcccgggccggagaggttgctggagactgcccatctggagcttgacggggagctgttcgtcagcacgcagcaggcccctacctggcgcgccaactgtcggcgtttcgagacaggggggtccctaagccgacgagcagggcgacgtggggtttcctccgaagccgaggttgagtctgccttctgttgtcgtggccgagcccgagccaaggggtcgggcgaggcggaagtcgttcggccgaggccagggtggagtccgagccctggggtcgggcgagtcggaagtcgttcggccgaggccagggcggagtccgagccctggggtcaggcgaggcggagtttcgtcgtcttccgggtcttagcccgagtccgagccctggggtcgggcggagcggagttcgccgtcttccgggtcttagcccgagtccgagccctggggtcgggcggagcggagttcgccgtcttccgggtcttagcccgagtccgagccctggggtcgggcggagcggagttcgccgtcttccgggtcttagcccgagtccgagccctggggtcgggcggagcggagttcgctgtggcgcctttggcaagacctgactgcctgtcagacttactctgtcgagtggcactgcagtcggagtggcgcaggcggcgctgtccttctgtcagactggccagtggagcggtggagtga

SEQ ID NO: 31749 - DNA, 177 bp, Zea mays
  Peptide Sequence Number=SeqID_75124
atggagtgcgtgctggttgtggggctttggtgcacccagcaagacccgaccctgaggccatccagcaggcaggccgttagcacgctgcgggatgaggccccgctgccgatgataataggcttcgggctcgggttttctgcccagttctacggctatatgagctttgggagcctataa

SEQ ID NO: 31750 - DNA, 438 bp, Zea mays
  Peptide Sequence Number=SeqID_75125
atggcgcaagtaatcgtcgcaggttttccgattttacaggggcgcaaggctagagccgccaagccttttctgttggtggccgaaaaaaacaaatgcacggctagagatggcaatgggtacccgaaactcgaaacccgatgggtttttaccctattaggggcagatcgggcagtggccgggctcaagacgcctagcacaggggaagacgctgtgtatggcgcacacgcacccacccagtatctagacaacgcgacgtgctttaaatcccgtgtgccgctggttgcccattttatgcctgcgatttgcgtgtggtactctccttgtgcgctctcggggtggactgtttcagctcttcggacggataaggatacggggaagggcgaacgcgcgtacgcgttgcgtgctagagtagtgtttgagtcaaccagagatgcataa

SEQ ID NO: 31751 - DNA, 555 bp, Zea mays
  Peptide Sequence Number=SeqID_75126
atggaggccagatccagctcctgcctcttgggcgtccgtcatccttccatctcccgccctccctcgtcggagcacgagcaccaaaggtccccgtactgcccttacctctgctctccttttcttctcctgttcacccctcgtgccataactgggcgaccgccgctcccgccctacgccaggactggcgtcctgccatggctccacgccaagattgttgatcccatgctgcaggtcatcagaaggggagcagaacccaagcaactagccttctctgctgcccttggtatcacgattgggatctttccggtatgtgaaaataagatctggttgctaggaaacgagaagtccaaagcacaatcgaaactagcacccacgttcaaagtccaagcaatcgccaagggatcggtttctcgtggtttcgctaactgctcaccggaaatggtagctcatgaggccgtgcttgacttcgaacttgaactcctcgacgtaagagctcctgttggagcatgcatgtgtgtcgatgccatggctctggtcgtcgacccactcacctag

SEQ ID NO: 31752 - DNA, 417 bp, Zea mays
  Peptide Sequence Number=SeqID_75127
atggaggtgacgggaagggtagagtcgtttccaaccacgattgaggacagaaaggaggggtggaagggagaggtggaagacagaatacctgtgtccggggtgagaaacagtgcaaccactgagactttgagcaaagattcctctatggtccagcatgaatctgcccatggcatctatgacaaacttgtagctgaaatttggaagaaaatcgaccctcaactctggctgtcaggttctctgatggggtgttcaccatggtacagtgtacagctgaaacagataaggtcgccagcaaacccaccgccgacaaccaattccaccgtgattcgtgccgttgccggcccgacttgtcctcgggatgggcagataagggcacacagtaaaagatcctcgccgacggtgataggagttgattga

SEQ ID NO: 31753 - DNA, 165 bp, Zea mays
  Peptide Sequence Number=SeqID_75128
atggcgagagtagcgtgtacccttcgtggcaagaggctggacggtggtgtatttgtgctctcggttgacgtgaggaagcaacaaacttttgttgtttctgttccaaggtggtcacaaaagaagaaaaccaagagtaaagctgcgggaggaagggttcctccataa

SEQ ID NO: 31754 - DNA, 378 bp, Zea mays
  Peptide Sequence Number=SeqID_75129
atggcggagggcgaggaggccccgactggatctatggcggggggcgaggtagctctgacgaggtacatggcgtgggtcgaggcagctgcgattccgacgaggtccacgtcggagggcgaggaggccccgactgtatctatggcggggggcgagttggctgctgcaggatccatggtggaggaggggaaggtccgacgggatccatggccgggggtggtggagctggatgcaacggtatctacggcgaagggcgaggaggtcccgacgggatccattttcgctgtccggcgacagcaacctgttgtgaagcaggcaggtctggagttccactgcgcgaagattatgtcccggcatctggtggcactgtcgatccggtga

SEQ ID NO: 31755 - DNA, 489 bp, Zea mays
  Peptide Sequence Number=SeqID_75130
atggagaacgtgaccgccgacttcttccggaaacatttccacctccccatggaggctgcgagcacccacacgcgaatcccgccggtaccgaacacccacgcaaccgcgcgacggccaccacctcaccaccattgccgttgtaggaagcgaaggtggatctggcgccgtctgcccccggtcctggtcatcacagacatccgggcctcccgcctcctcgacaacgagatccgcgtcctcaaggatgagttgcaacggacgaacctggagttggagtcgttcaaggagaagatcaaggaaaaccaggagaaaattaagctcaacaaacagctaccctacctcgttggcaatatcattgagatcttggaaataaatcatgaggatgaagctgaggaggatggtgctaacattgatttagattcacaaaggaaagtaaaatgtgttgttctgaagacctccacaagacaaacgaaatgtggctcaaacatctaa

SEQ ID NO: 31756 - DNA, 930 bp, Zea mays
  Peptide Sequence Number=SeqID_75131
atggagaagatctggcaccacaccttctacaatgagcttcgtgtggcacctgaggagcaccctatactgctgactgaggctcctctgaaccccaaggcaaacagggagaagatgacccagattatgtttgagacattcaactgcccagcaatgtatgtggccatccaggtcgttctttccctgtacgccagtggtcgaacaacaggtattgtgctcgactctggcgacaacgtagatctcgtcgatccgcgtgagagtgtgacgggctccggggaacccggcttgccagaagctgccgttatgaggaaggacatagcagcagtttccaacgaggatggcttgcccaccaggaaggacagcgacgaggatgcagcgtccgagccaccaccaagccataaggctttaagacaaaatttagttacgaaagaattcaatcctcagcatgatgagtttctacgaacactagctgtgctgagttcatgtatgaggggcaccctcctcgtgatcgttatgtcctactctagggcctccagtgtgcagctccttggaaagcctgctatatccatgtatgagccttatgggaactctacaactactatggatcctcttatacattgtgttcgacatgcagacaagggcggatgtaaagatgataaactcaagactgtgactaaatttcaacggattaaggtggatagcgtcagatttgaagatgagaagcttcaggatacctcgtattgggctaacattaccaatcccatggcaccgttaccattccatgtttctaatgcactgagggacgatggagctcaaggcgtcaagtggtggctcgctcggactcgcgtcctctgcaacaaggcactgttccccatgagggttcccattaccattgcgctcgcgtcgcctgtcactagggctctgagccattag

SEQ ID NO: 31757 - DNA, 546 bp, Zea mays
  Peptide Sequence Number=SeqID_75132
atggcgacggttgcggttgtggcagccagcaccaccatgggaaccaccactgctggtattggctctagagtggccagtgtgggtagaggagcacgacaaagaggaagaagtggccggcagtgtagtagtcgcaggcatcttggtgctgtagagagtcggcgccacggagtccggtccccccatgagttcctccagaataaggtcatcacagaccttcttgaaggacgggaaaggggcggagcaggtgatgatcgtgcaaaggttctcatatcgcaggttgaggccatggagaagtgcaaggacaaggatccgatcattgaccggagtgttgagatcagcaagagcatcagaaaaagcctttcatcttacgaactgggcgttaagatgaagagcctgcgtctcctagttcccgaggaactgattttccagggcaatccaggcttgaaggaggtcggcctcctctttctcctggcatgcctgctcttcagggggaagaaggttgtcgcccatggggagggggacgaagggcgacaatggggagggtga

SEQ ID NO: 31758 - DNA, 1083 bp, Zea mays
  Peptide Sequence Number=SeqID_75133
atggaggcccaggcccacgcgtcatgcaaccggcgcgccgaatgcttcgtgcatgcaactgcaccgccacttgcgccaccaccgcgcctcctcgactgcggaaccaataccacgactcgaggcgacccagcgcacgacccagcagcgccagcctggcgcaacgacaacgcgcccgtgttccgctcctcgaacggctcgcgcacgcgcaacggccgccccacgaaccactcgccctgtcgcattaactccgcggcgggacaggcgggaccgggaaagggggataccccaaaaaggatccttccctgtgaaagaaccaggctccgagcctccctactgatcagaggttcgaaggctggcccctcggaagggttcaacagccgtctcagagcacgtgggctccacacccactactggtcagaggttcgaaggccggcccctcggaagggttcaacggccgcctcaggctactcgggctccgcgcccactactgatcagggcgggaacgatcttgtaacggaatcccatcagagggaggcatcgagccctcggaccccgtcgccaggggaccgggtccgctcaccggagacaccatgttcggcgcccaccgagggcaacatggcgctctcccccctcctccttgcggaaaggcgatgcagaggcgtatgtaaaaaagtcgagtctgtccctgatcgccctctcgccctgtgcagaggctcgggggctgctctcgcaaacccggctccggccaaaccgttgacagcgtcaacataccagcccgagaacttgggacccgaccgtacacccgggctacggccagctcgcatgagggaacgaccagaccaacggaacattgcgcgaggcattaagacctcggaggagtcaaaccactcctccgaggcctcgggggctacacccggcgggcaccataggaagctccgcttcgcccgacctagggctcggactcgggctaagccccagaagatggcgaactccgctccgcccgacccagggcacggactcgggctaagccccggaagacggcgaactccgctccgcccgacccagggctcggactcgggctaa

SEQ ID NO: 31759 - DNA, 81 bp, Zea mays
  Peptide Sequence Number=SeqID_75134
atggaggtcgcagcaaggagaaggggagacaggtggtggatgaggccgggcttaggtccgcgcgagctgctcctcccctga

SEQ ID NO: 31760 - DNA, 315 bp, Zea mays
  Peptide Sequence Number=SeqID_75135
atgccctccggtgtcctcgctgtcgctaagacaccgtgcggggaaagagcctgtgggaactccctcctctgcggcaaaagtggcgtcttggacggtgcttcttgcggcgacgccacctcaggcgccttcggtggttgcttggaagaaggtgaacaccaggaagcgctcctcgcgctgtcctctcccacggtcgtccctaagaaggcctcatcggtcggcatggtctgccttggtgggacctcgtctgtggaggtggtggttccgacttggtcgctgctgcccccttccccttgcctccgaccgccatgggggtga

SEQ ID NO: 31761 - DNA, 1440 bp, Zea mays
  Peptide Sequence Number=SeqID_75136
atggaggtgtcggcggaggccgggaacgccggtgccgccgagtggctagacgacgacggccgcccccgccgcaagggcacgttctggacggccagcgcgcacatcatcaccgccgtcatcggctccggcgtgctgtccctggcctgggccatcgcgcagctgggctgggtcgccggccccaccgccatgctcctcttcgccttcgtcacctactacaccgccacgctgctcgccgagtgctaccgcaccggcgaccccgacacgggcaagcgcaactacacgtacatggacgccgtgcgctccaacctcggcggcgccaaggtcgccttctgcggcgtcatccagtacgccaacctcgtcggcgtcgccatcgggtacaccatcgcgtcgtccatcagcatgaaggccatcaggagggcgggctgcttccacacccacggccacggcgacccctgcaagagctccagcacgccatacatgatcctcttcggcgctgcgcaggtcgtcttctcccagataccggacttcgatcagatatggtggctctccattgtcgctgcagtcatgtccttcacttactcgtctatcggactgtccctcggaatcgtacagaccgtctacgctcgtgcatgcagtgaatcgatagaacgaattgttgcagccaacggtgggttcaagggcagtctcaccagcatcggcttcggcgccggcgtgaactccacgcagaaggtctggcacacgctgcaggccttcggcgacatcgcgttcgcctactccttctccaacatcctcatcgagatccaggacacgatcaaggcgccgccaccgtcggagtcgaaggtgatgcagaaggcgacgcgcctcagcgtggcgacgacgaccgtgttctacatgctgtgcgggtgcatggggtacgcggcgttcggcgacgacgcgcccgacaacctgctcaccggcttcggcttctacgagcccttctggctgctggacgtggccaacgtggccatcgtggtgcacctcgtgggcgcgtaccaggtgttctgccagcccatcttcgccttcgtcgagcgccgcgccgccgcggcctggccggacagcgccttcgtctcgcgggagctccgcgccggcccgttcgccctcagccctttccgcctcgcgtggcggtcggcgttcgtgtgcgtcaccaccgtcgtcgccatgctgctgcctttcttcggcgacgtggcggggctcctcggtgccgtctccttctggccgctcaccgtctacttccccgtcgagatgtacatcaagcagcgccgcgtgcctcgtggcagcgccagatggatcagcctccagacgctcagcgtcacgtgcctcctcgtctccatcgccgccgccgccggttccatcgccgacgtcgtcgacgcgctcaaggtgtaccggccgttcagcggctaa

SEQ ID NO: 31762 - DNA, 246 bp, Zea mays
  Peptide Sequence Number=SeqID_75137
atggcaccgcgaaggggtatcgttgaatggtggccgaccgatctaaaccaagggctcagattagatcaccacactcgtgaaccgggatttcgcgtgttctgttacgagggagaggaaaaggagcttctgtccggagggatccacccgctagtgccacaaaatgcggccaacgacgcggaggtggagacagggagcgggtctgcgatttgctgcgccattcatgcggtgcacgatgaccagagttga

SEQ ID NO: 31763 - DNA, 210 bp, Zea mays
  Peptide Sequence Number=SeqID_75138
atggggaagcctgtcccatcactcctcatgctcctcctcagtcgagtgaccgcacttgtacccaccataaccggaatgggagaccacgtctcaggtcgcgtgaggggcaaagtctgcgggcaggttcactcaggtatccgcacgttaatccttattccattttcccatctcgtagacaaccaatccccatggattgttgtctacaactag

SEQ ID NO: 31764 - DNA, 558 bp, Zea mays
  Peptide Sequence Number=SeqID_75139
atgcagcccggctgcaccccctcgccagcggtcacccaagacggtgacctccagttcgatggcgggaaaagcgagccgggctgcggcctctgcccctccctcagcttcaaggattttcatcatcagtgctggggaggggactgccgtgtgcctggctctctggcccgagtggcttcggagccgctcccagcgccgccttccgccacggcagctggaagaggttcttccgccgacgagatagccgcttgcctccctgccgggtctcttcttggtggccgcgacgagctcccctcctccatgcacctgccgtgcagggacttcctctggtccgagctcgagcaggtgagctcgtcgtcgcccatggccgaccatcttccatggagatcggcgccccccttgttcctgggtgaccggtgctctgtacggttcctgccccctcctccagtctttggagctcagcactcccatctcctaggcgagctcctccagcactctctacaccagcagatcccgaaccccacgccgtgcacccttgtcctcgcgcacagtcgcggctag

SEQ ID NO: 31765 - DNA, 357 bp, Zea mays
  Peptide Sequence Number=SeqID_75140
atgggcgacgacgagctcacctgctcgagctcggaccagaggaagtccctgcacggcaggtgcatggaggaggggagctcgtcgcggccaccaagaagagacccggcagggaggcaagctaccgaaaaaaagggacgccatggccaaccaagcgccatgggcaagcttggagaggggcttctgctggccgtagatcagggggaggacgagccaagggagagccgagcaagggagggaggcagggaatcctgcctgacagccgacgccggcggccatggagctagggaggagtcgctgcctgcagccgtgtgggagaaaggaataggaaaaaaaaggaagtggcggctaggggggtag

SEQ ID NO: 31766 - DNA, 222 bp, Zea mays
  Peptide Sequence Number=SeqID_75141
atggcccggatcagacccccaaccggagagacccctgacgaggctagcccacacatcagccacacaggaaaagagagaaaaaatgagggaagtgaatgggctggcgtggaggcacccgaactgggccacgacacgaggcagggaggtgggcggctgacacaaaaggcctaccagtcagcgcgcatcactagtgtgtttgggcttgaaactgtgccagggtga

SEQ ID NO: 31767 - DNA, 477 bp, Zea mays
  Peptide Sequence Number=SeqID_75142
atgggcccgcccctggtaccccttcatggttgtgggtcgcacaacgtcgtcgtcgtcgggagcaagcacaacgtcgcactgatggaggtctcggtggaggcggggaacgccgacaccgccgacgagtggctggatgaagacgaccgcccgcgctgcatgggcacgttccagatgaccagcgcgcacatcgtcaccgccgtcatcgactccagggtgctatccctggcctgggccatcgcgccgctcggcagggtggtcgggcccgccaccattctcctctttgccctcatcacctatgacaccgccacactgctcgccgagtgctacctcactggcgaccccggcacgggcaagcgcaactacacgtacatggacgccgtgcgcgccaacctcggcggcaccaaggtcgcattctgcgacgccatccagtacgacaagaccaaccttgtcggcgtcgccatcgggccgaccgcatga

SEQ ID NO: 31768 - DNA, 258 bp, Zea mays
  Peptide Sequence Number=SeqID_75143
atgaatgttgatgataatagcagtgattcaaatgactatgaagaaccgaacgatgactatgaagaaggtgccttagaagatggacataaccattacccaagaccagtggggaatagaatagtcataggcttaatcaatgaagacaagatacaaagtcccaagatgtgtgaagccttaagacatgcgaagacttggcatgaagccataggaccaatgaagctacaaataaaagagtcacatcctcgagcaatcaattga

SEQ ID NO: 31769 - DNA, 615 bp, Zea mays
  Peptide Sequence Number=SeqID_75144
atggcgatgcgagcagctacagcggcggcgacaggcttcttctctccatccaccgtccctccgaggcgcttctcgtccgttacaccgccggcgtcactctgcaccgcgcgctgcatccagcgtcaccgtctccgcgccttcccaagcttggaaatacctctagaggaactcaacccatccgtcgatctacttaggagaactgcggaggccgttggcgatttcaggaaaacgccaatctatattgttggtacggattgcacagccaagcgcaacatcgccaagctgcttgcgaattccataatataccgctacctcagcagtgaggaactgcttgaggatgttcttggtggcaaggacgccctcagagccttcaaggaatctgatgagaaggatagccagttgtttgatgctctatatgatgtgatgactgatattgaaattcaggcgatgagcaagctccgtcagcggtatgatgaactgaaagagcgctatgggcgggggtacagtagcattgacttggtgacgcttgaggacatggtccttgaaatcgtgaggcaaatcgagaagctgatccgtgcaaaggagatgatggaagctgcagggaagccattctaa

SEQ ID NO: 31770 - DNA, 81 bp, Zea mays
  Peptide Sequence Number=SeqID_75145
atggaggttctccaaaagggcaaacagctgaagggacctacaactacacctccacccaacttccagatcttactcaagtag

SEQ ID NO: 31771 - DNA, 363 bp, Zea mays
  Peptide Sequence Number=SeqID_75146
atgtcagccagaaaaacacataaggttccatgtgtgcaatttgcttcttctgatggcactgtactatctgagtctgttgggcgagcggcaattacgcaattttacccaaacagaagcagatgcaccatcttgggtaaaacacttagaaagaggtttaccaacaagtggttacatcaactcgtgttagccagggaatccaagtccacgaaaggtgatatagattcaagaaaattagcagcggatggatctgtagatgcggactttgcaaacagtccattttatccagcactagtcatggatcgacatgatcacacacgcaggaaaagcacgcgtgaggcggtcgaggcacgactagagcgataa

SEQ ID NO: 31772 - DNA, 707 bp, Zea mays
  Peptide Sequence Number=SeqID_75147
agagaagggtgcgaccaactgacgaagaggtcagattgaggcttgtcgtctatgagggcttggccgatgagttgaaggctacccacttgctcatcaggaaacccgttgggagctctgaacttgaggccatgtgggatgatctagctggagaatctgaaactgaggggcaacattatgaagacggcaactgcaactctccaacaacaacaaagccgagctctcaccggccaccgaccgacgaccgcgcgccctcacatggggacgcactggtcggcggtaagggccagttgagctactcgccatcaccagtgggaaagggcacgacctggcagtgcaagaacagaaatagagaaaggatgagaagggcgccgtcggccatgcatcctggcggctggatactattctggcggctggggaggagaacagaaatgagctatggttcctcctcacccccagatttccgctatttaaaacccctgaacagtgcgccattcaatcctgtccgctggatcacatccaacggtgcaaagatgaggagggggagggaggcgcatgcggttgggctgaatttccggcctaggcccatgttgggtcccgtgcgcgcgcctctccccacgcagtggaagcgtgctgagccaccacagcgctgggccgccagccagcgtgactgggcgcgcacccctctcccgcggccagagccgaattga

SEQ ID NO: 31773 - DNA, 174 bp, Zea mays
  Peptide Sequence Number=SeqID_75148
atggggaagcctgtcccatcactcctcatgctcctcctcagccgagtgaccgcacttgtacccaccataaccggaatgggagaccacgtctcaggtcgcgtgaggagggcaatctgctgccaggttcaatcaggatttaataacattattctaagagaagaaaaactaagttaa

SEQ ID NO: 31774 - DNA, 483 bp, Zea mays
  Peptide Sequence Number=SeqID_75149
atggacgagagttgcactcaactcctctcaagtgatccaatgatcaacttgaataccacagtgttcttctttctttactctttcccgtttgcgaggaatctccacaacttggagtctctcgcccttacaataaggatcaaagtgaaagcactagaccgaccgttgaagtttttggagccgttggcgcaccggacactgttcggtgcacaccggacagtccggtgcccacatcacaccgttggctcggccacgcgtcacgcgcggattgcctggctgaccgttggctcggccgaccgttggctcaccggacagtccggtgcaccacaggacagtccgggcgagaggctccaagttgtggagattcctcgcaaacgagatatagtgaaagaaaggaaaacaccgtggtattcaagtggatctttggatcacttgaaagaggttgagtgcaaccctcgtccattgggacgccacaacgtggagtag

SEQ ID NO: 31775 - DNA, 957 bp, Zea mays
  Peptide Sequence Number=SeqID_75150
atgactgagaagggtagacctgttgcagtggacaagcctcagccgccacctgagggccgtcttcctgatgccaccaagggttctaaccacctgaggcaagtctttggcaagcagatgggtttgagtgatcaggacatcgttgccctctctggtggccacaccttgggaaggtgccacaaagagcggtctggttttgagggggcctggactacgaaccctttggtctttgacaactcttacttcaaggaacttctgagtggtgacaaggagggccttcttcagctcccaagtgacaaagccctgctgagcgaccctgtcttccgccctcttgtggagaaatatgctgcagatgagaaggcattctttgatgactacaaagaggcccacctcaagctctccgaactgggcattctcactgggcttctgtccttcatgatggacgatgcactgacaactggaagcatcaagacatcagatgcagaaaagaggcgtttagcaaaagcttcccttgcctacaattgtgagagcaaaaactgtccgcacttcaggaaacttttcccagagtatgttgagaagtacaatcaacagctacaattggagaacactgctgcagagccggtgcctcaggagaatcctgcacctgctccatcccctgctgcccagcaagccccgaccgtggccaatagggcacaaccactggcggaggcgcgccgtgacaagaaccagaagaaggcggtgcccttctggatggtgctgagtgcaaagacaaacctgaacgtcgagcaggttttcttttctatagcaagggatatcaaacagagactttcagagactgattccaagcctgagtgttggcgtgctgcttcttttctgaaatacactgagttgaatcgtcgagaatcacttgcccttgcttcagatggattgaattatgaatgcaatgaggctccatcatag

SEQ ID NO: 31776 - DNA, 570 bp, Zea mays
  Peptide Sequence Number=SeqID_75151
atggcactctcaacctcagaattctgtgtgtcgcaaagagattcttccagcgctgcctccttagctgctgcagcttcttcagcccttttagcagcttcaaaagagttactgagaactggtggtggtacgaccacagatacttcacagaaaccgagcagtggccgagaaagggtccagattgaatctctcagacaagaactggagggggcaaaacgacagataggggcactcaaaagtgagaagtcccagattgaagctgaagctaacaaccaaagaaacctttcagtaaaactggagtctgatctcaagcgcttgtcagaagcttacaacagcgtgccatatcctgacgtggaagcaataaaagcgcaagctaaggaagaggctgagaaggacagtgaggcagaacggaatgatctactcgtctgccttgggcaagagcaaacgaaggtcgagaagctgagcacaaggctgacagagctcggcgaagatgtggatacccttctgcagggtattggcgatgacactgccattccggatgatgacgatgaagatgaagatgatgaagagtga

SEQ ID NO: 31777 - DNA, 927 bp, Zea mays
  Peptide Sequence Number=SeqID_75152
atgtgggcgcgacgtctccacgctcttctttcccttcttcctgccacgcttgctctcgccgtcctccttgccgctttccagttattgtttgatgtggaacagtttgtcttagctgacaataacatgacacccaagcttactacacaagattactcacgtctaagctcttcagtaatagctcacgagctgcaactaaaaaatggagaaaccagatgggtggttgataccattgttggtaaagaggatggacttggttgtgagaatctccatggcagtggggcgattgccagcgcatattctaaggcatacaaagagacctttactctgacatttgtgactggaagagctgttggcattggggcttatctggctcgtttaggcatgaggtgtatacaacgtattgatcaaccaattattttgactgggttttcggcactaaacaagctcctggggcgggaggtgtacagttctcatatgcaattgggtggccccaaaatcatggctacaaatggcgttgtccaccaaactgtgtcagatgaccttgaaggtgtttctgctatcctgaaatggctcagttatgttcctccatatgttggtggtcctcttcccattatgaaacccctggacccacccgaaagaccagtaacatacctccctgagaatgcttgtgatgctcttgcagccatctgtggcattcaggatggtgaagggaggtggttgggtggtatgtttgatagggaaagctttgtggaaacattggaaggttgggcaaaaacagttatcaccggaagagcaaagcttggtggaataccagttggtgtcatagctgtagaaacccagactgtgatgcaagtcatcccagctggtccaggtcagcttgattccgctgagcgcgtagtccctcaagcaggtcaggttagccaatga

SEQ ID NO: 31778 - DNA, 162 bp, Zea mays
  Peptide Sequence Number=SeqID_75153
atggcgagagtagcgtgtaccctccatggcaagaggctggacggtggtgtatctgtgctctcggtgaggaaacaacagacttttgctgtttttgttctaaggtggtgcccaaggaagaacctcagctgtgaagtcgcgggaggatgttggcctcccacttga

SEQ ID NO: 31779 - DNA, 255 bp, Zea mays
  Peptide Sequence Number=SeqID_75154
atgtcggtccgcatcttcgacatggcggtggtcagggactggagcattgtcatcacctcggccatgtatcaatttgacaataatgaaaattatgtatttcttgacaaggccacctaccttcatggcggagtgctcccacgtggatctagctcagatgactcagatgatccgagcactcctaggcaggggcggagccaggattgtgatataaggggggccagccaattcatcaatactataaaaaacattgtatag

SEQ ID NO: 31780 - DNA, 435 bp, Zea mays
  Peptide Sequence Number=SeqID_75155
atggtggagaagatgacgctggagggcctcggcgtctgggacgagaggagcgtcggcagccacctcgagtcgctcacccagggcgtgcggctgtcgcgctacggcgcgcctctggacaaggggaccggcatgtcgatgaaggagcaccgcgacgacaccatggtcacggggatcgtgcagcacgacgtggaaggcctcgagctgcagtgcagaccaaggacgggagctggaccgacgaccctcgcgacccggacacggtcaccttcgtcgccggcgagcagttcagggtacgtacggacaacgccagccacggtgcgggcgatggacgagctcgtcgtcgacggtgaccgacttctgcggtacgaggactactccagcgcactaatccggcgatccgctgatggattggagaaagatgaagcgatcatgtcatga

SEQ ID NO: 31781 - DNA, 819 bp, Zea mays
  Peptide Sequence Number=SeqID_75156
atggcgcctcctgttgacgtggtcggtccgtgccctagtttgggcgaggtggaggctcctccgaggacgaggtcgagtctgtcttccaaggtcgaggtcgagtccgagccctcgggtcggacgaggaggagaccgtcggctgatgccagggctgagtccgagccctggggtcgggcgaagcggagttcgtcgtccttcggggctgagcccgagtccgagccctggggtcgggcgaagcggagttcgtcgtcttccggggctgagcccgagtccgagccctggggtcgggcgaagcggagttcgtcgtcttctggggcggagcccgagtccgagccctggggtcgggcggagcggagttcgtcgtcttccggggctgagcccgagtccaagccctggggtcgggcggagcggagttcgtcgtcttccggggccgagcctgagtccgagtcctggggtcgggagaagcggagtccgtcgtcttccggggccgagcccgagtccgagccctggggtcgggcgaagcggagtttcccatggagcctagggccggacttggctgctgtcagcctcactctgtcgagtggctcagtagtcggtgcggcgcaggcggcgctgtcctcttgtcagatcggtcagtggagcggcgaagccacctttgcattaaatgcccctgcgatttggtcggttggcgtggcgatttggcctaggttgcttcttggtgaagactgggcctcgggcgagccgaagctttgtgctgatgggggttaccagctgagatttaggagccttgagggtacccctaattatggtccccgataa

SEQ ID NO: 31782 - DNA, 486 bp, Zea mays
  Peptide Sequence Number=SeqID_75157
atgcaggaatcccttgcaggaccgccatcacagcaaaatcctcccgagggcctccccaggaatcccttgcaggaccgccatcacagcaaaatcctcccgagggcctccctaggaatcccttgcaggaccgccatcacagcaaaatcctctcgagggcctccctacactgaccactcccctactgcccttgcccctttcggcgccggatccaacggaccacggagttcttcttccccacggcggatgaatacggccgcgcccacctcgcacggcggcggtcccgccggggactcccatatcgcgcacccgaacccaaaaacggccacggtcggcccaaagcgtagcagggaaagaggcgaattcgttggaggttcttaccaagcgttcggtgtggccgagaactctggccacgacaaggtgctacccggcggcgccgagaccccggtgggaaattcctggcacccaggtcgcaagcccagtcggtag

SEQ ID NO: 31783 - DNA, 642 bp, Zea mays
  Peptide Sequence Number=SeqID_75158
atgtctcagcgggaggccctcgcaacagagctccgggacaagctgagtgccctggacaagatcctggaagaggagcagatccagcagaccacgactgtggagaggctgcaaaagttgcagcaagagctcaagggcaaggccagcgacgccgccctcgccgaggagaagcttaaagtgaagggagagtccttggacaggcgggagacggaccttgccaggcgggagatggacctcgccaggcgggagaaggatcttgccttcagggaggaaatgctcacccggcgaggcgagctgctggctgagcatgagctcgaggcggagaagaaagaaaaagaggtggaggagcaggtccgccagttcaacgcggcacaggcggctcagggtttccaggcggtggaggccaccaggaaggccctcgaggatcttcaggcggagcaccgcaccggggtccagcgcattgccgcatgggccggcgaggcgagcatggcactagtgccgctagggatgagtcccatctcggtgtcggagctaccgacgtctatctccgatgtgctcccggtgctggactccgcctttgatgcctggaccagattcttggcacccgcttggaggccgagggcggcaggctctatcaggcggtga

SEQ ID NO: 31784 - DNA, 1014 bp, Zea mays
  Peptide Sequence Number=SeqID_75159
atgacgatcttggccacgctgccgaccctcgacgagagcggcgtggcggttcgtcaaaccggcggctgggacccccaccgcgggatccagatctccgatgcactggctggaggcccccagcctgccggcgtggctcccagcgcccccatcgtggccccccgccccttggacaagggtaaaggggctacaagcagcgcctccaccggtacctcagccctaggtagctccaggggttcggaggaggagagacgacgccagctgcatcgtgctgactggtcgtttgtttcggacccccccagaagcgtcagaggactgctggtggggtcgaggaggtcggctcctaagcccagggcgcgcagagacgcgtcagtccgccgccaccaccaccatcgggcccaccgccaccaccaccaccatcgccatcggtcccgccgccaccaccaccacctgggtgtgatcttccccaggggcaccagaagcagcaacagcaacaacagcagcagcagcaagagcggcggtcgtctcgcttccagggtcgctgcaaagtccagggctccaaggcttcctccccctgtgctcccaaggtcgcgcctcctccgccagataccatgcccgccagcggctgggcgtctggcagtagcggcgccaatgtcaagcggcgtcgcagcagcggaggaggtcccaactgcgccgacggctaccgcagcctcaacgacggcgatgccgtcgagcacaccgtcggcagcggcggaggaggtcccaactgcgcccacccctgctatcgaggaagcagcgccagttcccctcccccgggtgctgtctcgtgcccatcaggctcttcatgagactaaggcggcgatcctgtgggagtgggaggcgcttgaggccaagaaccagcgcctcagcgactggcgcacccagctggaggagcgcaccaaggcggcgtcccgccagttcgcctccgagcggtccgagctcgagcaggaccgcaaggattacaaaagggacctctag

SEQ ID NO: 31785 - DNA, 279 bp, Zea mays
  Peptide Sequence Number=SeqID_75160
atgagcatcatcctgcagtacctggtcttgacctgtggtgtatgtgagacagcaagagtgagctcacatacgttcatcgctcaacaagttgtggggaataatgtgcatgaactcgccaaaggtgggagctcacgtgaagtgaccgccatcacagcaaaatcctcccgagggcctccctacactgaccactcccctactgcccttgcccctttcgggtaccaggatgatcttcaggtgactcgtaacctcgcgctagtcgtagcaatacagacaaacatg

SEQ ID NO: 31786 - DNA, 573 bp, Zea mays
  Peptide Sequence Number=SeqID_75161
atgaagactctgacgattttctgtggctaccatcccctagagatggtgatgcaccccttgggactcttccctgctgagaagaaggatgatcccatgtggtgtaaccgcgtcagccatgtgaaggatgtgtgggcaatgtatcctgacttggttgggagggtcaccgttcagtgcatgagtgcgctataccgccttcaggcccttcagagcgacgctatggcacaccttgctaacatcgctcaaaccgccaagctcactctcgacagtcgagaagattttgtggtcgatctatccaccgagctgagccagcgcattaccaccttggagcagcaggtggagatccgagacaacaccattgatgtcttggagaaccagcttcatgatgtgcagagggaactcgaagaagcgaatgaccacctggacatgcaccacctggagatggaggccaatgaagccggaagcgagggagaagaggctcccgaggagctaggaccagcccctggtgccaatgggactacctccgcgatgcctccttcacctgtatccagtgtcgcttccaccgctcagggttga

SEQ ID NO: 31787 - DNA, 204 bp, Zea mays
  Peptide Sequence Number=SeqID_75162
atggcggtcaatatagacgggcatcttagcatgtaccaccataagatggtcaataccaggaagggtggtggaattgatctacctcccaatcgacacactcggaggatattcagacaaccacaacaacaacctgagatggatcctctacaacctccaccagccggagctaatcccgcagttacagcccagatgcagataatgtag

SEQ ID NO: 31788 - DNA, 201 bp, Zea mays
  Peptide Sequence Number=SeqID_75163
atggtatcttccacagcgagttgcaagaattacaataacccgcaattaacagtgagaataacacttcccagtgatacaactgatgcacaatattcaatgcaagttgcaaaagttgaagagaagttttttgaatctcgacttggtaaagaaagggcatggctgcctagaacgatgaacctgtgcaacttgagggctcggtaa

SEQ ID NO: 31789 - DNA, 267 bp, Zea mays
  Peptide Sequence Number=SeqID_75164
atggagtctgcaagagattcaggagctcgcttgggggctggccagcgagcggaggaggtttcgcagggctgtactagttgtcttcctcatcgagcagccacagcaatacaagccaccgccgccaactccaccacatcctcttcacccgtacgcaatgtcaacgagaagcaaagcttcacgccagatcgaggcgtgatggaggacctggacgtggacgaggaatacggctgggtcggtgcagtagaacttctagcttatccgaagtga

SEQ ID NO: 31790 - DNA, 813 bp, Zea mays
  Peptide Sequence Number=SeqID_75165
atgcatcgcatccttccaccatccgagcccccggatggggagcgcccgcgttgccttcgtcttgtcgttggaggagcgcaaccttacggaggtgggcacccttcagccatcgctcggcttcaaggattttcatcaggcagcccggctgcattcccccaccgatggtcacccaggatggtgaccactagttcgatggtgggaagaagcaagccgggctgcagtctctgccccgccctcagcttcaaggatcttcatcatccttgctggggaggagggagaggcgagtcagggcctgccttcgcgtgggctggtgtcccgcttcttcctccggcatctggaggtggaaaccatcctccagctctgcggaggaggcatcctccagccatgcgggggaaggcgaactgctgctgcagtggtcggcggcgagccaactggagtttgtcgtcccgcaggccctccgatgtggaggtgacgagtgaggtatccgtatcccggaggcgtaggagtccctcggctcattcagccttgccacccaaggcttctcttgctcagttaaagaaccctcggctactctgcgatgagccggagccagaggcagcggtgtcagcgtggacagaggcggagtcggctcgagaagaagcttcgttggcccaggagcacgtggcctccctggccgaggaggtgcagcagcggcggctggagcctggccaggtggagatccttccgcccgcgtcgccgtccgaggccaggccagattcctctgaaggtggagacgacgccgagggtgctgttgctccctctgttgatgtctaa

SEQ ID NO: 31791 - DNA, 765 bp, Zea mays
  Peptide Sequence Number=SeqID_75166
atgggcgagtgggagagagagagggagctcggggaggaagagagcttggttgtgggagggagaagagaggagctcgactgcccctttatagaggagggaggagatgagaggtcggccagggagagatgtatggccggcgggttcaaggccattgatgacattcacggagcttcaatgagggagagagaaacgaatgcattgaagttcataacgccgagggagagcgaacggcgtgtaggacaactcgggtggcggcgcggcgcggatcctggcgcgacggggctgggcgcgcttcgtgcgggcagggcggctgcgcggtcggtcgtgcggcgtcagggtcggctgacgtggtcgctcggtggcgcggcagtcggggcgccggtccaaagcgccggtccagggcgcgcacgagagagaggaaaggaggagagaggggtgcgcgagggcgtgaccgggggcacggccgggggcgcgcggctgagggcgcgcggcctaggcgcagccgccggggagcaggggctcacggcggggggcgggctcggcgggaaggggcgcgcgggcaggggccgagccgccaccgccgggcgcgaggcgtgcgcaggcgaggggccaagccaccggcgtcgggcacgggtgcgcagggggccgccggcgtgggggccgcaagcgaggggtcggggcgccgccgggcgcggggaggggctcgccggggaggggaggggaggggctcgccggggcgggaagcggctcgccgggcgtggctga

SEQ ID NO: 31792 - DNA, 318 bp, Zea mays
  Peptide Sequence Number=SeqID_75167
atgaggaaatgggcaaggcctagcccactactcctcgtgctcctctcctgccggagcaacatcccactcgaccgtccaacccggtggcagggtggtaggccaagtcacaccatcaaccatttcctgaatggtacctgcaaaaattatgccacaagcaaggctgagtatactaatactcagctagacttaaccgtacaaggggtcaagcagtctcattacttgcgagaagcagacgattcgaatcgagttttaaccttgcaaggcctcaccgccttggcatacaatgctccactgaccccggctgccgccgtacagtga

SEQ ID NO: 31793 - DNA, 285 bp, Zea mays
  Peptide Sequence Number=SeqID_75168
atggagagtcatgatctccaggcagaaagggaatcacggcttgtgggtggtaatgagaatgctggtttggcattgactatggtaatggttgtcagcattacaaccactgctcaggagaagatgaagccgtggaatgagacttccaggagttccaagactatgacgagttctaggcgtgggttagcggcaacccccagtcagctgcctatgaaggccgcgtgtatctacgtttcttttccgcactttgattattgtaaagactatgtggatgtctcagacatatga

SEQ ID NO: 31794 - DNA, 165 bp, Zea mays
  Peptide Sequence Number=SeqID_75169
atggccgggcgggggaaaggggagcgcgccgggggcaccactgaggggcaccgggctgggggctccatggccgccacggcgaggcttagcgagaagaaaaggaaaaaggaaagggtaatgcccgaatttggtcaagtcctcctggacttcaagaccttcaactag

SEQ ID NO: 31795 - DNA, 144 bp, Zea mays
  Peptide Sequence Number=SeqID_75170
atgttcggattacaggtggtgatgagaatgaaggtttttgattatgattatggtaatggttgtcagcattgcaaccactgctcaggagaagatgaagccgtggaaggagacttccaggagttccaagactacgacgagttctag

SEQ ID NO: 31796 - DNA, 774 bp, Zea mays
  Peptide Sequence Number=SeqID_75171
atggcgcctcctgttgacgtggtcggtccgtgccctgggttgggcgatgtggaggctcctccgaggtcaaggtcgagtctgtcttccgaggccgaggtcgagtccgagcccctgggttgggcgaggcggagaccgtcggctgaggccagggctgagtccgacccctggggtcgggcgaagcggagctcgtcgtcttccggggctgagcctgagtgcaagccctggggtcgggcgaagcggagttcgtcgtcttccggggctgagcccgagttcgagccctggggtcgggcgaagcggagttcgtcgtcttccggggctgagcccgagtccgagccctggcccgagtctgagccctggggtcgggcgaagcggagttcgtcgtcttccgaggctgagcccgagtccgagccctggggtcaggcgaagcagagttcgtcatcttccggggctgagcccgagtccgagccctggggtcgggcgaagcggagttcgtcgtcttccggggctgagcccgagtccgagccctggggtcgggcgaagcggagttcgtcgtcttccggggctgagcccgagtccgagccctggggtcgggcgaagcggagtttcctatggcgcctgaggccggacttggctgctgtcagcctcactctgtcgagtggcacagcagtcggtgcggcgcaggcggcgctgtccccttgtcagaccggtcagtggagcggcgaagtgactgcggtcacttcggctctatcgactggagggcgtgcgtcaggataa

SEQ ID NO: 31797 - DNA, 468 bp, Zea mays
  Peptide Sequence Number=SeqID_75172
atgcggtcgctttgcttcatcagcgcgcctgccctcacactcgtgtcatcaaaaggacaaggggtcgcatgtgcaattacgattctgatgctgtcgcatgtttcgattgggaaggagagcctcaaggtgagggatcacatctactcctggaaggcggcgtgggtctacgcgcatcacgcatggttgatttgtttctcttcgtccagttcttggaaaaggctactcgcattgattcagcagtgggaagtgtcctgggatgacaccttagatccagcagtttcttacaaaattggtcaggttgtggatgctaaagttattcatctggactataataatagccgcatatttttgtcacttaaagatgtaaaggtgatggtggagacaacacttggcaaagaagagttgaaagaggcagttttgatgtgcactagcactaatagggcaaggtttcacaagctgagggaatga

SEQ ID NO: 31798 - DNA, 654 bp, Zea mays
  Peptide Sequence Number=SeqID_75173
atggccgagatcgacgctacaccattagaatccatgagggcaccagtggatctcttcgatcggggaagcggtcagagcaggcatagtccagacgggaatgctgcagctggaagtgagagaaaaccagcacaagcaggccacgatgcagatcgaagccctgcagaaggcagtgtaggagctctcgcggcagtacgagaaagactgcatggacgcccacctccgcatagcccagctggaggcggagaacatcagcatcatgagccggcagtcagagacggccgacgagctggccgccgtgaaggccgaccacgacgccgccagggcgtcggtcgccatcgtgctgcgagaggtggaggctatggagacgagggccgtcctggagtggagagggagggcaccaaggacgtcctggcgcggatactgctgctcaacgagacggtcctgtcctctgccgtcgccgcgatcagggccgaggaggagaggtccgtcttcttccaggaggccacgctccagttctttgactctgacaggaacctagaggtggccaggcggcagatggaggtgatggagggcatggaggcggagctgctggcgaagtcggtggaagtcgagtacctgcgggcggagctgaagcaggccgaaatgaggttctga

SEQ ID NO: 31799 - DNA, 534 bp, Zea mays
  Peptide Sequence Number=SeqID_75174
atggccgattccgaggatcccaccaaggtctccaccaccaacatcatcaagccgacaatgggggcactcccggctgatgacaagcaaccctttgaggacctcgtaatgcgcgatgagaaggaggtgatgcggcaatggaacgaacaacgcgacaaggaggaggcggaactgctgcataaactctccgacggcgcaaaaaggcagcggaaaagtacatgtcacacttcacggtggatcgccacgagaagatcatgtgtcaatgggagatcgatatggaatctctcctacctccgctccaggctcctgttattttcaataaaggaggatgacatgcaccctcattgtgaagttattcccttaattttctttgtgcaacctcattgcctcattgatattgttgtacacttagtttgcgctttacttcaaaagtatgtctacctgattaggactagagtcgagctgaaggattggtcgaaagctgggagcctggaatcccgagtagaatggaactggaggctagttatgtctacttga

SEQ ID NO: 31800 - DNA, 111 bp, Zea mays
  Peptide Sequence Number=SeqID_75175
atggggagtcatgatccccaggcaaaacgggaatcacgactcatgggtaaagaagaaggcgtcgaggcggatctccaggagttccaggacttcgacgagttcgaggattag

SEQ ID NO: 31801 - DNA, 1383 bp, Zea mays
  Peptide Sequence Number=SeqID_75176
atgccgtcctcctcttcttccgctgccgctacgccgccggccggttcctcgccgtcggccgccgcctcgtcggaggagacgttgagtagtttgatggcggaggagttgcgcgccggcgattctgtcgatttcggcgtgtcgcgaatgtcgtcggcccgcgtggaggatatgcagcggttgggctacttcggcggcggagttgctcgtgccccggggacggagaaagtccccgagccggagggcgagttggttgttttcgagggcgtttttcgccgccggtctccgcttgcctgcacaccggtttgttggcgaagtcctgcgcaggttcaacgtgcaaatacatcagctgacgccgaatgccgtggtggccctgtcgaaaagaggatgatcggggatgaagttgctcagtttgggtcctgcacattcacgtcgaagaccggcaagaccacgatgcagtggggcaactggaatgaattttggttttacgttgctgagggtaccgtcgaaggccatgagggacttcccgtgtccgagatgtgctctcatttttactcggcgtacccgccctttgaagtggcggaggatgatgtggacgaaggggcccttcggtgtgccgccggccagagcagtgggcgcgacttggttgaagagtttgtggcgtacggggtatggcccttggcgcatggttgggcgttgggcgaagtatgccctcgccagatgcctttccgtggtggaaaggtggtgcggagtcccgccttcgcgctaaatctgcaaaaccgtgatccggccgcctttgtgcgtgaggcggaggatgaggcggtgcggcttgttgggcgttatgtgccgaggatagagggccggcgcagctgggaaatccgcgggtcgaatgaccgtctgaatagggtcttcgaattgaaccaactgccatatgacggctaccctggtcaagacgatgcggaccgccgagggaagaaaccggtggtggagactaaagacgaccctgcgccggcggccgccccatcctctaagaagaggagactaggtactgccatgggaggacttggggtttccgatggctttgctagagagttgatgaggacgtgcgcggccccgggggaaaggatgtcttcgcccgagctccgggagtcttcggctcggatgctgaaggttaccgagggttgttggcctgggaatgttcctatcccccgtgcggccagcggggacgtttttacatctcgtatggttcgcaaatggagagtttttccttacgggcggaatattgctgctgttgtgtcggcagtgatggacaaggatcgccagggggctgcagaaaagcgccaggcggctgtcaggcttgttgaagccaggccaaagaggcaatag

SEQ ID NO: 31802 - DNA, 129 bp, Zea mays
  Peptide Sequence Number=SeqID_75177
atgcctgaggttggcttgccgaagcaacagaagctgcaggatggttacccacatactctggaatgtacggtgagtgatggtgacatggcacatcctggtagtatggcccttgtcctcaccgcagaatag

SEQ ID NO: 31803 - DNA, 618 bp, Zea mays
  Peptide Sequence Number=SeqID_75178
atggcggtatcgcattccgaaatttcgtactgtaggcgactcacttccgctgatagctccgcaatacggtggctatcccgctcacgtgccctattcctatggcgtagttctgatcgtagttgctccaccctggcctccagaaacaacaaaactccgatgtttcctcacctacaacaacatgggttcgaaaaccctgagtacggagtgtaccttcgcaagtcttacccgacaaaagaaaaagactctcaaggagatgctggcttgagggagtcaagtgcaaatgtctgcaaatgcaaggatgacttctgccttcatacctctaaggatatgaagccgcatcgtacccctcctcgggcaacgtatgatgctaaaaatgtaccgggaataggatgcaaaccaaacggtagcaaccaccactgtatttacttgcctttaccggaagttcgggcaaatcccaagtacgatccggaagcccaccacctatttttgacacccaacttagtacaccaatttcacataatcaggctcataagcgacgccgcacctacgcacaaacttaaaccccgccgcgggttacatctctccctacacccaccaaactgcagcggcgctgcttaa

SEQ ID NO: 31804 - DNA, 1451 bp, Zea mays
  Peptide Sequence Number=SeqID_75179
ttgtgtctgccgaagtcgaaaaacttcggacacaacatgctgacgccgtccgagagaaatcggccgacgacagcaagtgccgcaagctggcggacaaggtggccgcactggagggagaaaaggctgacctccggcgccaactggcgggggagaggagggagaccaacgaggccctcgccaaggcgcaagcttcgcaggcggaggccaagctggcccgagcggagggaaatattgccagggagcgcgccgagcagctgcaggagcggctcatcgccctggagagccgcgtggagcgggccgaggccgcaatgcgggcggaggccgaacggacgcgcacacagcttgtgagcacatatcgtgagctgggaagaactgcaggagctccccgctgtcgtggggggttcatgtcgtacgcctccctggtcacctgcgagggggcgatgaacgcgctctcccgcgaagggtgccggcacttcgaggtcttcgaccaggcggatgaagattttgatcgagatgtctataaggttgaagacctcgtggtgaaggattctgccggggccctctacgactggatgtggggtccgcacggtcgtgaggtggtcagggagcgggcggagacggcgatggctcaggtaacattttcgtttgtttggcatttgttggatgtggggcgttgcgtggcgagcgggtggacgacctcgggcgctgaacagcggctgcctgacccggagccgaccctgggaggccgcgtcggggtcgccctggagccaaccccggagaccgcgaaagacgaaccggatgcccccacatccgcagcggccggcgaagacctgccccgaaggtggctgaaggcgcacctgatgcccccgcggctgctgcgtcgagtgctgaagatcccgcggcggtggcagcggaaacaacagcggaagcagcggcggagccaatggcggaggcttccgcagcgccagggccttcgcaggttcaagatttttgagcctgcgcacgcaaccgctactactgaatgtttggcggcttcgaccgcggaaggtggtaatgaatatggtggatctgcatctgagttttttgattttactgactctgggagctcggttgagtggactgaggagtcgtcggaggaggacttggactattttgcggccttggatgtggctgcggcggaggcctcaccacatgccgcggacgcgcaagatgtgccaggtcctagcaccgggcgccgacggcgaagggcggttgcaaagcgtagggttagtacggaggaaaggggtcggctccgtgtgagtaggactggtcggcaggaactgttgtctttgcccgccgccgcgagtacaggggaaggggaattgtggagtctttttgcgggtgaggagcttaggataatgttatttaattatagggagatgggaattattcctaaggttgagccgatgtag

SEQ ID NO: 31805 - DNA, 643 bp, Zea mays
  Peptide Sequence Number=SeqID_75180
atggccacctcgtcagcagagttcccacaagagaatgtgaggtacgaccttggacatgggtatgagcaaatgacctatgggccggttgtcggtgttttgtgtcggaccgcacacccggggaaaacaaccttcactatcacgaggaaaactcagcgcctccactccgagctatctccggcgtttgaggacgtcggggaaaaaaaaggcaagaaagggcgccgctccaccgatgggaagcgcaagcgccccccaagtcctccctcggaggactttggggactcggagtactcggaggaagtctcctccgagtatgatctctctcccgctctggcatcccccatggtgtcgtttgatgattcggatgactccatggggctgtccaacgcggagtgggtgtacatccggtccgtcgagcgcgcggggctcggcgggtcggatgactcagaggaggtctcctcgaaggcagtggtggactcatcagactcagaggagggcggcgacagcgaggtcgatggcgacgagggcgacagcggcagcagcagcaggggcggcgatggcagcagcaggggtggtgatggcagcggcgacgttgacggtggcgaaggcagtagcaggggtggcgacagcaagggcggcgacgacg

SEQ ID NO: 31806 - DNA, 186 bp, Zea mays
  Peptide Sequence Number=SeqID_75181
atgcagagcacaacgaagctacaaaaagtcgttcctaagggagcgcagcctagacttcagaaaggcaatagctgtgccccgagaagctaccagggcacagaagtcaccatgtccagctataacttcgtcaagatcatcaatttcaccttcaatatgctcgaaggcaccaggcaggtcttcagctga

SEQ ID NO: 31807 - DNA, 1128 bp, Zea mays
  Peptide Sequence Number=SeqID_75182
atgcaggtggcatgcaaccgcaccacggggacgcaccccttcgacttcgacgcatccagcatggaggcccaggcccacacgtcattgccacgactcgaggcaaccctgcgcgtggcccaacagtgccagtcgagcgcatcgatcactggtcagtcagccgtgggaggaggcgcgatggttgatatggccaaaagtgggccggcagtaatggcggcagcagaccggcggaaacggcggtcaaatcgtctgcaggctcacgtcccctcctggagcagcaggggagccctctcccatggcgtgaagatgacgtgcccgtgttccgtttctcgaatggctcgcgcaacgaccgccccgcaaaccactcgtcccatcgcattaactccgcagcagggcaaacgacaactttggcaggcgaagcgggcgacgtttcacctccgccatgatgaccgtgtcaaaaaaggggttcgaaggctggcccctcggaagggttcgacagccgccccagagcactcgggcttcaggctcattactgatcagaggttcgaaggctggcccctcggaagggttcaacagccgcctcagagcactcaggctccgcgcccactactgattaggggttcgaaggctggcccctcgaagggttcgacagccgcctcagagcactcagagcgagggatgactctgggtacgtccgatacatggccgaggctcgggctacactcccgaggtaccctacgacatttccgagaccagcaggagcgattttgtaacggaatcccaccagagggaggcatcgagccctcggaccctatcgaatgggaccggaaggaggtctccgcctcgcccgaccttagggctcggccccgcctcggcctcggaaggaggtttccgcctcgcccgaccctagggctcggccccgcctcggcctcggaaggtggtctccgcctcgcccgaccccagggctcggcctcaacctcgacctcagaaggaatcgcgtcctcaccccaccccggccttggcctcaggaggagtctccgcctcgcccgaccttgggctcgcaccgaccacgccacaggggggctcaagcgctcctccgacggccacgacaccgcatgcacagggctctag

SEQ ID NO: 31808 - DNA, 279 bp, Zea mays
  Peptide Sequence Number=SeqID_75183
atgtccctgatctctttgtccaactcctcctcctggagtgttggactggtggctttcctcttctggcttcgagcctctcaaagagaaagagtttcttggtttgggtccagcggctgcagtgtagcggtccctggtgctgaagctttcttcggcggcatgacgaaggctagaaaggaatcacggctcatgggtaaagtgtgcgacctttgcagagggttagaaactgatatatcagtcgtgctcatggttatgagcggccttgggatcctctttgattag

SEQ ID NO: 31809 - DNA, 1089 bp, Zea mays
  Peptide Sequence Number=SeqID_75184
atggggagcgcccgcgttgctttcgtcttgctgctgttggaggagcgcaacctcgcggatgttggcacccttcagccatcgctcggcttcaaggattttcatcacccgaactggggcggagggcggggcaagtcgggacctgcctccgcgtgggctggcgatccgcttcttcctccggcatccgggggacggaactatcctgcagctctgcggaggaggcgtcctccagccatgcgggggaaggtgaactactgctgcctggccagggtgcagcattccgtcctccgtccgggcgactgtggccggctgcacccgggggtcgcacaacacgtcgtacgccacgagggcggtactcgtgttctgggacggtcccattctcatttttgtggcgaggacaggagtgaggacctgccggtgcgctttggggtggccggcgctcgctggtgcagtgttggtgggcaggtggatgctatcgtcggtgctgaggtggtggcagccggagaaggtttctccgccgacgacaccgtcaatgccacctgcactccgggcctccagctctttggctttaatggctggttctcgtcccccgcgagggacgtgaacgagggccttccagcggtaacgttcgccctagggccatcgccgctgctgcagaggttgcaggcgagccacccggagtttgtcgtcccgcaggccctccgatgtggaggttgttcatacccacgggagtggaaccggagttccatttgtaatggcaccttgagtgccggtgtgacgagtgaggtatccgtatcccggaggcataggagtccctcggctcggtcgaccttgccactcaaggcttctcttgctcagttacagaaccctcggctgctctgcgatgagccggagccggaggcagcggtgtcaacatggacagaggcggagtcggctcgagaaggggcttcgtcggcccaggaacaggtggcttcccaggccaaggaggtgcagcagcagcggctagagcctggccaggtcatccgtgagcgggaccaacttcggagtcacgcttctgaggccgtgagccgggctgatgtcctcgggggatag

SEQ ID NO: 31810 - DNA, 296 bp, Zea mays
  Peptide Sequence Number=SeqID_75185
acgagcaagtgatcgaggaccccggtacccagcaggtggaaattactgagcaggagctcattaaagcagcttttggtggccagaagctccaaaaagctaaaacaaacaggggcctcataggagaagccgagacgttatgggctgccaaaacggctatgagcttgtccctgcacgcaactgatgccaccaaccgtgaaaaggagctcatgaaagcatgcacagagaccctgagctggaggctacaatcgtcgggaatgccgagatcacagcgcgagcgcctcgcctcactcaactga

SEQ ID NO: 31811 - DNA, 981 bp, Zea mays
  Peptide Sequence Number=SeqID_75186
atgaagctgaaacaatttgcttcttcatgtggttggtgcaaggttattcttcactgcgacggcaacgccaacagcgaacttggaggtgttgcggctctgcacaccccttgctgcaaaattaacttcgacagcaacaagaaggttttgatggaaccggtcgtattgaaccgagaaagagacgcagcggaccgcataaaacggatgcctatgttgttcgacgaccaccatgatgaagatttttatgggctacctcggaaatacagtattgtcgctcgggtagaagttaaattcccgattgaaccacgttatcatgatagacaacatttcattttatctgacatcaatggagccaagatcgaagccataacatatgtgtccgtgacagttaaacatttcaacaatttgctccatgaaaagcatgtttacaatatgcataacgtaaagtttggtcttcatccgggtgaatttaattttcgacatctaaatggtcccatggaattgtatttcaaccaacaaactatcgtggagccatacacatttccaattcaaatgccgccattcccaaaacatatattcttcaaccttgatgatattgctgagttgccaaacaggagtttagtcgacattatggctattgtagtccacatggatacaattcatcgcacaatgtggggccctttcagaaagattgttataatggatgctagggggtctttacatatcattaaagtttggggtgacctactaaacaaaaatgcactccgttgggcgttggctaaggaggattatggcataataattgggactatgtttaggcggttcagaaaacaagagttcctcgagtcttcggatcataccgcaatacacttcaatccattccatcacaacacccactattttggaccaattcaaaaagctttggtggcgcggaacaaccgtcagtttgctgttacatttcttgaagagcaaaggcgtagatag

SEQ ID NO: 31812 - DNA, 213 bp, Zea mays
  Peptide Sequence Number=SeqID_75187
atggagttccaagtaacacttgaggagcccgcggatcctaggcgcactcgatgttctaggattttgattcgagattctgaagaattccagccagttgtgcctgttgtgaaagccgagccacttaaaaatcagtgggctcatgaagatgttgaagaagatgatgtaaaagaatcatgggaagaagaggaggaggaggaattgcacgcatgttag

SEQ ID NO: 31813 - DNA, 1518 bp, Zea mays
  Peptide Sequence Number=SeqID_75188
atgaccgttgaacaaaaaaacgataaaagtagaaagcgtcgtgaagtaatccatcttggtccagttagtctttcagatggctgtggcacaattgatttcacaaactttgcaacacaagacggagacgaaaaaataaatgtgaatcaagatgatgatagcgattggttgcataggaatgagacattcaaggccgacgatgttttcacaacgagagaccttctgacaccaggcggtgtgcatgaaacggttggtaacacgtctaaccataatttggaaaaggccgcctactttagagagcggtacaaaaacttaactcccgccgagagggagtttaggcgtgaacgccttaggttgtacaatagtacaccaaagcggaaagggtcaaagatagagtacatacgaaaacgtagagcactgttggctgacacattgagtcatgagtccatcgccatggagtccccaacatatacccctaaggttgtacaccctacaacagatgccattgaacctgatggatccgcagttaccccctgcgactgggttatccctgaaatcgccagtaacccgttcctgccagcttcaacacagactgaggatgccaattcactgcatatgtctactggaccactaagacgtaaacaacatgtgccacatggtgaaagacaatctatcttagcccgtcgaaaccggcaatttgaagcatccatttcaaggaacatggctactgcgactgatgataccatcaatgacgctggggaaggggatgattggacacaaccccatattactgcaacgatcaacaacaatgtacaatgtaggagtcaatgccatggtgctatcgtggcaacaaatgagagtgcaagtatgaccgaacaaggaagtggggttgatcatacccagtcgaagccaagggtcatttccaatgttgatgacgatgacggtgtcgtatttgaagacgacgctgatgagaacgagggatacctattcgctgggcaatatgaggataccgatgaggatatagaggtcgatggtagtcaagatgaatcgactgccactgatgttcctgacccgtacgacaaggtttttaatggccatttctctttcacttccctatactgttgcctcgatagtatgacaactaatgtaagggattctggtatatacacgttccgagcacagggcatgatgtatcacaatatcaagtcatttggtagggatggtggggcagagcataaacaccttaatctttacttttatgatgatgatcccactctcgagcaacggtaccgtaagtgtcgcgaagagcatcaacagaaagacaaagaggttattcgacagatagtcgacatactacgtggaaacccgtactccgagcaccttaggaccatgggtcacgttgagaaccttgatgactatcgtatcgcgttgaacctagaccagacgttgaaccagaagacatataacacacctctcacttcggaggtggccgctgtctggatcgaagggagcgaagggtga

SEQ ID NO: 31814 - DNA, 369 bp, Zea mays
  Peptide Sequence Number=SeqID_75189
atgaagctccccaagccctcagacctagcagagcctcaccggagaccccgaatcaccctcgctggacttcttccgctcactggcgaatgtggaccgggtcagaatactcgtcgccgacgaactcccccgcttgcgcacgtggacccaccaactccggtcacctccgacgacgatccgcacatcgacgtgaccatcgtcacctccctgacctccctagacacctcaccggagcaatcttgccgccggaaattaagaaaggcaatgaaaaataatgaacatgggatgaacatatttttcctagtatacttaagtgataaagaacataggaaaaatacagagaaccctagtgcagaactaatccaaggttaa

SEQ ID NO: 31815 - DNA, 756 bp, Zea mays
  Peptide Sequence Number=SeqID_75190
atgaccgcgtcaaaaaagggaccgggaaagggggataccccgaaagggatccttccccgagaaggaaccaggctccgagcccctcctactgatcagaggccggcccctcagaagggttccacggccgcctcaggctactcgggctccgcgcccactactgatcagggcgggaacgatcttgtaacggaatcccatcagagggaggcatcgagccctcggaccccgtcgccaggggaccgggtctggcagatcacccgcagctcaccggagacaccatgttcggcgcccatcgagggcaacatggcgaggctcgggggctgctctcgcaaacccggctccgcccgaaccgttgacagcgtcaacataccagcccaagaacttgggacccgaccgtacacctgggctacggccaactcgcatgagggaacgaccagaccagccgaagcattacgcgaggcattaagacctcggaggagtgaaaccactcctccgaggcctcgggggctacacccggcgggtgcgctcgcgcgcacccaccggaacaaaacgcaaccgagaaaggctggtccccttgcaaaaaagtgcgacgaaagcctccaagcgagtgctaacactccctttgaggctcgagggctactgtcgggcaccataattaggggtaccctcaaggctcctaattctcagctgggctcggactcgggctcagtcccggaagacggcgaactccgcccgacccagggctcggactcgggctaa

SEQ ID NO: 31816 - DNA, 57 bp, Zea mays
  Peptide Sequence Number=SeqID_75191
atggagtccggaccgttcggcctcaaggcccggaccatccggtggggcagagcttga

SEQ ID NO: 31817 - DNA, 1857 bp, Zea mays
  Peptide Sequence Number=SeqID_75192
atggaatctctatttgtaggcttgtctcataacaagccaaaaaaatcggtggcaaccgcaatagttcgagaagttttatatcatgactggttgctcctagactatatttgcacgcaaggtgatcttgctctcatcgattttatcaaggaaatcccttgtgaaccaagggtagaagtcgttcttattgatgatgcctttgttgaaaggaagtggatggagtgtttatttcagccgagcgcatatttaggtgacgaggttatagactgttacataaatttgataaaagctcaaaagcatctaaagtgccgatctggaggtcgcgttcacatagaaaatgctttccagttcaatttcctgaagcaagatggtgatcttgaaattaaaacagaggagctatatccaattaaagacatggcacacatatgtagcgctgaacgaagggtgttactttacctagaccatgacatggtgtttattccgataaacatccgagagacgcactggtatcttgctgtgatccatgcaagaaatatggagatacaagtgctcgattcacttggtacttcacaagaccgcaaagacctcactgactctattaaaggactgcaaatacaaatagatatgatatctcaacgtaaggagttaaaagaccacaggtggccagacctccaagttgcttcttggccgctcagagaaataaacatgggatatgcaaagcagacagatagctcttcatgtggcctctttcttttgaactatatcgaatactggacaggggatgaactgtctaacagttttacccaggatgacatgtcacactttaggaaaaaaatggctgctatattactatctttagacctgaataagagaagggggtgtctgttatacaaaaatgaaaaagaagttgactctagaagcccatctgatgttgagctattagaaaacccaacagattctaataagaggaaactactccacgtgcttgatgatagcgaagtagtgtatgaagatgaggaaggccctattactcaagcagacttgcaaaggtggtttgttgatgattgggataaaagagctcctgtaaaagtctctaccgatggttgcaccaatgactttttaatggttggtctttccacaaaggacatgccagtgaccaaagccgattcaatagatgttttatgtgattatatcatgttaatagaagatgatacgacactagagagaacatgggtgcgaagtttcaatccttttaagatagaaatatctgtcaaagacctacaaaacatattaacgacaactcaagatatgattctaagatgttttgatatggctgttcggctgcttgccaataaagagtcacgtaggccgaaacaagaaatcataaataatagaaagcattatatggacatgcgtttttggagaatggttggttttggtaaacttccaaagtaccatcaggatcctacaacagaagagttagccaaaacactcgattgttggccatcaatgaattattatatcacgggttgtagatatgttctcatgccatggaaattcaatggatgttacgccctcttcataatagatcatgttaaaaagcatgtgacttttatcgactttacaccgactcaagattggtgtaaacacatgccatacaagaggtttaataccagctacctcgtcctacaagctatggccatgtgggggaatgacagaccactgaaatttgttggggatgcaaagactcttcgaaggaactttgtgattgaccttttaagttatgaggacaattcgtgccgatatgccatccctgcaaacatacaacaaagacttatcgatatcgctaaaaaggattag

SEQ ID NO: 31818 - DNA, 744 bp, Zea mays
  Peptide Sequence Number=SeqID_75193
atggggactaggtggagtccaacgacattgcgcaggggcttggcgtgggacgtggagctcgctgcgcacgatgtcactgcagcagtccagcaacagggaagaaacccgctgttttctggcgcgttaattgccgatgtggaggaagtcgagggcgcgatggagctcaccatggatctcggtgttcggctgtcgtgctggccatgtggagcagagggagacacaggggccgacggccatggggagaagtggtcggtgcagggagcgtatatatactgcgcacaagccaaggggtgcggaggcagggaaatcaaatcccaacaacccggagcgatcccggcggaggcggacccgctggggctgctgccggcgggccacctcttcttccagcttctggtggtggcaaacaccctccagctctgcggaggagatgtcctccagccatgccggggaaggcgaactgttgctgcccagctaggatgcaaaattccgccctcttccttgcattcgcggcaaggacggcagcgaggacctgctggtgcgcttaggagcggcccgctctttggctttaatagctggttcgtgtcccttgagagggaacgcgaacgagagccctccggcggccgcgtccgtcctgggaccatggctgctgcggccgaggtcgctggcgggtcccccggtgttcgtcgctccgcaggctcgaggttgttcatacccgcggggacggaaccagagttccgtttgtaa

SEQ ID NO: 31819 - DNA, 393 bp, Zea mays
  Peptide Sequence Number=SeqID_75194
atggaaagcccaagtaccctcgccgcttgcaatgcttggcactattgccatcaattttgttgcactgcatacagcttcaaggaatcaagataccaaagtaaccttggtaacaacaataagagggttgacctctttgatatgtgtgctggaagtagtgagcctgctgctgaggacaacattcaaatggcatcagaaaatggaggctggaattacaacgggaacaaaggaggtggtggtggccgaggacgaggcaactggggatatggtgatttagtcatgactaaaaatttgagtccatttttggggtccttttttatttcggccataattactgaaatcaatgaaaagcttggtgttgctgtgcaagaaggtgataccgattgtgatgcttaa

SEQ ID NO: 31820 - DNA, 483 bp, Zea mays
  Peptide Sequence Number=SeqID_75195
atgtcggggagcgagaagggggcggctgaaccaacgcgaggtgatggccacccacgccgtggatgttactgcagcctgctgctactttccaccactgccgaagcagcaggcaggcagaggttggattggattggacggagaaagaagaagtgccatcatgtccccgagtcccacgtcgacggcggaggtcgaggtcgtcgtgggccgtcggggtcggggcacgacctcaccaggcctcctgctcctccatggactggggccaccaacggtgatggtagtattacgtgggcccgccccgcctccgagcgcatcggccgtcgtgccagcgcagagcacggcccatccaagacgcctcgggcgcaacagggagttccgcctcgcctgaccccagcttcggccttggaaggaatcgtcgccacgcccgacccaggtctcggcctcagcctcggcctcggaaggaggtcttcgcctcgcccgacctag

SEQ ID NO: 31821 - DNA, 1349 bp, Zea mays
  Peptide Sequence Number=SeqID_75196
caacggggcacggacgccgccacgaggcctccaccacctcgtcttcgtcgtcgtcctccacggcctcggctcagaaacgaaggggggagtcgcagcagcaggccgccgtcgtcccggcgacgccgggtccggcgctgcagttcctcgcgagccccgcgcaccaccacaaccacccccagacccagctcgtcgccccgaggaggtcggtgccgtccaagtgggaggacgcggagaagtggctgcggcagtcgtcgtcgtcctcgggttccgaccaccacctccacggcaacgcgagggccgccttctccaggcagcggagcggcgggctcggacaccgaggcggcgccggaggcgggggtggggacgagaagagcgcggcggtggcggtgaggaggtcggtggacgcgctccgggacgcccactcgctcgcgctgtacgcggcgccggcagcggaggtgctcctcaaagacaagttcaccgacaatgaggagccgtccaaggagagcttcgtgttccggagctcgtgctgcgaggctgctgaaccggcgaagggcgccgacgacgacgacgacggtcgctgccagcggaggagggacgtcggcacggagacgacgccgctgggcagctcgtgtcacacgccgctcaagagcgcgtccccggcgcggcacaacacgccggcgagccggtcgtcgggcccgctggtgccgtacgccggcggcggcggcgggacggacatctcggagctggcgggattccgcctcgccaagctggacctgggcgcgcggttcggcgcccacgccacgctcgtcggctggagctccaaggaggaggaagaggacgacgaggacgtgtccaagagcctcaggcacttcgaggccaccgtcggcgggatagcctgcgatagacgcggcggcgactgccgttgggatgacgacgacagggccaagagctgtatcaggtatcagagggaagaggcgaagatccaggcctgggttaacctggagagcgccaaggctgaagcgcagtcaagaaagctggaggtgaagatccagaagatgcggtgcaacctagaggagaagctgatgcggcggatgacgacggtgcagcggcgcgcgggggagtggcgcgccacggcgcgggcgcagcacctccagcagctgcggcgcgcggccgcccacggcgacggcgacggacggcggctcagggccacggccacgtccacggcccaccaccaccgccacctgccgggcagcagcgaggcgccctcctgcgcctgcttcccctgcagcaccagcaccagcggcggcggtaacaacgtcgtcagcggcggcctcctcagctactactag

SEQ ID NO: 31822 - DNA, 1266 bp, Zea mays
  Peptide Sequence Number=SeqID_75197
atgacatcacatagacctgcaggagagatagctgctattgtggaaggtgtggacatcatatcggactccactgttggcgctgctcgtgctcagagtttctctggaaccagtgctagccacacttggccccgtagtactttttattggcagctttcagacccactagttgatcttctcggaagcgttcatgagaatatgtcagaaggaggaagtagacggaatagtttcttcccagtcttcaacagtttttcttttccagagcatgaacatatgaatgaacacagggatggtaacagtgatcaacagactagggagacttattatgctggagaagctaataatggagatggtttaagggcttctctgctttctcaggcagcaagtgttgaagtaaatgatacaaatacctcttttacttctgaagggagctcttcatatttaagaaggcatggaacatcagtgcttgcacaagagtttatggcgtctatacatgattatgacattgaagaagaagaagaagaaatccatgggtttgcattgcctcaccagtctgcacctcgtgatatggaaagcaccgggagacatccattcagacatcaaatagtccggttatctgaaacagctgatatgaagtttaaatggcggtctacaggaatcagtggtcttctccgctgcgctcctgaaatatttgagcagtctggagtggctagtttgttttcagacattggactttctcctcattcaacatcaattctcatgagtacccttaatgctttgctgatactcccttgtataactgccgcaatgctgctgatggatgtctgcgggagaagggttattgtgctggccactactcctgtcctgatactatcattgagtgttatgtctatgtccaccctggtgaatatgggaccgttcgaaagtgccgtcctcttccacttcgcattaaccatttgcttctggtcctatgtcattggtttgggaccgataccaaacattctctgctccgagatattcccaaccaaggcccgtgcgacatgtgcaagtttctgttcgctttccttctggtttgggggcctgctttcagcgtactgcttcccggtgatgttgagcaccatcgggcttggcggagcgtgtgggatctatgcacttgtgtgctgcgctccgctttttctcgtctactatcgaataccagagacgaagatgcttaacctggagctcattgcggagctgttcaagctttcaaggcaggagcatgtacagtag

SEQ ID NO: 31823 - DNA, 525 bp, Zea mays
  Peptide Sequence Number=SeqID_75198
atggtgacctccagcttgatggtgggggaaagcgagccgggctgcgacctctgcccctccctcagcctcaaggattttcatcaccagggctggggaggggactgcagcgtgcccggtcttcagacgcgagtggcttcggagccgctcgcggcgccggcgtctgccacggcagctggaagaggttcttccaccggcgcgatagccggggccgaccacgggctgacctccaactctacggccttctgcccgtccttgcctcacgagttttggcatgggcgggggcctcctggcagcggcatccaccctgaggtcagcgttgccgctgttcggcccccggagcagaagtcgtcgtcgtcgccgctgctggagcaggtgacggcgcgccgttcgtcggccttccattgctccgcaggccttccccctcggagtggggttgttcgtacctgtggagggggaaccggagttccgtttgtaatggcacttcgaatgccagtgtttttgttcattgtggctgtcgaggcctga

SEQ ID NO: 31824 - DNA, 735 bp, Zea mays
  Peptide Sequence Number=SeqID_75199
atggattctgccgccgagctttgtgcccagaagttgtccttggcggctgttgtagcccgtgacacactgaatgcttctgttgccgcgagtattgttgctggtgattattgcgccacattttcgttaggtaacaatgtggtttctactcttgatgttcttgaattcgctgtggcggcggaaaatagtgctttgcgttcttacaaacaggcgagtgcagccgtcgattgtgctaaggagacagtggccaaatattctgagaactgcctagtacatatgatgattttaaaaaaaactgagggctgtccatatgtggttcatattagtagttgccatgtgtcagccagtttggttcagttcatggtgaaccgaaaactagcgcaagcactcagatatgccatgtctcaaatgagtgatacggctaagaaacttcaagatactgcctctttgtgctacacaaatgaagaagttgtagacggtttcaagctgactcaagtagctcgttcaatggacgagttagctgaaatgcttgaagtaactgcaattgactgccaggtctcgatgatggatccaactactatgttagaagctggctatgctagtgaagatactgcggtgtgggaggacgtattccgtgaccgagaaataatgaatcaaccattagaagcggagacacttgctgagcactgtgctaagtgggggcttaattacaatgagatctgggatagatcagtgtaa

SEQ ID NO: 31825 - DNA, 474 bp, Zea mays
  Peptide Sequence Number=SeqID_75200
atggtgactagggtttgccttttgagtccgctggattgggcctgggaacgaggattcattaccgggccgggcccttcatatttggtctctgtccttgaaaccctctggattcattccgccgcagccggcagcggcgcgccgtgtgctgacgcggccgcattttcgggttggggtctttgcaggacggagtatgaccgtcgcggccggcgagctcgaagacgaagacggcgtgcgcgggcggagccgtggcccgtgtcgtcagagcaggagcgggagcgggtggcggagcgtgggcgccgctcgccctgggtgttcagcagccgagacgtcgctgttgctgccgcgcccaagccgcccgcggacccgagcagcgggcgccgggccgaggacgaggtgcagctggccgccggtgcgcggcgcgggaacgcgaccgcggcgcgcttgaagctcaggctgcgcaggctttgcgcgtag

SEQ ID NO: 31826 - DNA, 270 bp, Zea mays
  Peptide Sequence Number=SeqID_75201
atggccttcgccggcaacgccgacgactcggcggaggactattccgcggaggccaccgtggtgcgcttcgacccgccgctccctctcctccgggcgccagtcccctccccagcatctagcggcgagggccccgtcctcgccttccgcgacgccgcgagctggcgagccgcctgggaggccgccgaggccagcctcgtctcccagtgcgagctggccgaggtgcctcgcggtagtcatgcaaggcacttctcaagcatgccggttatgtag

SEQ ID NO: 31827 - DNA, 492 bp, Zea mays
  Peptide Sequence Number=SeqID_75202
atgcagcagcagatgcccatgccgccggcgcccgctgccgccgcggcggcggcgcccccggcggccggcatcactaccgagcagatccagaagatgatgcagcctggtatagtgcctggtgcggggcattacatgtcacaagtaccaatgttccctccaagaaccccattaaccccacagcagatgcaggagcagcagcaacaacaacagtttcagcagcagcagcagcaagtgcaggctcttacatttcctggacagatggtcatgagaccaggcaccatcaacggtatgcagcagcagcagcctatgcaggctgaccctgcccgggcagcagcggagctgcagcaggcagcacctatcccagctgacgggcgaggaagcaagcaggacaccgcgggtggggcgagctcagagccttctgccaatgagagccacaagagcgccaccggagcagataccgaggcaggtggcgacgtggccgagaaatcctaa

SEQ ID NO: 31828 - DNA, 210 bp, Zea mays
  Peptide Sequence Number=SeqID_75203
atgggggatgagaaggaagcttgtatgatgtacgagagtatgcgtcatgcagaaattgttccagatggaaagctgtgttgcattttgggcattggcaatgacatgggtgattgtgatgattctcagaaagcgaaggcacataagcaacaacaactcttcagagttcagattgctgtcgctgcttctttttctgaaacagaaacaacaaag

SEQ ID NO: 31829 - DNA, 237 bp, Zea mays
  Peptide Sequence Number=SeqID_75204
atggccgcctgcctggaggcggcgagggaggcctgcgctaagttcgcgaaggcaaaatgcgcggggccattccaggacgcaaggatcgcccacgagggcgtcctagcgaacacgggtttcgatgtgtggggggccgctgctgacaagagttcctcaacggcggcggcggccgcctgtgccctgaacggccagccgccgcggagggagaaggcacggagcggaggccttgtccgctga

SEQ ID NO: 31830 - DNA, 405 bp, Zea mays
  Peptide Sequence Number=SeqID_75205
atggcctcgaaccacccagccctaatgggtcagcactccttgaagcaggtcgctgcattggggattggcggcggagccagccagtccatctatgatggcggcttccagggcatcaatactgtcaccggcacaacttccgcccagcagcagcagcagctcatagccaggggcggacccacaggggggtccgggtgggctctggcacaccctaagccaggcccaccggggaccccacccggccacccgttcagccgtcgagatgccgtttcaacttctccagactctagttctctgatttttgcggttgttcgactgttcctggcgtcctggcggttggagacctggccactgcgagaagagttcctggcggctggcttcctggcagccggagtagtggagtggtga

SEQ ID NO: 31831 - DNA, 951 bp, Zea mays
  Peptide Sequence Number=SeqID_75206
atgtcggggcttctcttcgagcggcggctcatcgagcgctacattgaggaccatagcaagtgccccatcaccaaggaggagcttactatggatgatatcgtgccgatcaagaccaacaaggtcgtgaagcctaggcctttgcaggctacaagcattccaggactccttgggatttttcagaacgagtgggatgttctcatgctttctaattttgctttggagcggcagctacacacagcaagacaagaacttagtcatgcgctctaccaggctaggggattgaagaagcacttgaagaggctcaataagcccaagcattggatgctcgacaagcttggtggagcttttagatcatttccacccttgctacagattgtcaactcggttgtgatgaatcttgttgttgttgaagatggttgccacatccaaggttctgttgtatgtaataatgttcagctgcaagaacgagcggttattgagagattgccagatgtggtatttgaagaagggagaccttgggactgggacagttcaaagtgcagcacagatcaacaagagaatgacacttttattgttcactatgatctaactgaccaaaacatggcaacagctggggatgatagtaacccaacactgtcagatcaaagtacaggaggagaaaattcagttggccaaagcagtggaacaggacaagctaatgaacctgcttctccatacactccaatatcaagtatgatgcaaaatcaagggatgggaactccatctgttcaacaatcagagagctcaaggtcaggaccatacaggttcagaacattgactgatttgtttgatgcaactgaacaagtgcatgactttgagtatagtggagtgtgcatgctgtcagctgatgaacctgcttgtgtgggacaggctctttccacaggactgctggaaaagagctatggaggttga

SEQ ID NO: 31832 - DNA, 282 bp, Zea mays
  Peptide Sequence Number=SeqID_75207
atggcgatggcagacatgcgagcgctcgggactggcaggatccggtgcggacggagcatggctctggccgatgcgtgggcaggtgagccggcgaggatggggcgtggctctggccgatgcgcggacaggtggttccggcatggacagaaggggtccacggtgggcagacagcgagttcgcggttggcggacggacgcggcaccgtcacaggcaatgcaactgagatgggatcggcgacggcagacttccataggggcgagctgtgacggcggcatcccctag

SEQ ID NO: 31833 - DNA, 246 bp, Zea mays
  Peptide Sequence Number=SeqID_75208
atggctgacgaagccattaaaaagaatgagaaagaatctcacgacgcccgtgacgaagctaaacaagatgccaaacgtgccatgattatagccggcctctctcccccaccggagccatacaaccccgaagctgatccagttatgaaggcagctctagatgttatgcaaattgcaaacgaagttgttgacgaagtcgtcgacaaacttttacatgaagttgctgaaagaattctgaaggaagaatag

SEQ ID NO: 31834 - DNA, 309 bp, Zea mays
  Peptide Sequence Number=SeqID_75209
atggcaaagaatgtgggattcccgaagctagagcttggcttatctgcgatgtcgaaggatgatcttgcagacagccttgcttataatagcttgaagacttgggaggcaaaaacacctagtgggaggccaacatcctcccgcggcttcactgctgaggttcttctttgggcaccacctaagaacaaaaatagtaaaagtctgttgtttcctcacctacaacaacatgggttcgaaaaccctgagtacggagtgtactttcacaagtcttacccgtcaaaagaaaagactctcaaggatatgctagtttga

SEQ ID NO: 31835 - DNA, 663 bp, Zea mays
  Peptide Sequence Number=SeqID_75210
atgaacgtatgtgagctcactcttgctgtctcacacacccccccacaggtcaagaacagcacacctggtgattatgttcgcgcccgggtcttggtgccccgaaacccggaagccgaccggtgggacccatcgtgcaggctcacactccaccgcggtcgcactcactggcttgcgggccctccctgtcaggcgcctacctccctcttccttcgctgcgcaaatcgggcgagctcggcatggcgcgattcgcggattccgttggggtgggccgcgaacggacttcgggcggccataagaggaccagaaccggatccttatccccctctcccctctgtagccccaacttctcatcgccaccagaacgccgtcgcgcgccgtgtgaggagattcggtccgctgtcgtcgaccggtcgattcctcagcgattgggccgaggtctggggtgcgggagcttcacctggtccggtgggtcacggctggaacctttccttggcgcatcgcgcggcagacgaccaggaattcctcgccgtcgctgcacttccgccgtgcgtcgcgggcagggcggaatatcgcttggattctgccgccgatgggggatccaacggctgggatcaaataccggttcatggtgtgggcaggctgatctgggcgctcaatctctga

SEQ ID NO: 31836 - DNA, 93 bp, Zea mays
  Peptide Sequence Number=SeqID_75211
atggcgccgccgtggaagtccgccgccgccgtgtctagtgaggggatttggcgcccagtccaggaagttaagaaatcagataaaaggttttag

SEQ ID NO: 31837 - DNA, 609 bp, Zea mays
  Peptide Sequence Number=SeqID_75212
atgggcggtggccgtgaatttcgagcaagacgcgcggcggtcggaggtggagaagaacactggcgcagtgaatacgtgttcaacgtcgtggcagctattccgagttcaaaaccaaatcggataggactacacgatgctaacgctattgcgaacctgggtggagggtactcaccggaaatcgagggtcgaacgaggccggccacgacgcatggcggcatcatggtgtcgctgcgcgacggcgaggaattgctgtggcaccgcggcctctcccttcgattgcggcaacgggtggcacccccaagtgccaacaacccaccctggcccttcaccgaggtcagacagcccacggtgacgggattcgcaggcggcggaccagatttcactctgcctctccgctacagctatggaagggaggagggaaggcgcagggaaaagggaagggcgagtggaatgagtcggcgaccgaagcttttatgcaccagcgtggtccacgcggtccggtcctggcaggggaagttcgccggagatatcggaggtcgccgcgcggagtttgttagcgtgagcgcgatcgatctgacggcctggtcccaccggtcatggacggagtga

SEQ ID NO: 31838 - DNA, 119 bp, Zea mays
  Peptide Sequence Number=SeqID_75213
atggatctatcaaaggccttgataggttcaacatcggaaaagatgtacctctgccaggaccttgtcgatgtaggcttgatgatcgaggaccctttaactggtcacatgcctcgtcatgg

SEQ ID NO: 31839 - DNA, 465 bp, Zea mays
  Peptide Sequence Number=SeqID_75214
atgggagcggtggcttggcagcagcaccgcaccctggcgaggcatcaaccgctcccagtcattggtcaagttcgcagcggcgccaaggcaagggagggacgtgctggggaggttgacggcgagctacaagcaggctggacaaacgcagggcgcaatccggaggagaggcgtgcgaccgaagttgagcagagggcaggggcacaacggaggagatttccatggggaacagggagggttggccttctattttatctcagcgtcgagcccgactttagggggagaagcggtcggcgaagagcgagatgcgtgtggtgcccgtacgaacggcccaagcttcgcggagctattccacccaccacccgcgcaggaatcggagaagagattgggagaggaaatggggatgaacctgaccgcgagggcccacctctttcaagtttcaaatcccaattcaaaccagggttctag

SEQ ID NO: 31840 - DNA, 363 bp, Zea mays
  Peptide Sequence Number=SeqID_75215
atggtccccgaggcggtggcggcgctgcagctcgtcaagggccccgtcggggtcgtctacagcaccgtgcctgcgaagaaaccacggtgcgtgcttggtgtgcacaccacgcctggagacactcacgcggttcatcagaaattcagaatcatcatccgcaagttgatgtcgtcgaggtactatgtgtcatttgcgtcccagctggagtctcgtgcggtgcgagtggaacaatcacagcagtttttctttcgttcgaagtcaacgaatgttaggcttttagcggacttgacaagatgtgcatgcttcttcggcaagaatgtatggttttcatcgcatattaagctggccagctggggtatttga

SEQ ID NO: 31841 - DNA, 507 bp, Zea mays
  Peptide Sequence Number=SeqID_75216
atgcaggcggcatgcaaccgcgccaagtgggcgcacccctccgacttccaacgcacccagcatggaggcccaggcccacgtgtcatgcaaccggcgcgccggttgctacgtgcgagcaactgcaccgccactcgcaccactaccacgcgtcctcgactgcggaaccagtaccacgacttgaggcaaccctgcgtaccgggaaagggggataccccgaaaaggatccttctccgtgaaggaaacaggccccgagcctccctactgatcagaggttcaaaggctggcccctcggaggggttcaacatccgcctcagagcgcctgggttccgcgcccactactggtcagaggttcgaaggctggcccctcggaagggttcaacggccgcctcaggccactcgggctctgcgcccactactgatcaggggttcgtaggctggccctcgaagggttcaacggccgcctcaggccactcgggctccccgcctcagacacagagcgagggatga

SEQ ID NO: 31842 - DNA, 412 bp, Zea mays
  Peptide Sequence Number=SeqID_75217
atgcaagagttgatggctcagcagaatgcgattctgcgacagttggctcaacatcagccgccaccccagccttatggtggtggtgatcaccatcaacgtcccccagcagcagccacttatcaagagttcctcagcacacagccgtcgttgttcactcgggcagaggatccacttgatgctgataggttgcgcatctttacccacaagtcatgttacccatcttccaagggatcgcgacttcccatacacctctaccgaggaggcgtggcagggaccgccatcgcagcaaaatcctcccgagggcctccctacactgaccactcccctactgcccttgcccctttcgggtaccaggatgatcttcaggtgacacgtgttctcactgctaaacgtagcaatatagacaaacatg

SEQ ID NO: 31843 - DNA, 507 bp, Zea mays
  Peptide Sequence Number=SeqID_75218
atggcggggcggggcttcgccgacgggggaggtagggcggtggtgtcggaactcgccggagcggcatggccggactgcgcgggcggcttgctggggctggcagagatcactgaccgagaatggagcagcaaggcgcgtgcaggggagagtagagctcagccaatgcccagccatgacatgctgcgcacgacgaaaatgaagagggggggggggggtagacacagaccttggggcgagctcgaacgaaggtggctcggcggggctctgggcgcgagagttcgacagcatgcgacgaatgacggcgtgcgcggcggggactcctccgcacggcgcagcagcgtgcttagcgcatgccggacggggtggctccgagcgctggctgcgcgggcgtcgagggcagggggcgcaagtgcggtggttgttttggagagcactagtacagagaagctctatagtgacggtcgtaaacctatttttagtggcgtttatcgtaaccgccagtgctag

SEQ ID NO: 31844 - DNA, 261 bp, Zea mays
  Peptide Sequence Number=SeqID_75219
atgagggtggaatgggacgcccttagcttaataattagaggaaccgggtgtagttcgcttcgtcgtcgtgccgttaatggggctcggtgtatgcggctcgctctgccaaggttggttcgccccttggggaggagtggtgacgaggatgatggttatgattatgactatggtaatggttgtccatgttgcaaccactgctcaggagaagatgaagtcgtggaggaggacttccaggagttccaagagtacgatgagttctag

SEQ ID NO: 31845 - DNA, 219 bp, Zea mays
  Peptide Sequence Number=SeqID_75220
atggcctcgcttgcgcaggggcagaagcagccatgccccgctagcggcgtcattgaccccgttgagacaccccgctatccttgctgtttttgcattcgtggtgttctacgaaatgctaaattcgtaaactcttgtgttatcgcagcaaccgtcgatgtcgcgcttcgcgctggtccattcggcgaaatgtcgagccatgtggacagcccctgcgactag

SEQ ID NO: 31846 - DNA, 258 bp, Zea mays
  Peptide Sequence Number=SeqID_75221
atggcgtctgggtcccctgtgtctccttccatggctccagccgcccctctcctttcttccccccactcggacctccacttcccacagggcaccaccggcgtttgcccctgcatgttccctattcccctcgatctagcagcaggagcaatgccgcccaactctagtgacctgctcctctcttccccacaaaacagcagccgcagcgagctcgccgtcacccatgtttcaatgcctggaacgcagcagcagccagtgtag

SEQ ID NO: 31847 - DNA, 135 bp, Zea mays
  Peptide Sequence Number=SeqID_75222
atggcggtcattgaggcaatgcctcaggcgatggactggcctcctcagctgcttaagaagtgtctccgtgtccctgaagaacagttaccaatggaagagcttagtgttcagggtgatttgacttatacagaataa

SEQ ID NO: 31848 - DNA, 252 bp, Zea mays
  Peptide Sequence Number=SeqID_75223
atgaacatgtgtgagctcacccttgatgtctcacacccccacaggtcaaggacagttgggcatcttagcatgtaccatcataagatggtcaataccaggaagggcggtggaattgatctaccccctattcggggccttcggcttccgaaggtaccttcagacttgaatcaaaaccacagtgtgaagaagtacaaggaatacgaaggatggtgcagagccgaagctatgcgtaggggagcttcggcaagatag

SEQ ID NO: 31849 - DNA, 273 bp, Zea mays
  Peptide Sequence Number=SeqID_75224
atgctcctcgcacgcatcaaggccatgattcgcaatgaggagggtgattcgaatacgatggagctactcaccgcagctggagggcaatggagggagctggccacggaggacagtgggttcgcggtctctggtgaagaaatcccgagctcgggtgccccccggctccatatgcttgagggtgcccgcaacaccatccatgcgcaccgcgctccaccctggtcgagttcccgaggcccgaacgacatcccaggcgaggctaggttttcaacatga

SEQ ID NO: 31850 - DNA, 150 bp, Zea mays
  Peptide Sequence Number=SeqID_75225
atggggaagcctggcccatcactcctcgtgctcctcctctgccaagtgaccacacttgtacccaccataaccggaatgggagaccacgtctcaggtcacgtgaggagggcaatctgcgggcaggttcactcaggcttggtagtggtttag

SEQ ID NO: 31851 - DNA, 810 bp, Zea mays
  Peptide Sequence Number=SeqID_75226
atgagccagccagagtatgatggtcgtgaatttgtcgagcatggcatagagaagtgtgtcgtgactgtatacattggatccagtccgcaccatgtggaatggagtgtcactgctgctgggcacagatacaaagacacctgccaagtcgtcgcccgcaaggcattgaggaccctgtgtcagatctatgaagaagaagtggccgacaccccgctcagattctttccgccctttcagagaaaccgtccagtttggatggctaggatgcgtgcattggaagggaagcagctgcttgaggacgaccccacagtcgtgcacctcactgcgtacctgctcaccctggatgcccagtatgatttcttggctcggcaccaccagccctgcggatccaagagcccgcttcatccaaccctgttcaacccaggagagctgaagatccccagattctttgaaggtcacccggtctctaccagaggagaaaagaaggcttgggaactaccagaaggagccatagtcttggaaggaattccagtcttccctcgggctatggataagaaagagcaccacgagtcctcccaagatcccccgccagagttgtttgagcccctcaccatgaataagattccagcaccatcccttgaagtcaaggaaaaagctgcaagcaccccgccagcaccgccgccctctgaggagctacaagagccagtccagcttgaagaagagttcaaccccgtgttgccatctcagtcgccgccagaagaagtcatcaacatcagctccctgtttacccatccaggagatgtctcagattga

SEQ ID NO: 31852 - DNA, 174 bp, Zea mays
  Peptide Sequence Number=SeqID_75227
atggagagtcatgatctccgggcagaatgggaatcacggcttgtgggtggttatgagatcgatggttttggttatgactatggtgctggttgtcagcattgcaaccactgctcaggcgaagatgaagctgtggaaggagacttccaggagttccaagactacgacgagttctag

SEQ ID NO: 31853 - DNA, 684 bp, Zea mays
  Peptide Sequence Number=SeqID_75228
atgtcgtcggtcccggactgctccgacgccatcgtccccaacagcaagcgacggcgccaccggtcgccgcccgccgcttcatcctcctcctcgcacagcagcagcaccacacagaaagaggaactggaagacgaggaggaggacatggccaaatgcctcatcctcctcgcccagggccccgccgccattgaggcagctagagtaatgccggcaccccgtagcaggccaaagagcacggggagccgcaggttcttggccgccgccgaggccagaggtggtgtgtgcgtgtcgtacgagtgcaagacgtgcaacaggtgcttcccctctttccaggccctcggcggccaccgcaccagccacaacaagcatccgcgacggccagcagaggaggtgctggcggcaatggccatcaccaccacgcttagcctagcggcgacgaggcccgcgcacgagtgctcgtcatgcggctccgtgttcacgtccggccaagcgctcggcgggcacatgaggcgccaccggccgctcaccaccaccagctcgtcgcccgccacggggaccgaggaccaacaagacagcagtagcaagctgctgcaggagagtagaatcaacctggagctggacctcaacctgctgccgtcgacggagcaggagaagaccatcatgacctggaaaacaaacgaatga

SEQ ID NO: 31854 - DNA, 207 bp, Zea mays
  Peptide Sequence Number=SeqID_75229
atggcttcaaggccatcaagggagtattggagaggagaaacagctgcaataaactccattacacgcgaggagaagaacgtgttacaccaactcagattttggagacagcagatcgagtcactcggagaagcaccatcagtatgtgcaaagtcaaatggggccatcactcagaagaagaagcaacctgggaaagagaagatgatttga

SEQ ID NO: 31855 - DNA, 3051 bp, Zea mays
  Peptide Sequence Number=SeqID_75230
atgacgtggttccgcgccgcatcgggtgccgcccgcctcgccctccgccgcagcctcgccacccgcacgccgccagccgccgccacccgatgcggccgctgcttccactccaccgctatgcgtccccgctccgccgcccccgtgccccgggccgtcccgctctcgcgcctctctgacagcttcctcgacggtaccagcagcgtctacctcgaggagctccagcggacctgggaggctgacccttcctccgtcgacgagtcatgggacaacttcttccgcaacttcgtcgcccaggcctctccttccgccggcgtctccggccagaccatccaggagagcatgcagctcctcctcctcgtcagggcctaccaagtcaacggccacatgatggccaagctcgaccccctgggcctcgacgacagagccgtccccgaagatctccgcctcggcctctacggcttcacagaggccgacctcgatagggagttcttcctcggcgtctggaggatgtccggttttctctccgagaaccgccccgtgctcacactccgtgagatcctcaacaagctccagcaggcatactgtggacccatcggctacgagtacatgcacatccctgatagagacaagtgcaactggctcagggaaaagatcgagactgccaagcccaaggaatataacaaggaccgccgccttgtcatgcttgacaggcttatctggagcacccagtttgagaatttcctagccaccaagtgggccaccgccaagaggtttggccttgagggtggtgagacgctcatccctggcatgaaggagatgttcgatagggctgctgacctcggtgttgagaacattgtcatcggtatgccgcataggggaaggctcaatgtccttggtaatgtcgttcgcaagccactgtctcagatattcagcgagttcactggcggcacaaggcctgttgaaggcgaagatggtctctacaccggaactggtgatgtcaagtaccacctgggtacctcctatgatcgcccaactcgaggcggcaacaggatccatttgtccttggttgccaatcccagccatctggaagccgttgatcctgttgtcattggcaagacgcgtgctaagcagttctactccaatgatgctgacaggacaaagaacatgggtattctgatccacggagatggcagctttgctggccagggtgtggtctatgagacactccatctaagtgccctcccaaactacactactggtggaaccattcatattgttgtcaataaccaagttgcctttacgactgatccaagagctggcaggtcctcccagtactgcacagatgttgccaaagccctgaatgctcctatattccatgtaaatggcgacgatttagaggctgttgtttgtgtttgtgagcttgcagcggagtggcgccagactttccactccgatgtggtggttgatctgatttgctaccgccgtttcgggcataacgaaattgatgaaccttccttcacacagccaaaaatgtatcaggtcattaagaaccatcccagctcattgaagctttatgagcagaaactgctaggaacgggtgaagtcatgaaagaagatgtccagaggatccatgacaaggtgaaccgaatcttgaacgaagagtttgctaagagcaaagactacgttcccaacaagagggattggctctcagcttactggactggctttaagtcaccagagcaaatatcacgtgttcgcaacactggggtgaagcctgaaatactgaaacgtgtaggtcaggcaattactacactgcctgaaaacttcaaaccacacagagcagtgaagaagatttttgagctgcgtgcagctatgatagagagtggtcaaggaattgattgggctgttgctgaagccctggcctttgcaacacttatagtggaaggcaatcatgttaggctaagtggacaggatgtggaaagaggaactttcagccatcggcatgcagttctgcatgatcaggaaactggagcaaagtactgtccacttgaccatgttgcaatggatcaaaatgaggagctatttactgttagcaacagttcactttcagagtttgctgttcttgggtttgaattgggttactccatggagaaccctaattcattggtactttgggaagcacaatttggcgattttgccaatggtgcacaagtgatgttcgaccaatttttgagcagcggcgaggcaaaatggttgcggcaaaccggccttgttgttctgttgcctcatggttatgatggccaaggtcctgagcattctagtgcccgcttggagcgcttccttcagatgagtgatgataatccttttgtcatacctgagatggaaccaacacttcgcaagcagatacaagagtgtaactggcaagttgtgaatgtgacaactcctgcaaattattttcatctgttgcgtcggcagatacatagggagttccggaagccgctgattgtaacagctcctaagaacctgcttaggcacaaggattgcaagtcaaatctttcagagtttgatgatgttgaaggccatctaggattcgataagcagggaacacgtttcaagcgactgataaaggaccgtaatgatcacaagcaagtcgaggagggtgtcaaccgtcttatcttatgttctgggaaagtttactatgaacttgacgaagagcgtaagaagtcggagcgtggcgatgttgcaatttgcagagttgagcaactttgcccgttcccctatgaccttatccaaagagagctgaagagatacccaaatgcggagattgtgtggtgccaggaggagcccatgaacatgggtgcatacagctatatctctcctcgtctgtttactgcgatgaaggctcttgggcggggttcgtttgaagacatcaagtatgttggcagagcaccttcagctgctacagcaacaggcttcctgtcggttcatgcgcaggagcagtcagagctagtgaagaaggcactgcaggcagagccgatcaaattcctctga

SEQ ID NO: 31856 - DNA, 459 bp, Zea mays
  Peptide Sequence Number=SeqID_75231
atgggcaagaacaataagggtggaagttcgtcgcaccactccggcgacaagcggaagcgcgagccaagtccccccttggaagactccctctcggaagttaagggatcacgccgtccagtggaggcggaggtgaaggccaaggaaaatgtatgggaggtggagaaagttattggcctctcggaaattgcttattttggtgtagtgtcggatgagtcggaggtctcctcgaacgaggagaactcctccgactcgtctgaggaggagagtagcggtgacggcgacgacgagggcgacgacggcgatggtggtgacggcggcgatgacgacaacgacgatggcaagggcgacggaggcaacaacggcaagggcgatggcaacggcggcaagggcgacgacaacagcaggggcggcggcggcagtagcaaggctagtggcaaagtgccaaggtttaaatattag

SEQ ID NO: 31857 - DNA, 570 bp, Zea mays
  Peptide Sequence Number=SeqID_75232
atgggtgtaaccaagggacggcttgactgcttgcctcgctggtgtcttcacacatctcctggtcgtttgttgcttattctcccacttttctcttctcttccaatcaaccatggcaagaacaagaagggtggaagtttgtcgcaccactccggcaacaagcggaagcgcgagccaagtcccccctcggaggactttggtgactctgagtactcggaggaggagttttcctctgagtctgaggggtcgccggtctacgcctctcccttggtgtcgtccgatgactcggacgattcccaggggatcgctgccgaggtgtggacgtacatccgggccgtcgagcgctccgggctccagggctcggatgagtcagagatctcctcggacgaggagaactcctctgactcgtccgaggaggagagcggcggtgacggcgacgacgagggcgacggcgacgatggaggtgacggcggcgatgatggcgacggaggcaacaacggcaagggcgacgacgacggcggcaagggcagcggcggcagcagcaaggctagtggcaaagcgccactgctttaa

SEQ ID NO: 31858 - DNA, 354 bp, Zea mays
  Peptide Sequence Number=SeqID_75233
atgaacgtatgtgagctcactcttgctatatttacactaggtcaagaacagttactgcaagatgaggaacataaaggatgctatgatgagttcgaagagtcacggtttggatcgattccttcgattcttggtgttctggtgttaatcctgctggtggaagaaggtggaggtggcactgcttgtgcgcagcgaggttctcctgcgctccgttgtctcaccagtgcacctgtgtggtgctctgtctgttctgattattgtccaccgtggcctggtgcctgggctccctgctgcgcggtgttcgtcttctcgggctggtgccgtggacgtctccctcggctccggcagcggctctag

SEQ ID NO: 31859 - DNA, 360 bp, Zea mays
  Peptide Sequence Number=SeqID_75234
atgaacgtatgtgagctcactcttgctatatttaaactaggtcaagaacagttactgcaagatgaggaacataaaggatgctatgatgagttcgaagagaaggtggaggtggcactgctcgtgcgcagcgaggttctcctgcgctccgttgtctcaccagtgcacctgtgtggtgctctgtctgttctgattattgtccaccgtggcctggtgcctgggctccctgctgcgcggtgttcgtcttctcgggctggtgccgtggatgtctccctcggctccggcagcggctctagtatctccgtcaacctcccgccgtgcaggcccgaacgtgggcggcggaattggttttctgggacataa

SEQ ID NO: 31860 - DNA, 372 bp, Zea mays
  Peptide Sequence Number=SeqID_75235
atggcccatcgcaacgttcatggcgtcgcaattggactgccgtgtttacgtgcaaagccagcgccctccttccttgactgcaacatactgtacacgcttaaagtcctaggctctacaaccatctggcttggcagggcagcaaagccaaaggatctgcagcaatttcaggcacaagaactgtacacagtcgctcactaccggtaccgtgagcataagacccagggcaggcgaagtggccgcttccatcagcagaagcctacgtgcagactcagctcactcccaatatcatccaacctgcagcccagggcacggaccaactcccactccccgtgcaggcgcactatgcataggacggggaaacaggcatgctag

SEQ ID NO: 31861 - DNA, 594 bp, Zea mays
  Peptide Sequence Number=SeqID_75236
atggcgcgaggtggatctgcgggaggggaggttaacgagaggaagcgaggagtcgagcgacgtggattgcagcattcaatgagcttgtgtggcccatggtgcaaggcagaagaggagaggaggcaagcaaggatggaaggggcacgcatgtggatcgttggagcacggacgaggatggaagggatgcggggaggagaccacttggctttgatgatggaaactcttgggaagatgcctcggaagattgctagcttaggaactcgttccaaggattactttgatgacgcgcttaaaattttgaaatttggcgtaaaactagcggcaacccaattgggccaagctaaaaaaaatgagaaccaaacaatgtataatatgagcctggttcattttaatcaggcaaccaaacattgtttgttggctctaaacatgcgagctcccttgagcctggtcctttcactgagccaggctcaggttgggccaggcaaccaaacacatcctaaagtacactgcaaaacctggtttgttcgcacattcacgctcataaacagattcatcactccgcagtatgttggagttaagcctgctaatggctaa

SEQ ID NO: 31862 - DNA, 651 bp, Zea mays
  Peptide Sequence Number=SeqID_75237
atgaaccgaggtggtgaggatgaggagcatacggctaggaacattcggagcaaagcagagtggcaagcccgcgcctgcaaggggcttgcgctggtgctcttcggccccgcgccacgcctgcagctggttgcccgcgccttgcagctctcccgccaagtgtgcgccgctcatcctcatcagacgatggaggcgtgctactgcttgtcctcatcggcgtcgtcgcccttcagcgtccatcctcgtcgggaagctggtgaacaacatgatctcgtggcgaggggactcggcgttgcgcgacggcgaggatgccaagctggacctatccaggggcatgtacgacacaggcgaccacgtgaagttcgggacgcgtcggcgttcctggtgtacaagcccgccaacgcgacgtacatgtcttcgctcctcctcgaccacatcgagcggctgtttgcattcgccgacgcataccggggctcctacacgcgcacgttcctggagctcagcgactactacaactccactatgtaccaggacgagctcatggacgtgccattctcgactgcaagcaagcaggtcttcgaggccaccgtcgagttctctagaaacatgggttcgttcgggagtaggagcagaggacatcaggcagggccataa

SEQ ID NO: 31863 - DNA, 1149 bp, Zea mays
  Peptide Sequence Number=SeqID_75238
atggggggagctgctgctggtggaggcggctgcgccggcggagagtggggcgcggcgcgcgcgaaggtggcgtcggtgctgggcgtggccgggtgcgcgctcaactgcgcggtgagcttcgtggtgttctcggcgctggacgtgctggacgtggtgctgtgcctggtgtacaagctggtggactacgcggcggaggcggagtggaagtcgtgctactgcgcggcggcgtcgggcccgcgggcggcgcagctgcccctcgccgccgcgccaccagcggcgggcgggcccaaggtggtgcggctgtcggcgtcgtccgcgaagctgcagctggaggacgtgtcggacacgctgtacgtgcggccgtcgctgctggccgacgcgacgcgggcgggcaacggcagcggcagcggcgtggcccccgcgctcaccgtgagccccgccatcgcggagctgatccgcgggaagatggaccgggccccgcggccgccgcggcaggcgccgtgctggtccgactgcgactgcaaggtgtgccacgcctggagcgggtccccggcgtcgtcgtcccacctgtacgtgcacgtccaggcgccggcgatggcggtggagacgggaggacgtggtgttcatccacggcttcatctcgtcgtccgtgttctggacggagacgccctacttcccggtgccggagtcggagtcggagtcggcggcgcagtacgtgatgcggcgcgtggctccgcggcgggtgtggccgccgatcgcgttcggggcgtccatggcgtgctggacagtacagagcagtgccatggcccatcaggtttagcagtgggcagggtgcggacgttcctgatcgaggcgttcatgtgccacacgcacaacgcggcgtggcacacgctgcacaacatcatctgcggcagcgcggggcggatgggcgcgtacctggacgcggtggacagggggctgtcctgcaaggtggcgttcttccacggccgcgacgacgagctgctccccgtcgaatgcacgctggcggcgggcgccagggtgccccgcgcgcgcgtcaccgtctacgaccgcaaggaccacatcaccatcgtcgtcggacaggagcgactcttcgccgccgagctagaggccatctggagggccgactag

SEQ ID NO: 31864 - DNA, 141 bp, Zea mays
  Peptide Sequence Number=SeqID_75239
atgcggcttcatacccttagaggtatgaaggcagaggacatatgcattgcattcatatgcattcatgaagtgatatttgcagatgatgtggttttatacccccagagatgcttgttgctcatcaaggggagtgggaagtag

SEQ ID NO: 31865 - DNA, 427 bp, Zea mays
  Peptide Sequence Number=SeqID_75240
atgggaaccaatgggcatctcgacctcgacacgggaggtaaatccgtcgatcaaaagaggcactccgctataattcatcggactgtccggtgctccaaggaagagcggcctcaggaactcgccagcctcgggaaattgctccgctataattcaccggactgtccggtgtacaccggactgtccggtgaaccagcagaacaacggctacttcgcgccaacggtcacctgcaggcgcatttaatgcgcgccagaagcgcgcagaagtcaggcacgcgcgtgacggtgcaccggacaatctacaatacgtgtccggtgtgcaccggacatccaggcgggcccagaagacagaggtcctatggtcgaatcccaacgacattggtgacgtggctggcgcaccggacatgtccggtgtacaccggactgtccg

SEQ ID NO: 31866 - DNA, 339 bp, Zea mays
  Peptide Sequence Number=SeqID_75241
atggaccgccaccatctccatgtggccgggtcaggcccccagtgcctcccgccctccggcaccagcgccggctctcctgactacgccaccctacgcacacctccgccgcctacctacggcatgccttcgtacgaggcactccgctataattcaccgggactgtccggtgtacaccggacaatgtccgatgctccaaggaagagcggcctcaggaactcgccagcctcgggaaattgctccgctataattcaccggactgtccggtgtacaccggactgtccggtgaaccagcagaacaacggctacttcgcgccaacggtcacctgcaggcgcatttaa

SEQ ID NO: 31867 - DNA, 171 bp, Zea mays
  Peptide Sequence Number=SeqID_75242
atgcctatattcagtacaaattcagtacatgtgcaagactcgaacgtcgcgctctacagccggcagaagtctgcggaggtgaagttgtacgagactcggatgatgcccaccatgtggtcgttcaaaacccctcaagcaaaaattgaagccatgatctcatgctttggttaa

SEQ ID NO: 31868 - DNA, 672 bp, Zea mays
  Peptide Sequence Number=SeqID_75243
atgcccgtgcgcactttggatgtgtccctcatttttgtggcagaggaggatcgctgggagtgcaaggacggagacggcgagagggaggattgcattgaggaggaggtagacagctggggagaaaggggagaaacaagaacacctgcaggggcaacatgtgaatcagaggagtttggtcagacaattaagttcgatataaatgatttgaaacaatattactatactatcaacgccgaggagtacctatgcttcccagagcacctctgcacctgctactcatacgtctacgacgttgtcgggcatgacgagcagctcagtgcgcgaatctgtgtctgtcgcatcctacatggaaggtttttgatgggggcgaggccggtcggtgccaaggcgactcaccttcccttgagagcgcggatcgagagccggtgcgtcgattacgactgggattgcgatggagtgggattgcaatggagttcctcgcggccgcgacacaatgagacacatcaagggcgcgatgcgaggctagagaagggcatggcgtggatggtagggacctttcagcgaatcggttcaacagagcaggaggtggtggtggtgggcggtgcggatgctgccgtcgcggtcgcagagaaagtgggagaggaggacctagcagcgatggagtgggattag

SEQ ID NO: 31869 - DNA, 1347 bp, Zea mays
  Peptide Sequence Number=SeqID_75244
atggtcctcctcgcccttcctctcatcatccctgcctgctccagttgctcatacgtggacacagatggccctgaccctgcatatgatgacccacataagccactcctgatcagtaacagtcatcagatggagtccaatgccatgatgcaaaagccaaaggagaaccagatgcaggtcaagggccgcctggagacgctcggtgaagaacacagtgcaaagaagctcattcggtgtgtggacttctggctctactacacagcctacttctgtggagccactgttggcctgatatacaacaacaacttgggtcagattgctcagtcattgcaccagcagtcacagctcaccatgctccttgtcgtctactcatcctgctccttcttcggccgtcttctctctacactacctgacctccttcacagggtggcttgctgctgcattggtccccatgccaatggccttttccttatgtggaaccaacaagatggaagcaccctggtagcaggaacaacactaattggcctaagctcagggttcatctttgctgcagcagtgtcagtgacctccgagctctttggaccaaatagcgttggggtgaatcacaacatccttatcaccaatatcccgcttggctcactcctctatgggcagattgctgccatggtatacgacgcaaatggccaaaagatgacagtagtggataaccgcactggcattgttgacaccatgattgtgtgcataggggtgaagtgctactcaaccaccttcgtcgtgtgggcttgcatcacatttctggggttaattacatcttttgatgaagttagagtttaccccattcctgtaatgctttacctggtcaagaacttattgcagtattatatctttgaatatgtggatgcaccagcttaccagattctgaagaacttgaatattatcagcactggtgtcctgtaccgtataattctcaagaaaaagtcagaccatgttcttcagacccctattcgaggttgggtgatggcaattgtgatggctcttttaagtggttttgcaggagtatatactgaagttatcatcaagaaaaatccttcaagaaatatcaatgcacagaatttttggctgtacatatttgggatgctcttcaatttggttgcaatttgtgtccaggacttcgatgctgtcatgaacaaaggctttttccatggcgaggtttacatgagcacaaccattatttggataaaaaatatatctaagatgctaccagctcagacaatgatgcaagaagagcttttaccatcgctaaaaatgcagaaatctgaatgccttttaacaaatctaaaaactccttaa

SEQ ID NO: 31870 - DNA, 666 bp, Zea mays
  Peptide Sequence Number=SeqID_75245
atggaggcagaaagaacttcgaggtaccgagtgcatgacagaaggtcaagaaggctgaggtacccaaagccaggggtgaagaagaagacttgcaaagtcaaggttgatcgagttgtgaagagatatggcttcttcgagcttgatgatgaagctttagggcttgccatgctcttcatcgtggtcgcgaatcaccgaaggattcgagtcccgacgccgagcgaccgtgtgacctcgctgctaggaatgcgagccgctgaagcccgcgtcagccgaaccgaccgcgccagcgcccaagcgaccacgtcgtctgttcttctccccgcattattggaccttcaatgcttatgtttccttcccccattactccctctcttcattgacgccattgatgaccgccttgaagcactcggcgccctctcatctccgctctccctccctataaaattcgggactcccttcctctcttcctccccgagctcctctctctcccttctccttacccaagctcgcccttctctctcacactccttgctcgcccacgccgtcgtcgtccgccccactgtccgtggagccccgtcggagctccgttcgcgtattacgacgatcgcgcccgttcccctgcccgccgagccctccctactcgtcgaccaccattcctgcgcatga

SEQ ID NO: 31871 - DNA, 1572 bp, Zea mays
  Peptide Sequence Number=SeqID_75246
atgtcttcgccttcgccctcgccgccggcgccggcggaagaggagggccgggcgccgaccaagtacgtgctgatcaccggcggcgtcgtcagcggcctcggcaagggcgtcaccgccagcagcatcggcgtcgtcctcaaggcctgcgggctccgcgtcacttgcatcaagatcgatccatacttgaacacagatgctggtacaatgtccccctttgagcatggcgaggtgtttgttcttgatgatggtggagaggttgacttggatttggggaattatgagcgtttcatagatgttactctgacaagggataacaacattaccactggaaagatataccagtctgtcattgagaaggagagaaggggtgattatcttggaaagactgtacaggttattcctcatgtcactgatgaaataaaacagtggatacagtcagtgtcttcggttcctgtggatgggcagactcgtccagctgatgtttgtgttattgaattgggaggcactgtaggcaaggaaaatttctgcctcatacacgttagccttgttccagtattgggtgtagttggtgagcagccactaataggatctgttaaagagaagctttcacaattttgccatgtcccggtcgagaacatacttaacatccatgatgttccaaatttatggcatgtcccacttattcttagaaaccaaaaggctcatgaagctataatcaaacaactaaaccttgctagagttaaagttgctttggttgggaagtatactaatctgacagattcttacctatcagtggtgaaggctctcctacatgccagtgttgcctgttcgttaaagccatctatccagtggattgcagcttcggatcttgaagatgcaactgcaatatctgcaccagatgcccatgctgaagcctgggaaactcttaaaggttcatcatgcattttgatacctggaggatttggggatcgtggaatttcagggatgatattggctgcaaaatatgctcgtgagaatagagttccatatcttggtatttgcttgggcatgcagatatcagtgattgagatttccagacatgtcctgggcctggaagatgcagacagtgaggagtttaacaaggatacaccgaatcatgttgttatgtacatgcctgaggtttcaaaaacacatatgggaaacacgatgaggttgggctgcaggagaacattcttcagcaaacctgattgtcttacatcaaaattgtacggaagtcctccacatgtagatgagcgtcatcgtcatagatacgaggtcaatccctcttttgttcccatgcttgaaagtgctggtcttcattttgttggttgtgacgaaagtcgaaaccggatggagtctgaacctgcttgcacctatgagcagattgtggagctacaagatcatcccttctatgtaggtgttcagttccacccggagttcaaatcaaggcctcgaagaccttcacctccttttacaggtctaataatggcggccactaaacaactgggagcaaattcgaatagctcgaatggcttcgttggagcttctgactaa

SEQ ID NO: 31872 - DNA, 1296 bp, Zea mays
  Peptide Sequence Number=SeqID_75247
atggccggtggcgaggcggagggcccgctcgggggtttcttcgattacatggagcggctgcgcaactacgagcgctcgggcgtgccgcgcggcgccggcaccgactccgacgacggattcgacctcgggcgcatgcgccgactccttcgtcggctcggcgatccccacaccgacttcccggctgtgcatatcgccggcaccaaggggaaaggttctactgctgcattgctgtccaatatcatgagggcgcaaggctacaatgtgggaagttattctagtccacatcttctaacaatacgtgaacggatttctgttggaaatgatggaggccctgttccagtacgactgttgagtgatctttttgatggggctaaggaagctattgatgaagcaatagaattggaaaatggatccctaacgcattttgaggtttttactgctctctcatttcttctattctcacaagaaaatgttgacattgccatcattgaagcaggtcttggtggagctagggatgcaacaaatgttattcggagtactgaattagcagcatccgtcataacaacagtagggagggaacatctggttgcattgggtggctccctgcaaagcatagcaatagcaaagtctggaatcattaaacaaggacaaccagttgtgattggtggaccattttcagcagttattgagcaaattattcgtgacagggcattcttgacacaatctcctgtgatatctgcttgtgatcctggcatcaagagctttacgaaatgcatagattgggataatgcccatactgaggaatctgcaaaggccttatcaggcgtgatagaagctgtcagaccagaagggcctctagcgcttgttgtcggaatggctagtgacaaggagcatcttgcgtttgctgagcagcttctctcaggtcaaaccccagatgtcgtgctactgacagaggcgagcatcgccggaggaagctcccgtgcaatgccagcctcatccctgaaagaagtatggattgccgcggcacgccatcgtggcatcgagtacgtggacatcggtggcatcagtggcactgaaaccctggagcacatcgccgatctgttgggcagtccttcgctgagttccagaaggaagcccatggtgatcgggtgccaagacatggggccgttctcctggaacctgatcattgctgcctcccagctccttgagagcagaggcagggccccaggcctcatctgcgtgaccggctccctgcatctcgtcggggccatactgcaaaagctgggacggcattag

SEQ ID NO: 31873 - DNA, 1794 bp, Zea mays
  Peptide Sequence Number=SeqID_75248
atggcgacggcggcggggacggcggtgctgctgtacctggtgctgtcaggccggctctgcggggacgccgccggcgacggcggcgccctggaggaccagctgatatcgtcggccctggaggctcggcgacgaaggaaagaggacaccagggcgcggcgggagcagcggcgtgctccgcctccgtgcaccaagcggcggtggccggagcgccccccggacgggtggggcgaggcggccgccttgaccgcgcgcactgtgggcttcacctgggccgagacgctcggcaagtggaccctcggggaggtcgccttcgggatcaagtactatatgcggcagcagggtaatctgcagcatgagtatgctggaagtgattctgtgctactggatggggctgaggtgaggcaggtactgatttcgctgctcagatatctgaagcagtgcatgtatttctcgaagaagccatacaacgtgtttttggagtatggtggttatggccataatgacgtgcttataagaaagcctaaggcgaggctcttgaagccagctttcacaattgttcgagacagaagtagccaatgctttctccttttcatcaggggggctatcagtgttaaggagcggttgacagcagcaacaggcacagaggttccattccatcacgttgtggtccaggaaggtcgtgtttccaacctagtgttgggctacgcccactgtggaatggttgtagcagctcgatggattgcaaggcaagccattcctggcctgagtaaagcaatcgagcaattcccagaatatgaggttaaggtcattggccattcaatgggagctgggattgcaacaatactaacatacatcctacgcgagaatgagaagctgtcatcatctacttgtattgcatttgggccagctgcttgcatgacatgggacttggctgagtcgggtaaagactttgttaccaccatagttaacagaaacgacctagtgccatctcttggcatagtttctgctgccaagcttcgtatagaggttatgtcatcgtcttgggcacatgaccttggcagacaaattcagcagactaggttcttaggttttgtgaaccgttctgtgagtttcataagatcccatgtgccctttgtctctgatccaagatctaaggttgtggatgtagacatgctgcaatcccagagtcccgaggctgggagtaagccttcagcagatactcatgctgtggtgaagaaacgccctgcactagtttgctggtcatatgtggctacacccaatcccaaacagagtatggaatcgtcaatacaaatgcagggcacggaagtccaaaccgacactgctgtcgaaactgagaaaaattctgaagcggcagctgctgagctagtctcaatccatcttggtgaactgaacattcaagaatcagacaaggacgatgacaagagaggggaaaagggttcagaaacagatgaagaagagaccatggagattctagagtccttggccgacgagaagcacatgccatcatcgtcaagctttgctcaagagccacagcagctgtaccccccagggaaaatactgcacatggttggattggcagcagcggaagtggcaaccacaagtcagcaaggagcccaggaggaggtcgtcgccctgtatgagacaccccggcatttgtacagtaagattcgcctggcgaggtccatgataggagaacattacatgcccaagtacatcaagacaatggagaagctgatacacaagcttgcagaggaccagctggactctttgtag

SEQ ID NO: 31874 - DNA, 522 bp, Zea mays
  Peptide Sequence Number=SeqID_75249
atgggcgaagtctcccccggggggcaccaaggatctcaccttatgacacgggggccagaccccgcattggtcaaagaggcgaaccgccgcgcaagaggcgtgcaaccgtcccacggctgtgcgccccctcagctccgccacaactggcggcccaactcagaggcccaggcccacacgtcatcgactcgaggtagccccgcgcatggcccaacagtgctgttaagtacgacggtcaggggtcagtcagccgtgggaataagcacgactgttggcatggtcatagccgggccggcagtaattgcagcaactggcacacggaagcagcggtccaaccgccaattagactctggtcccacctgcaagctcgcatcctcccctgaggcgggatcaggggccactgtcggcagcgtcaaggtcatccagcaggcggcgcgcctgctgggtctgcttgcaaacagtaaagaagaaggcgctgagacggatctctgggagttccaagacttcggcgagttcgaggattag

SEQ ID NO: 31875 - DNA, 573 bp, Zea mays
  Peptide Sequence Number=SeqID_75250
atgaggaaagtttatgaagaaaatatttgtggggacttgaaaaatgattatgaaggttggcatccttccaccaccattcggtttcaaggattttcatcacgtagccctgctgcagtcccccgccggcggtcacccaggaggatgaccaccagccttgtggtggggagaagcatgccaggctgcggcctctctcccaccctcaacttcaaggatgttcatcatcctcgctgtggtgggaggcgggttgagccggggccctaccctccgtttgggttggtgatccgcttcttcctccagcattcggaggagaagggtgttcaccaatcctgcgggggcggaccttggctacacggggccgaccgactgcaggcagtcagctgcagcgtgtctggccctttggggctggatggctctggtgctgcctccgacgctgcctcctgtcgtctgggcgcactgggggaccgtacaagacgtcgtacgccgcggcggtggcggcggcgttcttggatggtcttgtactcactcttgttggtcgaaacaggagcaagaaccccttcgtgcgtgctgaggtag

SEQ ID NO: 31876 - DNA, 216 bp, Zea mays
  Peptide Sequence Number=SeqID_75251
atggcggtgggtgcgctgcaaaaggggacgtgggcggcggtgctagtgcgcatggaggcgggcacgcgtgcagggggcacggcttgttccaggcttcaagggggaagaatagagtttttccaaagcatgaactactcagattcgggggctaagcataactactattgcttggctcctgaattgagaactatgaaaaatgcaacttatgagcactaa

SEQ ID NO: 31877 - DNA, 270 bp, Zea mays
  Peptide Sequence Number=SeqID_75252
atgcaagatatagaagtgtcaagggtaaatgcgataataacaaagagcataggacatgatgaagttaaggcaagactcacgaaatggcaaaagaaaacaatcacgggtaaggtcagcggtcctactgtcagcaaggctttgataccatttatgtcacacccggttttgaaggggaagcttcctgcggaagagaagacgagtatagggtgccgcctggcacgggcgcactgtttgcaagcagacccagcaggcgcgccgcctgctggatga

SEQ ID NO: 31878 - DNA, 894 bp, Zea mays
  Peptide Sequence Number=SeqID_75253
atggcggttcgccttcttcgcactcagaggctgacacccaaggagtatgactcgtgggcccaggcccccgtgtcagaggctgacctgctgttttcggcagagatgaagaggcatggcggcggccatcatcgcctacctctgcaagatgtccatggggcgacgcttcttcctctagcatttggaggaatgggtgttgtgcagcgaccttccgaaggcggaaggcgagctgagctgcggctccatttttcgcgtgagcttcaccagcatcccatgtggagtggacaggcggcgtggcttatccgcaataaatgcggcggatgcgcgacccagaagccttacgtcaggctccgcccgttggcttatgtcatgaccagtgggccacgcggcagcatcgggtctccgcctgagcgaggagcggaagcatacgcggtatggtccagacacgtgtcagctccggacctccgcttaaccttgatcaaggcctgggtattccttgttccggaatcccgggaccttgctgtgagtggcccggaccatgcacagggggtccgggacccgtcccaggggttcgggcacacccgtggaggttctggaccttacccggaggcgaccatcatcgcctacctctgcaagatgttcatgggggcgacgcttcttcctccagcattcggaggaatgggtgttgcgcagcgaccttccagaggcagaaggcgagctgagctgcggctccattttttgcgtgagcttcaccagcatcccatggcacgggacctgcatgatttattctgggaagccaagttgtgtgtccggaccccctggaccgctgttctagatactaggacactcgtcacagagtggtggagtgtgcaagcttactgtactggaccaggctaa

SEQ ID NO: 31879 - DNA, 279 bp, Zea mays
  Peptide Sequence Number=SeqID_75254
atgaggatcaggctcaagatgatgaaaataaagatcaagaggatgagccacctcaatagaaggacaaggatcaagggggagatgaagttaatcaagaaaaagaagatgatcaagagattcagggtcaaagaccgctacacccaagagtccaccaaggtggaggatgcactaagagattcggattgggtgctggctatgcaacaggagctcaacaacttcacgaggaatgaggtaccaaatgggtattccgcaacaagcaagatgagcatggtgtggtga

SEQ ID NO: 31880 - DNA, 222 bp, Zea mays
  Peptide Sequence Number=SeqID_75255
atgttgattcccgatggctccacggtcatcgttttcaacatcgtcttcaacatcgtcgttggggagggagcgactgctacacccatagcaccaagatcctcgctctactaccccaacatactctccatcgacatggtggtggaggtcgacattatcttcgacccgggtctagacctagatcactcggaagaaggatggagccaaggttcccgctgcccctaa

SEQ ID NO: 31881 - DNA, 990 bp, Zea mays
  Peptide Sequence Number=SeqID_75256
atggacgagtctggtgtgcctcctgggactagtaattgtatcacatttgagtcccagaggattggggacgcttcaggtggtatcagagctgttaggagccagccagagtatgatggtcgtgaattcgtcgagcatggcacaaagaagtgtgtcgtgaatgtatacattggatccagtccgcaccatgtggaatggagtgtcactgctgctgggcacagatttaaagacacctgccaagtcgtcgcccgcaaggcattgagggccctgtgtcagatctatgaagaagaagtggccgacacacctctcagattcttctcgccctttcagagagaccgtccagtttggatggccaggatgcgtgcattgatgattgcccgagcagaagatgcagagaagcgtaactgtaagctccatgtggatctcaccacagctcaagcccgtgcaactgccttggaaagtcgtgaagtcattgctattgaagccctgaagcaagccaaggatgagcacgtccagaagctgatggaggcctacttggtaacccacaaccaatgtagagccctatggatccaagagcctgctccatccaacccagttcaacccatgagagttgaaggtccccagattcttgaaggtcacccgatctctatcagaggagagaagaaggcttgggaactcccggaaggagccatagtcttggaaggaattctagtcttccctcaggctatggataagcaagagcaccctgaatcctcccaagatcccccgccggagttgtttgagcccctcaccatgaagaagattccagcactctcccttgagatcaaagaagaagctgcaagcaccccgccagcattgccgccctctgaggagctacaagagccagtcccgcttgaagaagagttcaaccctgtcctgccatctcagtcgcaaccagaagaagtcatgaacattagctccctcttaacccatccaggagatgtctcagattga

SEQ ID NO: 31882 - DNA, 132 bp, Zea mays
  Peptide Sequence Number=SeqID_75257
atggcgtcgggctcctctcgcccccaaattgaccaggcctaccgccgcaacctcgctgagtttggcaccagcccgcgccgtgagaccgaggtgctccgcgagaccgaggtgctccgcgaggccgtcgcctag

SEQ ID NO: 31883 - DNA, 411 bp, Zea mays
  Peptide Sequence Number=SeqID_75258
atggcttccacgacgactgttgcgcgtgatttttcgggggataaatgtaggagaagtgaagaaactgcaggatacaagtatttacagttgcaattgccttctaaatcagatttacagccactagctacaccgatggttgtcatgccctctagagagacagacaatattgcagaacacggacacaatgcagccaagcatgtagcctcattaatcagtgtagatacgcctaaagtcggccctgacatacaacaatgcacgaccaagaaaagctcgatcatcgccgataaaaaggctatgaagaaactgtttgtaagtcaacttgaatgtaaagacactcctgatgagcccagggttcaaagtagtagatctgagaagggcacttctcaaaatccacacaccaaaaagatataa

SEQ ID NO: 31884 - DNA, 657 bp, Zea mays
  Peptide Sequence Number=SeqID_75259
atgttcaattcgtgccccagacctgccctgtgttcggatttgggcaagctgaaggggacgcctagtgggagttctagcaaaggggaggggagcaatctcaccatatggtcatggaggatgtcggcaatggcatcgatgtaccccttgatcgcgcggacaatgccgatgcggccaccggtctccactgcctgtctcaccgcgctaagacatctcgatgaccttagggggcggctacagctagggcttgggtcttttggatttggaaggcgatgcgaaaaccaaatagtggagaatgcgatgagagggcggaaggagcaggtgtggggcgacaggagtagcgagtggacccggagggcatcgtctcaggcgagcatcgcgcgcggcatctcagacggacgggggaaaggcgtcgaggacaggggcacaacgggagacgtgggagggagacagaggcggagcgggggcacggagctgcggcccgaggtcccgcacggccggggcgatggcctcgcggagcacctcggtctcacggcgcaggctggtgccaaactcagcgaggtcgcggcgaggcggagcgggggcacggagttgcggcccgaggtgcgctccagcatggcgagatctacggtggggacggagttgtgcgagtctgtctag

SEQ ID NO: 31885 - DNA, 465 bp, Zea mays
  Peptide Sequence Number=SeqID_75260
atgcgtactgctgttgtggaacggcgcgacgaggaagaggacgacggggatgatcgggacggggagcagccgttgctgccgcgctcgccgatcggcctcctcagacatcgtcgtcgtctacgacccgtaggtcgctggtatgccgtgggtgcagcgcagtacgtgccagagtcgtcgaccctaatactactggagaagtatgggtgtgtgcatcttgggaacacaatcagcaccacagatgactgtattagtgataaccagggggcaggctggagcatggtgtaccagttagaatctgcaaggaattttaatgaattaacgagctactcgatcgataactcagcattaatggtgatagatactcatttgctccactgtactgtaccattggatgaagatgagccacttcctaatcctcttgagctgctagccgaggaatccctctcaatctccactgactggtaa

SEQ ID NO: 31886 - DNA, 555 bp, Zea mays
  Peptide Sequence Number=SeqID_75261
atggctccgcgacaacccgcgggttcccagccttcgtcgcgccggggagcccccgggtcgtcgccgcgccgatgcagcgaccccaacggcgaacacctgctgctccgggcgttcaagaccaaggcggactactgtcgcgtccacggcttcgacatcttctacagcaccgcggtgctcgacgccgagctgtcggggttctggtccaatctgccgctgctgtggatgttgatgctcacgcacccgcagacggagctcctatggtgggtggactccgacgtaatcttcaccgacatgctcttcgagccgccgtgggacaagtacgctggccacaacctcgtgctgccgggctcggaggagaagtggtcgctcgacctgctcaacgcgctcgcgcgcatcgggccgcgtggcccagtgcgcgagttgtacggcagagtaatcgctgagatgctctccgaccagaagccgtatgaggcctgcgaccagtcggcgctcatctaccagctcgtgacggagcacggcaggaggggcgacaagacgttcctcgagagctcctaa

SEQ ID NO: 31887 - DNA, 345 bp, Zea mays
  Peptide Sequence Number=SeqID_75262
atggccttacaaacaagcccttacgggttcgagcacaattcgctcaacaccaccgccgtgcggcgggcatggcactcacatcaagattccatcccgcttacacctttgacacaggccattgacgggccccgtaagttccacgtgtttctagcggtccctgtcaccgactgggtccgatatcgccatgtgtttagaggcatctatgggacccagctgcccactagaggccctctaggaggcctttcatgcctaaatgctccgctgactacagtagggttcaggtgcgtcacaggtcataggccccagcgtgccaccatccatggcgaggtcctaggccctagatag

SEQ ID NO: 31888 - DNA, 1257 bp, Zea mays
  Peptide Sequence Number=SeqID_75263
atgactgtagctgttgtagtgttcgccctcttcatgttcacgtcgcccgacctgcggtggcagctcccacgcatccgcatagagtacggccgccatgacgagccctccagcgcgcccacggccgacgggcgcacaaccacgctgccggttcttgcaggtgccaaaagtgacgacgaagagcaacggctcccgccgccgcgccagctgacggacccgccgtactcgctcggcacggccgtgtcggactacgacgcgcgcagggccaagtggctccgagacaacccgcggttcccggccttcgtcgcgccgggcaggccccgggtgctcgtggtcaccgggtcggcgccgcgcaggtgcgggggcgcggacgacggcgaccacgtcctcctccgcgcgttcaagaacaaggtggactactgccgcgtccacggcttcgacgtcttctacagcaacgcggtgctcgacgccgagctgtcggggttctggaccaagctgccggtcctgcgcgcgctgatgctcgcgcacccggaggcggagctcctgtggtgggtggactccgacgtcgtgttcaccgacatgctgttcgagccgccgtggggaaagtacgggcgccacaacctcgtcgtcccggggtggaacgacaaggtgtacggcgccaggagctggctcggcataaacgccggcagcttcatcatccgcaactgccagtggtcgctcgacctgctcgacgcgtgggcgcgcatggggccgcgcggccccgtgcgctacgagtacgggaaggttctcggcaaggcgctctcggaccggccgtcgtacgaggccgacgaccagtcggcgctcgtctacctgctcgtcacgcagcgcctcaggtggggcgacaagacgttcctggagagctcctacagtctgcacggcttctggctggggatcgtggacagatacgaagagatgcagcgggatgcgtctacgccgagggacggtggcgaacggtggccgctggtgacgcacttcgtcgggtgcaagccgtgtggggggcagtacgcgagctacgaagcatcgcggtgccggaccggcatggagcgcgcgctcaacttcgccgacgaccaaattctcaggctgtacgggttcgagcacgagtcgctcaacaccacggccgtgcggcgcgtgcggaacgacaccggagggccgctggacgcggacgacgtggagatcggccggctcttgcacccgacgttcagggctgctgggccctggtga

SEQ ID NO: 31889 - DNA, 66 bp, Zea mays
  Peptide Sequence Number=SeqID_75264
atgggcctgctcgtcctcctcgtcatcctcctcatgggcctgctcgtcctcgtcatcctcctcatg

SEQ ID NO: 31890 - DNA, 594 bp, Zea mays
  Peptide Sequence Number=SeqID_75265
atggcctccaacaggctgtcggcgcgcaagtcccgcatgaagcagcagcagcacgtcgacgacctgaccgcggtggcggagcgccttcggcgcgagaacgaggcgatgcgcgccggcgtcggcggcgtcgtgcggcagagcatagagctcgagcaggagaatcgggtgctcgccgcgcacgcgcgccagctgtgcgccacgctcctactgcggaactcccagctccgcctgctcggtgacgtggccggcctaccgctcgacgtgccgctcgtgcccgaccacctcgtgcaactctacggtgttggcactccttgtgccctttcttctccaccttcccattgctccaaattaaggaaaaagaaactcggcgtcaccctcatttggacgtcacggggacactcaccgctggtcggcgatgccatcgctagtgatggtgcctcgtggtcgggaacgacagtggctgctgctactgttgcgggtccaaatatggacctgaggccgatgccggtgttgcggggtggcggcgaagaggaacatcagcttcagcttcatctaggcgtcatcgagcttgtggacgagcgtctggcgggatga

SEQ ID NO: 31891 - DNA, 951 bp, Zea mays
  Peptide Sequence Number=SeqID_75266
atggaggcccaggcccacatgtcatgtaaccggcgcaacggttactgcgtgcaaggaaaccgcaccgccactcgcgccaatgacgcgtcttctcgactgcggaaccagtaccgcgactcgaggcagccctgcgcggcaagcgacacctccggcaggagaagcgggcgccgttttgtctccgtcataatgaccgcgtcaaaaaagggaccgggaaagggggatatttcgaaaaaggatccttcccagcgaaggaaatgggcatcgacagttggccctcctactgatcaggggggtttgaaggctggcccctcggaagggttcgacagccgccccagagcacgcaaggtcaaggatgatcctgggtacgtctgttacatggccgaggctcgggctacgctcccgatgccactagacgacccttatcgaacggggcttgggcatccactcggatcacccgctagcaactcactggaaacaccatgttcggtgccccccgaggaggctcgggggctgctctcgcaccaggctacggccgaaccgttgaccatgtcaacaaaccagcgtgaaaactcgaagcctgacccctcggcctcggaagaagagtctccgcctcgcccgaccttaggcctcggcctcagcctcggcctcggaagaagatctccgcctcgcccgaccctgggcctcggcctcggcctcgggaggagtcataaccccgctcgagcccagcctcggcctcaggagaagtctccgcctcgcccgacctgggcctcggaccagctacactacaggggatacatcattaccctactcctagctagctgcctcaggctaagaaggaacaagaccggtgtcccatctaaggttactccgggctcaaggcgcttctccgacggccacgttagctcgcagatacaccccattgcacagctgggcatctccttgtatctataa

SEQ ID NO: 31892 - DNA, 402 bp, Zea mays
  Peptide Sequence Number=SeqID_75267
atgctgtggacggtgctgtcatcagatctgttggtgttcttcctagctgctttgtggtttgtgtgggcgtacatgaaacttggagtcggtattagtggagaggagagacgggaggggtcgatgtggctgctagccatggtcctgatcagtccttgcttggtattgatcgatcatggccattttcagtataattgcattagccttggacttacgcttggagcaattgctggtgttctgtcgaggaatgagctcatcgctgcagctctcttcactcttgcaatcaatcacaaacaggtgcatacaattctggacaaagaaaattttacattgaaagaacttcttgatgaggatgaaattattcaggagtgcaaagcactgaactcaatactcataaacttgtaa

SEQ ID NO: 31893 - DNA, 309 bp, Zea mays
  Peptide Sequence Number=SeqID_75268
atgcccccgccacggccgcagccctggcacctcctgccctcccctcatgcacatctcgtcgtgcctgcgcgcatctctggccatgtccaggccgtgtccacatgtcatagccccagcacctacctcccttcccccaccccccacccctgcacccgcacgcccgaccttccgtcctcggctgcggccagggtggaagccgtggaggtggacgaaatccaagccgaaaccatcggccccttacatcctaggcgctctgttaccatcctcggcagcctcttcccatcggtggcccttcaatcccccatctag

SEQ ID NO: 31894 - DNA, 297 bp, Zea mays
  Peptide Sequence Number=SeqID_75269
atgagcaagaacacaagagacacgagatttatcccgaggttcggtcacaccaccaaggtgccctacttcctcgttgaggcgcccacaaagagccgggtctctttcaaccctaatcctcccttttgccaaccacaaaagtcaagcccacacactaatctttgctcaaacgagcggatttctctccaaatatttgaaatgggagaggcaagaggtgtgagagagaaagtgggaggtgtttctcaggttaggaatggagtccaagtcgtgctcttctgtggaggagagaggtgggagtga

SEQ ID NO: 31895 - DNA, 324 bp, Zea mays
  Peptide Sequence Number=SeqID_75270
atgccagagccaacccatgaggaggtctccgcctcgcccgacctcagtgctcggcccccgcctcggcctcggaaggtggtctccgcctcgcccgacctcagggctcagcccccgcctcggcctcggaaggtggtctccgcctcgcccgaccccagggctcggcctcaacctcggcctcgaaagatggtctccgcctcgcccgaccctagggctccgcctcaacctcgacctcagaaggaatcgcgtcctcacctgaccccggcctcggcctcaggaggagtctccgcctcacccgaccttgggctcggaccgaccgcgtcatag

SEQ ID NO: 31896 - DNA, 111 bp, Zea mays
  Peptide Sequence Number=SeqID_75271
atgccctggaaatgggacaggcatacccttgagagtcttttccttagtcgggttctaaccttatgctgctgtgatggtgttaaagtgccggtgggctcggccttcttataa

SEQ ID NO: 31897 - DNA, 807 bp, Zea mays
  Peptide Sequence Number=SeqID_75272
atgtcgccagcaagtaggtacgacgcctgggcagaacagtgctccgaactcatccatgatagtgtaggtgtccacacccacggttctgcctcccactcacacccgcgacatcctccgctcatccccacgtccgcggtcgcccccacaatcaacgggattgcccccgcgatccccttcacctcccagatctcgtgctacatccaaggaagtggtgatggttcgtggccacccccgcaatccccttctaccgacaacgctagccttccatcaaagaagcgcctcttcctctgctcgaaccctagacggtggtggcatgacgcccgtagcctggatcccaagtcccgctccccctatccatgctccttgtctgccctcccgttcccccgtcgtgtcggcctccttgtccgccctcccattccccgggatcgttggtcatcgaattccaggggcctcgacatgcccaacctgaagaagcaatgcgggaggttcgtctccaccatgccctgccctaggtgcttcgacctccttgccatgggggagcacaacggacacggtggagggcgccccagtctgcgcccggcggccagaccatggaggaaggcagccgacgacatagtggtgagctacaccttcgttgtgctctctgccccaaatccccacgctgccgctctatgcgcctctgctctgctccctgcccctaatcctgcgcctctgctctgctcgctgtgctcccgtgcctcggctgccctaatcacacgcgccttggatccacaggtctcgctccaaaatcacgcgcgccttccataa

SEQ ID NO: 31898 - DNA, 126 bp, Zea mays
  Peptide Sequence Number=SeqID_75273
atggccgtgatgggttcaacatcggacaagatgtacctctgtgaggtaccaaattttgggattgaaaatgataaaaacgagaccgggcagctttatcttgactccctcaagccagcatatccttga

SEQ ID NO: 31899 - DNA, 707 bp, Zea mays
  Peptide Sequence Number=SeqID_75274
tcccggtcccggtcatcggaccacagaagaacgacgaggagctcggcaacccggtccccaaggagcccatcctgttcctaaagctgaccctgtcgttcctccatgctggcgtggccaccatcgcagtcgagatcctagagacgctcgagtctctacaccacatggtcgagctcgctgtagtcatctcccggcgtgggcatgacgttcctgaggcgtccaccatggacttcgtcagagtcaatcttttcacggtgcctatgcttcaaatttgggtcggctccgccactgcccggctgcaactacaagcgctggctcatcgtgatggacaagctcgacgggagggcaccagcaagcagcatatgatcgactgctacatccagacactcgccaaggtccttggaaggacccctggtgtttcctggattcgtatgttgatgcagagtgcaaggactacagagaaaatggagtctggaattacaaccggaacggaggaggtggcggtggccgaggacgaggcaactagggatatggtggtggtgagtggtgatctgagcctgattacctttccctgcttttttgcatttgtggtccacactgtgttcctcgaatccttaaatgtaatatgtttaatgcatgccataattattgaaatccatgaaaagcttggtgttgctgtgcaagaaggtgataccgattgtgatgcttaa

SEQ ID NO: 31900 - DNA, 576 bp, Zea mays
  Peptide Sequence Number=SeqID_75275
atggcgcatacaaggaaaacagcacgcaagtctactagaccttttggcgtgcctcgccatcagctagcccccagacatgaaggaagtagtagtggcagtaatgacccaattggagacatggaagccaaggtggaacaacttcgatcagagctacgtcaccggaatagggcatgggagcaggataaccagcgtatagctgaattgtcagctgacgtcagccgcttgcaatatgagattttagaacgggattcggccattgattgggccgtcaactcgcgttcgatcgcttgggaccacgaagcaaaagctcgagctcatgtggcagagcttagtgcgaccctcgacagcctgcaagtgtactataatactttacatgaagaagtacatgtactgtatgctcgactgcacccggacgtgccttccgacgctgctgcaatgggagccggaccatcggatacagcaaatgaaggacctgatggggagttggacctttttaggccccctccttccatgaaccttgctgacgaacggtctcatgcagcaggaaatgaagcaaccaaggatgatgaagactag

SEQ ID NO: 31901 - DNA, 1344 bp, Zea mays
  Peptide Sequence Number=SeqID_75276
atgctgctagcagaccaaggtgcagaacaattctttgtcatgatttgggatctcggtggaattgatgccatgtatcagcttgggggcaagccgaagcttaagaaggggggaatgttaggaaatgttaccagtctgtctgtgctggaagagctccaactgcctgagaaccatgagatgcagagaagaagtttgtcgccccaattctcattggggctggtgcagagtgggctaaattgcattggatcagcatttaatgccaaaggggttatgcaatgccccaactgccgcaaaatcgagaaagggaattggctttatgcaaatggttctcgatctgcccatgatgttagcatggatgaatgggcccatgatgaagacctttatgatgttagctactcagatatgccatttcgcttccattggtgtccgtttgggcgcttaacccaacttccatctttatttgaggaaggagaatcatcacctccagttacatttcatgacttcatgggacaacatgtgtttacggagcaagtagctgtatctgctgcagcagggacaactaatccttgcccctatgtggcatacttgcatcctcttacaccattgacgtcattgtcaagctcccatgtccctgacagaactatggatcgtcctgcataccatgatcattggaaccccatggctgggccatcagatgttaggtccatgcaaacaatgcaacctgctgattttcatcatagccattgggcacatgtgccccattcttatggtcaacccaacagcaataacgagcagccaggaatcccttttggagcaagggctgtacgggtcgatggtgatagccaacgccgagcatctgttgtctctccatcttacttcagtaatggatctggttccagatctagacctcccaatgttcctcctctgatgcctcagttcatgagggctcatggcagcatcagcgaacagtaccaacagaattcatcatctagcttatttgctggggcccataggtcaggaggcatgcgacctgccccaacacctctaccagagaaccccacctttaccttgttcccgccaggttcatctggccatagctcgatggagactgatgatgctgggggaagccggttctacgcctgggagggtgaccggtttgccccatacccgttgatgccggtagactgcgagacaagctggcggacctcacagcagcagtcccaccagagcacatcagagcctacatctgctccaaggaggctgtttgggcaatggctcgctgtcggcaggccatccccatcacccgaggggtcttcgtatcgtcaattgcactcaccgcggatgtag

SEQ ID NO: 31902 - DNA, 579 bp, Zea mays
  Peptide Sequence Number=SeqID_75277
atgggcgtcggtgcggagcccaaggatcaggcggcgacggccgctggggtgccggcagagcaggacgaggcgggcgggaaggaggacaaggccgccgcggtgtcctgctcgatctgcctcgacgcggtgctcgctgcgtccggggagaggtccaccgccaggctgcactgcggccacgagttccacctagtctcgggccaccgcgtccgagcgcacgacgacctgtacgcggcgtttgggcccaatctcttcgacatcggcgttggcggagacgggcggttctcctcaagcctctccttgcccgacggaaatcgcttctgcggctactccaccaccgcctcctcccgctgcggcaacagcttggggctgtcctcgccgtcgccacgcgctgactcgctgtcccgcgactcctctgaatccggtttcgtcgtcgatgacggagacgacgcggcggccgccgccgccagcgttacagatcgtcaactccgcctcgtgagcctcgcgctccagtaccaaggagtggtcaaccgcttcgagcgctgcctctcgtacctcgccgacgccagcaacaagctgtga

SEQ ID NO: 31903 - DNA, 174 bp, Zea mays
  Peptide Sequence Number=SeqID_75278
atggcgtccccgaggcagcacaggctgcgcggggaggggtcagttttggtgctgtggggaggcgagggcgagggtcgcaatcagccgcgtacaagaagaatgggggcgaggacggaatggaacgacgagcgagccgaacaggtggaactgtcgaaactggactacatcagttag

SEQ ID NO: 31904 - DNA, 537 bp, Zea mays
  Peptide Sequence Number=SeqID_75279
atgggcaagaacaacaagcgcaagcgtgagccgactcctccatcggaggagtttggtgactcggaatactcggaggaggggttctcctccgagtccgaggggtctccggctcccgtctctcccccggcgtcgtccgatgactcggacgactcccaggggatagccgcggaggtctggacgtacatccgggccgtcgagcgcgccgggctcgaaggctcggatgagtcggagtgctcctcggatgaggaggactcggacggcggcgacgagggtgaagacgacgacgacgatgacgacgacgacgacgacgacggcgacggcagtggcaggggcggcggcgacggcagcagggacagcaccaagggcgacagcagcaggggcagcaccaagggcagcagcaggggcagcaccaagggcggcggcggcggcaggggcagggacagcaccaagggcgacagcagcaggggcagcaccaagggcagcagcaggggcagcaccaagggcggcggcggcggcagggacagggccagtggctag

SEQ ID NO: 31905 - DNA, 483 bp, Zea mays
  Peptide Sequence Number=SeqID_75280
atgtggcaggacgccaagaaaagcttcgcacaaatgaacgtaaatggaaatttgcagaatagaattgggattcagatgggtcaagttaaggcgatagaaatcaaggaggccgtggaaaaagggagaaatggggagagcgagatcgcgaagaagaaaaggaacgtaaatcacggattcatgggtatcctctgtcgggacagtgaccccatgacaaatccaccaagaacaaatctcccttgggggaaggaccccgatggacacaaggtggagaagcggatgaaatcgaggcctttctcttgggcgccatctcaactctactggcaaacagagcaggagccgaattgcagagaagatctggaggcaggaaagcaagaactagggcacagaaagcagaggcggctgaaagcgcagtatatgcgggatattctagagtcagataccgtttccaaaagcgcccagttagcacccggcagttacttctaa

SEQ ID NO: 31906 - DNA, 450 bp, Zea mays
  Peptide Sequence Number=SeqID_75281
atgggcaagaacaacaagcgcaagcgcgagccgactcctccatcagaggactttgacgactcggaatactcggaggaggagttctcctctgagtccgaggggtctccagctcccgtctctcccccagcgtcgtacgatgactcggacgactctcaggggattgtcgcggaggtctggacttacatccgggccatcgagcgttccgggctcgagggctcggatgagtcagagtactcctcggacgaggaggactcgcccgaggaggacggcgatgacgacgacgacgacgacggaggcgatggcggcggtgacggtgacggcggcggtaggggcggcaatggcgacggtaggggcggcaacggcgacggcaagggtggcaacgacggtagcagcaggggcggcagtggcggcggcagcagcagcaagggcagcaacaaggccagtggctag

SEQ ID NO: 31907 - DNA, 657 bp, Zea mays
  Peptide Sequence Number=SeqID_75282
atgatgaccaccagttcgatggtggggagaagcaagccgggctgcggcctctgtcccgccctcagcttcaaggatcttcatcatccttgctgtggcggaggacgagctgagccggggttctacctcccgcaggggccggcaggccgcctcttccttcaccattcaggggagagggcgctcaccggccttgcggaaggggcgaacttcgacaacacggggccagtcggcggcaagcgtcgtcagctccagcatgcctggctcgctggctcagctggctctgtcgtggcctccgacgctgcctcctgccgcttgatccgtgcgtggccgtccgtccgccgcacaggcggccgttgcaccgtgcgcacctggggatcgtccaagacgtcacaggccgctagggcggcgttcttgttcttggattgtcttgtcctcactccggcacgtcgcctccgcccggaggctggggcggccgccattccttggcgtagcaccggcacgcaggtggccactgtcggcatggacagaggcggagtcgactcgaaaagaggcttcatcggcccgggagcacgtggctttcctggccgaggaggtgcagcagtggcgctggctgaggctacggagcggccagccgaggcgtccgcttcgggccggaactga

SEQ ID NO: 31908 - DNA, 1428 bp, Zea mays
  Peptide Sequence Number=SeqID_75283
atgaccattggtgagggaatgcagccgggctgcgtgatgaaaatccttgaagccgagcgatggctgaagggtgccgacccccgcgaggttgcgctcctccaacagcagcaagacgaaggcaacacggacgctccccatccgggggctcggaaggcggctctccccactcgcgtcctcaagcgtcacgggcaaagtcttcaccgacatactccagggtcctccccctacgacacgggggctgggtcccacacgtcatgcaagctgaccagaaacggaagaagccaaaccgctgcacgcggagcatgtaaccgccccgcggttacaagcactcctccatcctcgccaaaaccagttgtcgaaagggcggaccgccatgtaggtggcatgcaaccgcaccacggttgcgcaccctttcggcttcatcgcatccgatgggtcagcgtgaaggcccaggcccacatgtcatgtaaccggcgcgccggttactacgtgcaagaaactgcaccaccacttgcgccaatatcgcgccttctcgactgcagaaccggagaaggagtgacggttgatatggctaaaagtggaccggcagtaaaggcggcagcagacgagcggaagcagcggtcaaatcgcctgcaggctcgcgtcccctcctggagcggcaggggagccctctcccacggcgtgaagacgacacgcccgtgttccgttcctcgaatgactcgagcacgcgcagtggccgcccaacgaaccacccgtcccgtcgcattaactcctcgacagggcaagcgacacctttggcaggcgaagcgagcatcgtttcacctccgccatgatgaccgcgtcaaaaaagggaccgggaaaggggatatttcgaaagggatccttctccgcgaaggaagcgggccccgagccctcctacggatttggggttcgaaggctggcccctcgaagggttcgatagccgccccagagtactcgggctccgcgcccactactgatcaggggttcgaaggctggcccctcggaaggagtcgaagtgaccgcagtcacttcgctcttccattgaccgacctgacaggaaaacagcgccgcctgccccgctccgactgttgtgccacccaccagggtgaggctgacaacagccaagttcagcctcaggcgcaacaggaagctccgcctcgcccgaccttgggcctcagcctcggaaggtggtctccgcctcgcccgaccctagggctcggcctcaacctcggcctcagaaggtggtctccgcctcgcccgaccccagggctcggcctcaacctcgacctcggaggaatcgcgtcctcgttcgaccccggcctcggcctcaggaggagtctccgcctcgcccgaccttgggctcggaccgaccatgccacgggggatacatcattaccctacccctag

SEQ ID NO: 31909 - DNA, 260 bp, Zea mays
  Peptide Sequence Number=SeqID_75284
agacaaccgatcaagccaaggatggaggcaagaagagcttcgaggtaccgagtgcacgggagaaggtcaaggagaccaggaaaccaaagccatgggtgaagaagaagtcttgcaaagtcaaggttgatcgagttaagaaaagttatgacgaccgttgctccaacggtcagctgagcccgatatggaaggagatcgcgcaccggacaagctacaggacctgcccggtggtacaccaggctgtccagtgcgccacccgatag

SEQ ID NO: 31910 - DNA, 201 bp, Zea mays
  Peptide Sequence Number=SeqID_75285
atggccgtggacggccagctcgactcccaggacgtaatcgtccaatctaagacgctctacgtgagtgacaggggtgctcctctatttaacctctcgcagagggaagctgaaggagaaaggtcaccgagtcacgccaagagtcggtcagctctcgccgagttatgccatgagtcggccagcactcgccgagtcataccatga

SEQ ID NO: 31911 - DNA, 1155 bp, Zea mays
  Peptide Sequence Number=SeqID_75286
atgagcaagaacacaagagacaaaagatttatcctgaggttcggtcacaccacaaaggtgccctgcttccttgttgaggcgcccacaaagagttgggtctctttcaaccataatcctcccttcgccaaccacaaagctgaagtcaagttcaactcagctgaagaaacgtttaactcagctgaagtcaagtttaatttagctgaagaaaaggtcaactcagctaaagtcaagttcaactcagctgaagaaaagctcaactcagctgaagtcaagttcaactcagctgaagaaaagctcaactcaactaaatgccgggcacggcccgttcttagtgccgtgcctgggccaccacttgggcccgtagggtcggcccaggcacggcacggtaaattgggctggcacggcgccggcacggcccacccagcagccggccagcagtgtaacccgcccccggcccccacttcccagtccccactccccagccgcggccgctcagtcgctcactcgctcactcgctctcgctctcgctcaaaccctaactcgctctcgctcagccgcggcccgcgggcgattcggcggcgtccggcgagctcccctctccctcgttccctccggcctccgcctccgctaagcgctccggtctccatctccgcctccggtctgcggtctccggctctccgcctcggcgcctccgctcggactcggatcgatcgtcgctcgtcggagaatggagatcctctccggctctcccccgctcggatctgcgcatttgtgaaccggggtttgagaaccggtgcgatctgcgcttctgcggagatcccggagctccgttctccctcatctctctcctctctcctgtcttcttctccccctccggcctccggtgtgatctgcgcttctgcggagatcccggtgctccggcttgctccgttgaggaaccgggactccggggtccggtacggcggcactggcactggcactggtactctcctctctcctagctccggtctccctctcggcctctcctctctcctagctcttgtctccctcacctatcttcttctccccctccggcactgtccggcactggcactggcacttgtactctcttctctcctagctccggtctccctctcggcctctcctctctcctag

SEQ ID NO: 31912 - DNA, 342 bp, Zea mays
  Peptide Sequence Number=SeqID_75287
atggcccctggagccagcgactatttgacggtggagtaccactctagagagctcccctctttcccctccgacgatgagggagccaccgccggcagcggcgtcctcatcatccccaagaagaaccgcaatgagatctgcaagtacctcttcaaggagggcgtgctgtatgccaagaaggactacaacctggcgaagcacccgcagatcgatgtgcccaacctccaggactctaggtaccattggttgttcttcaggcacaacatgtatcagctgcgtcaggagagggacatgaagcatgagacttttgccatcttgtctctaggaagatcatattcacagtag

SEQ ID NO: 31913 - DNA, 351 bp, Zea mays
  Peptide Sequence Number=SeqID_75288
atggggcagaagccatcgtacctcctgctgctcgtcggcctcctcgccatcgccatgctctgcgccggcccgggtcacgcgctgtgccaactgaacgacgccaacggcggtggcctggagttctccttgggctccaaggcggccacggcgggggccaagaccgagccgctggacccgtccttgagcgacgactacgagaacggtaccagccacgtggagttcgagccagagctcggccgcgcgacggtcgtccccgctgcgaccaccgtcaccgtcactgcagacatcacacatcgaactggatggaaacaaatgggtgggggaaatcaacaagcaccctacacaatctag

SEQ ID NO: 31914 - DNA, 1356 bp, Zea mays
  Peptide Sequence Number=SeqID_75289
atgcagatgcagctccatcttccaaacatgcacatggtggcgtttcatgatcggcaaatggtccagcgagttgtaaaccgtccaggtgctgataggtcaatgctcacagcatattttgaggcaaataggctacacgaagaggctccgggcatcctatattgtgacttccctgagtggttcacttggcagagtggtaagggcaaagtatggcaacggaggaaacgagatacgggtggacaagttggtagaatagtctctactcatccagccgagggggagcgctactatctctgtgttctcctaaaccacgtggctggcgccatctcctatgtggatccaaggacagtagatggtgtcaggctaccgacttttcatgaggcaacagagagaaggggactgcttgagtcggacaacacactggatgagtgtctcactgaacatgctcttttccagatgccatcggcgctgcgacgactttttgccacaatactggtgtactctactgctagggaggtttacgaggaggaaagtgtcgaaccgacagtggcagatgtggctctcaaagagactcttaacgaggaacagagagccgcctatgataagattatgtctgctattgacactgatcagggcggattgttctttgtggatggacctggtggcactggaaagacttatctatacagagtgttgctcgcgacgctacgcagccagaacaagattgtggtggcaacagctacatctggcgttgcaacttccataatgcctggaggaagaactgcccattcacgcttcaagatacctcttactattgatgatggcgttgtatgtagcttcacgaagcagagtggaaccgcagagttgctacggaaagcatctctcattatctgggacgaggcttctatgactaagagacaagctgtggaggcactagacaatagcatgcgcgatataatgggtcggcctggattgccattcggtggtaaaaccattgtcttcggtggggatttcagacaagtcttgcctgttgttcgtaaaggttcaagggctcaagtagtcgcttcttctctacggatgtcttacctatgggagtccatgtcccacttaaagcttgttagcaatatgagggcaaaaaacgacccttggtttgaagagtttttgctacgcataggtggtggaactgaggtcacgaatagagatggtgacattcgtcttcctggcgaggtatgtgtgccttatagtgggagtgacagtgatcttgacaatctaatagactatgtgttcccaaatctcaatgaaaaatatatcagattccacctacattacttcacgagtgatactatcaacgcgaaatga

SEQ ID NO: 31915 - DNA, 555 bp, Zea mays
  Peptide Sequence Number=SeqID_75290
atgagaaatgagtccatcattagtgagatccaagtccagctaaagcacaagaatgtcatagtggatgtcaaaagcaaattcagaccctcattcacagtcgaggaacttggtttaccaagcttgaaaaacataatggccatttcttatccacatcaagcatttgggaggtttggaatccagtacttgcgtaattatgttggtatcaatgccagttcttccatgaacacaaaaccttcggttaacctttctgttgtatttggcaacgaagctattcctgctggtgctgatgttgcatatgatgctactactggggatttcaccaagtacaatgcttggtttgagtttcagcaatgtagatctcagtgctgctatgaccttgaacaacataggggacaacctcactgcgtcctacactcctaccatttggcgaacacagagaaggacacaactgttggtatggaggtgacccgcaacttctcaaccaaggcgagcatagtcacctttgggacatgtcatgcactagaccctaccaccactatgaaggcgtgcaactaa

SEQ ID NO: 31916 - DNA, 462 bp, Zea mays
  Peptide Sequence Number=SeqID_75291
atggcaatagtcttcaacgccccgatcatcttcaacgtcgggaaggttttccgctttggatccctctcctgccttgcggaccgcaaaaggtgtcctacaccgcgtcatagacccatccgagaaggaatcttctccaatggctccaaccgcgaacgtaggatcatcccacttgaccctagcaaggactactctgatgaactccgaagtatgaagacctcaaccaaactccgcccccataggactgcggtcgcgtcgaccctgcctagggctatactagcacctgtgacccagccgactgaggaagcacccctagtgcggcggactctgttgtccacattacccacccgagtatggatccagatcactcaaagaaaaggagcggaaagccccggcactagcgtagccgcgggagcaagaccgaagattatcccggtcgccccgcccacatgggagacgacttga

SEQ ID NO: 31917 - DNA, 315 bp, Zea mays
  Peptide Sequence Number=SeqID_75292
atgcccccctgggcccgcctgtcagcgcccgtgtcccctggcgctgggcccgctcggtcaatgcgctctccccctctgtcgctgacaccccatggacccgcctacaacgagcagtccgaggttcctgagtgtgttgttggagaccttcctgagcaacaacctggtgaagggggctcaggcctttttcctgagtacctctccgctggaaagggatcacgactcatgggtaaagtgtgcaacctctgcagagtgttaggaactggtatatcagccgagctcacggttaagagcagccttgggatcctctttgattag

SEQ ID NO: 31918 - DNA, 126 bp, Zea mays
  Peptide Sequence Number=SeqID_75293
atggccgtggacggccaactcgactcccaggccgtaatcctccagtctaagacgctctatgtggtggggtcacggagtcagcgcgcgatcgacggcgggcgcgcggacgattgggcgaatggctga

SEQ ID NO: 31919 - DNA, 258 bp, Zea mays
  Peptide Sequence Number=SeqID_75294
atgaagggtgttcttaagggtcttggtggatacagtatcggaaggaaattcctgcttgagccaattacagaaggccctgatatttgccaaattgatggctgtagtgttaaattggaatacaagaggaggcaagtcaaatatggtttgtttgacacaaacgtgacatgccattacaatttagtttatgcaaaaaaacttaacttccaagctgccaagggagagaacttctgttgtaacggtactaagaaacccagttga

SEQ ID NO: 31920 - DNA, 1689 bp, Zea mays
  Peptide Sequence Number=SeqID_75295
atgccctccctgggtggacggaaagtgcgaagtccgctttttgctttggatgtgcgagggcgggatcctgccgcggttgtgcgtgaggcggaggatggggcggtgcgaattgttgggcgctacgtgccgaagacggaggcccagcggagctgggatatacgtggatccaacgaccgcctgaatagggtcttcgagttgaattgttttccgtatggcggttatcccggggaagacgttgtcgaccgccacgggaaaaaaccagcggctgtgactgaagacgaccccgcgctggaggctgccccggccactaagaaaaggaagctaggtactgcggtgggagaactgggggtctccgatagttttgctatggagttgatggagacatgcgcggcccccgggggaaggatgtcttcgcccgagctctgggagtcttcggcgcgaatgctggagaagtgtcgggcggtcatcaggctccccgatgctaggcgtgaagcgaagagagcgcgggggagtgcgaaggctgccgtccccagcggtagccagccgacgctggctgcgaagcctgccacgcctggatccagcaaggtgccggagagcacgaaggcggtcggcgccggcggaaccaattctgccctggacggagctgcgaaggtccgggagctgccttcgccggggaaacacgttgccgacttcggcacgaatattagcatggacgactatctcgttgggtcgggcgaggggcaaatggttgttgtcccgcctgcggtggcaaccacgacgtcaaccacggtggttggggtgaagggtgacgctttctgcgcgagcggcgagattttgttggccgccgccgttaaggacgaggcgggcaccatgtcccgccggctgagggaggcgtcgcagcagttagcgcaacagctaagtcaagctggcggagaaggtggccgccctagaggccgagaagacggacctccgccgccagctggtggaggaaaggaggaggccaaccaggccatcgctgaggcgcaggctgcgcaggcggaggccaaactggcgcgggcggagggaagtctcgccagccaacgcgccgaggaatgggaagtgaggtacaacgctctgcgcagccgcgtggacaaggccgaggcctccacgcgctcggagattgagcggacgcgcgcacagctcatggactcgtaccgcgagctgggtgcgcggactactgacttcgaggtgcccgaccgagaggcgggccttcgcttcctcgagtggttgcaggaggaactgctggtactcccgaccctcgttgagggcttcatgtcctttgcctccctcgtcacctgcgaaggggctatgaatgcgctgtctcgcgaggggtgcaagcactatgaggtcttcgaccgggccgatgaaaactttgggcgcaaaatttttaaggtcaaagaccctgtggtgaaggattccgcgggggccctcttcgatcggatgtggggtcctcatggtcgggaggcggttagggagcggtctgatcgggcgagagagcatatggcgcgtgttgaggatgtcaaagaccttggggatctaaacggcgcgcggtccgaggctgaggtcaacccggtgctgcccgaggctgaggtcaaccctgaagctgttgaggggctcctccgccggacctgtgcccactgtgtctggtga

SEQ ID NO: 31921 - DNA, 267 bp, Zea mays
  Peptide Sequence Number=SeqID_75296
atggagagctacgcgatgtgggtggcgaccggtgtggcgtcggccttcttcgcgtccctcgagcgctgctcctgcatccaccttcacaccgtggaggacgacggcgacgaggaggaggaggacctcgaggaggcccgccgctccttctcccgcccgatctctgagtactactacgaccgccaagaagatgaagaacaacaccccgtgtcccgtgtaacagttgatgagatatgtgactccccgtgtcccaaggaaattcctgcttga

SEQ ID NO: 31922 - DNA, 351 bp, Zea mays
  Peptide Sequence Number=SeqID_75297
atggattcaacatcggaaaagatgtacctctgccagttatgtaatcgcttccgcatttctttatctccgatgttctgtaatctctgcaagacgggtgaaacgttcctgaaaaggccacgcagggcctgttacaatgggctggatcacgcgtgggcctccgtgttggacgagaccgcgggatgggacgacctcgtcataggccttcgtcctgcgacgcgtgggatgaagggtaaagtctgccagtcgtcttgtctccgttggtgcagcgagactggcgaaggcatcgagcaaagggtggcatcttcgccttcgccccaacactcccccatcatagacatctcgaatttttga

SEQ ID NO: 31923 - DNA, 543 bp, Zea mays
  Peptide Sequence Number=SeqID_75298
atgtcgaacgtgacttgctcacttcatgcattgggtgctacaccgaaggagagaggtaactctattttgccgacaggaaaggtcccagcctgccacgctgcagttgataaccatggcgtcgatgtggggttcactacgcagatcgacgtctcgggcgtcgaaggtcaatggcacatgggaccacttcgtctgcatgactggaccattgatgacgacgtggttgatgttgcggtgggagtgggggaggtacgatttgtacctcctggtggtgttggtatgcgtggtgcggtggatgcggagcggggccgtggtttcttcgccgtggaacaaccagtaaaatctgtgcggctgctgcgcacgtccccggccccgaccgcgagctccgtttctgcggccctgggggatactcttggcggcgaggggcctcgtcagcggggtgctggttggcgatgttgtgtacctgttgctgattgcggccgtcccgaccggagtctgcttgcgaaggcctcgtccacgtacagctggactgcggagagtctttag

SEQ ID NO: 31924 - DNA, 516 bp, Zea mays
  Peptide Sequence Number=SeqID_75299
atgtctgcaagacgggtgaaacgttcctggaaaggtgggcctaattacttgggaggttccatctcagctggtatcggagtgaagcccttctttgcagatattatgaggcatcttcaaaaggactttctaaaagacttacctagaaactctcttcccttcttacctaagtattctgaagagtttattttaaagaccagaaatatgccgtcgcgcacaaggagaacagcgcgcaaacatactggaccgattggtgtgccgtgtcaccagctggccccaagacatgataatagtagtagtggtagcaacgatcctatcggggatctggaagcacaagtcgaactgcttcaatcagaactccgtcacaggaatgatctatgggtcacggatggtgaaagaataaacaaattgagagcagccatccgctacttgcaagaccaactcgtgaaacgagatctagcgctcgattgggcggttaactctcgtccattcgcctgggctaaggaagccaaagcttga

SEQ ID NO: 31925 - DNA, 81 bp, Zea mays
  Peptide Sequence Number=SeqID_75300
atgcggcttcatacccttagagatgatgtggttttatacccccagaggtgcttgttgctcatcaaggggagtgggaagtag

SEQ ID NO: 31926 - DNA, 585 bp, Zea mays
  Peptide Sequence Number=SeqID_75301
atgccgccgcgcacaaggagaacagcgcgcaaacacactggaccgattggtgtgccgagtcaccagctggccccaaggcatgataatagtagtagcggaagcaatgatcctataagggatcttgaagctgaagtaagtcggctccaagcggaactccgccgtaggacggctatctgggtcgtagatggcgaccgcataaatgagttgaggagagatgtccgccatctgcgagatcagctcgcggaccgggatttggcactcgactgggttgttcaatcccgttcgcttgcatgggacaaggagcaaaaagctcaagctcgagtagccgagctcaacttggccgttgatgaactgcagacatattgcaataccttacatgaagaggttcatgtattatattcgcaattacatcccagtgagcctacaaatccagatgagtcggaagccggaccctcgcatgttgcgggacacgcgcttggtggagagttagacctttttcagccccctccttctatgaggctggtcgacgaatggtctcccccacttgacgacgaggccaccaaaagcaatggaagcagggaataa

SEQ ID NO: 31927 - DNA, 738 bp, Zea mays
  Peptide Sequence Number=SeqID_75302
atggaagacattcatagcagtaagccagagcgtggccttgacttgccatctcttaaagccctagcctcggcgctgccagatcgtcaagcaaaaacaccaccaccagctgcagtgaagccggcgccggtgcctgtgcctgcacggaagaaggtactggctaagaagggagcagcggcggcgatgggaggtagcaaagatgcggggaagcaggaggatgtgcacaggttgcggattctggacaattgctacatgcagtatagatttttgaatgcccatgcagaggctgcggcgatagccaagaaagatgttgctgagaaaacaatatatggactctcggagaggattgctaatatgcagaaatatgttgcacaaaagaaggctgaactggagtgtctaaagaggatggagaaggccaacactggagaagtcaaattagctcttaactccgctatggagattatgaaacagttgtctccctgtgttgataagttgtcaagaaagatttacttgctaggactaattgattatcttgcaatgaaggttggagaaactgaggatgtggcttctgaactcagtaatgtggtatcagacgagcaagtgctacttcaagagtgtgctgacctcttacatcaagcgcacgacatacaggatggaaagctcagcgaaacatggcgaggaagccacaccattcccacttgttttgaggacggggcggcaacaggcggcagccgcgtctag

SEQ ID NO: 31928 - DNA, 456 bp, Zea mays
  Peptide Sequence Number=SeqID_75303
atggccgaggtcgagtccgagcccctaggtcgggcgaggcggaggccgttggctgaggccaggacggagtttgagtcctggggtcgggcgaagcggagttcgtcgtcttctggggctgagcccaagtccgagccctcggtcgggcgaagcggaattcgtcgtcttctggggctgagcccaagtccgagccctgggtcgggcggaacggagttcgccgtcttccggggcttagcccaagtccgagccctgggtcgggtggagcggaattcgtcgtcttctggggctgagcccaagttcgagccctgggtcgggcggaaaggagttcgccgtcttccggggcttagcccgagtccaagccctgggtcgggcggagtggagttcaccgtcttccggggcttagcccgagttcgagccctgggtcgggcggagcggagttcgccgtcttccggggcttag

SEQ ID NO: 31929 - DNA, 120 bp, Zea mays
  Peptide Sequence Number=SeqID_75304
atgggaagtgggttcatgctttctgtgctgaggtcctataatttttcaaatatttcgcagtggttgttggacaccaagtatgtaaggggacaagataaacctgtagaaggaacgttttag

SEQ ID NO: 31930 - DNA, 117 bp, Zea mays
  Peptide Sequence Number=SeqID_75305
atggaggcactatggaagcaggcctctaggctcaagaaccaggtcgctcggcagagtggagccgcagaggatggctggctggttgctggtcttgggtgcagatctgctgtggggtag

SEQ ID NO: 31931 - DNA, 1002 bp, Zea mays
  Peptide Sequence Number=SeqID_75306
atggaccgggcggcgctcaccgtgggcccggggatggacatgcccataatgcacgacggcgaccgctacgagcttgtccgcgacatcggctccggcaacttcggcgtcgcgcgcctcatgcgcaaccgcgccgacggccagctcgtcgccgtcaagtacatcgaccgaggcgagaagattgacgagaacgtgcagcgggagatcatcaaccaccgctcgctgcgccaccccaacatcatccgcttcaaggaggtcatcctcaccccgacgcacctggccatcgtcatggagtacgcctccggcggcgagctcttcgagcgcatctgcaacgccggcagattcagcgaggacgaggcgcgtttctttttccaacaactcatatcaggggtcagctactgccattccatgtcatcagttctacactctcagcccaaatctaccgtgggaactccagcatacattgctcctgaggttcttctgaagaaggaatacgatgggaaggttgccgacgtgtggtcgtgtggggtaaccctctacgtgatgctggtcggcgcgtatccattcgaggacccagacgagcctaagaatttcaggaagacgatccagagaatactgggcgtgcagtactcggttccagactacgtccacatatctccggaatgccaggacctaatctccaggatcttcgtcgccaacccgtccaccaggatcaccatgcccgagatacggagccacccttggttcctgaagaacctcccggccgacctggtggacgacagcgcgacgacgacgagcaagcagtacgaggagcccgagcagccgatgcagggcatggacgagatcatgcagatcctgggcgaggccaccattccggcggcggggtcccgcgggctcaaccagttcctgaacgacggcctggacctcgacgacgacatggaggacctggactcggacgccgacctcgacctggagagcagcggggagatcgtgtacgctatgtga

SEQ ID NO: 31932 - DNA, 153 bp, Zea mays
  Peptide Sequence Number=SeqID_75307
atggatcctaagggaaagggaatggtggtcgacaacaacgagaaggagtctgttgggggccttcggcttccgaaggtatcttcggactcgagtcgatatcacagtaggagaagcccaaataatacgaaggttgatacagcgtcgaagatgtga

SEQ ID NO: 31933 - DNA, 162 bp, Zea mays
  Peptide Sequence Number=SeqID_75308
atggcgcccaagaggaaaaccgcgaactcgtctgctgcggtgatccccacaatcgaccccaacagtcagttacccttcgcagaacattcagccactgaaagacagggcctatccagcatatctgtatcgagggctagccgactcaactcgggttaccaataa

SEQ ID NO: 31934 - DNA, 453 bp, Zea mays
  Peptide Sequence Number=SeqID_75309
atgcgctcgacccatctgggctggggcacgcggcgacattcactcgtcggcttggggaccccccggtctcgaaacgccgacacccatggacgggtaagagtgcgcgtaagcggcaaggccgaccgagccgagggactcctacgcctccgggatacggatacctcactcatcaccttccgccttcgccataatgaccgcgtcagaaaaggaaccaggctccgagcctccctactgatcagaggttcgaaggctggcccctcggaagggttcgacagccgcctcagatcacgtgggccctacacccactactggtcagaggttcgaaggccggcccctcggaagggttcaacgaccgccttaggctactcgggctccgcgcccactactgatcaggggttcgaaggctggcccccgaagggttcacagccgcctcagacacagagcgagggatga

SEQ ID NO: 31935 - DNA, 420 bp, Zea mays
  Peptide Sequence Number=SeqID_75310
atgcaagatgcagcacgacaggcactttctcagtattgctcgttgttcagcggggtagctgacggcctcgacctgaagtactaccctcgccgttcgaccggcaatgctggaggtgtgattgtctcgccagttggtgagggcaatcccaggctgaacaacatggtcaacctagtcaccgtgctcaacaccgagctggaccacgcccttgacgagttgggcgagatgtctgagaacaggcgcagaggtgcgaggcgtgctcagccagaacagcaggcaccccaggaggatgtagctcagcagcatcagttgccaccgccacccctgatgacagttgagcagatgttcatgatgcaaactcaggcagttcaggaaattagtcagactttagcagagatgcagcagcagctacccccaccttag

SEQ ID NO: 31936 - DNA, 294 bp, Zea mays
  Peptide Sequence Number=SeqID_75311
atgtcgacgagcgtcagtcggctcgcggctgcgactagcggcgggggcagcaggttggggatgaagaacaaggcgaaggccaggaagacgaacggggcgtccgacgacggcaaaaacgatggcgacgaagaagaagcaaggatccctacagacttcgatgaatgtgttagccgccaagaccttgaggcacacaacaaactcctgaaggagcaaatggaggagacggtccacaagtcagtgcatgatgccttcattgacatgaactttggcaagacttacgagaggctggattaa

SEQ ID NO: 31937 - DNA, 72 bp, Zea mays
  Peptide Sequence Number=SeqID_75312
atgaccccctcggtatgccgcctatccatccatttcctgccaaaccgcgtggattattttggaatgtgttag

SEQ ID NO: 31938 - DNA, 384 bp, Zea mays
  Peptide Sequence Number=SeqID_75313
atggcgaagaccatgtccaagtctgtcttccttcaacgcgagcgcagcgtctgggatgcgctgctacgccagaagggtttgcttgatcgttctaacgagcagcttgcccgaaaaagcatcgaggcaacagatcttctaacaatgtgcttagtgcttagggacgaggtcgtggtcgtgcatcgggaggtggcacatgtggcggagaaggttcgctcgctggaggagaacctccagaagcttaagcaggaacttggcatctccatcaacatgtcccaaacactctcccaagccgttgatgagaagattgtcgcgcttaactccttgtccaaggtggtggcgaactttggccaaacctttggcaccgaggacatccccctgggttga

SEQ ID NO: 31939 - DNA, 276 bp, Zea mays
  Peptide Sequence Number=SeqID_75314
atggctcatgaaataataaagaagaatgaaaaagatatccacgactctcgagaagaagcaaagaaagttgagaaagctgcagaatttgagaaacaaataggtattgcttattggcttctgagctacctcctccaccgggagccgttcgacccactcgccgacccggagacaaagaaagcgatagaaattattaatatggctgaagctattgtcgacgaagttgttactaaactgcttaacgaagctgcaaaatcagttctgaaggaagaagagtag

SEQ ID NO: 31940 - DNA, 348 bp, Zea mays
  Peptide Sequence Number=SeqID_75315
atggctcgccgtcttcatctaaccatgaaaggtgtgggcctcctcactcaaggggatccctcccgatgcggacgacgccactactcgcctcatcgcggaggaatagcctggttcgctccaacacaaggacctcaggccgcctatgggaccggccgcatcggcatcagccacccctttcctcggtcagcagtaggggaattgaggagggagatcaatatctccaatggagtcagcgacgccgccatcgatgccacgtcagccaccctcgacctctccaatgtgtccgggatggcctctatgaacattgctggaggtgccgcaaccacctcggaagtagagacctcctga

SEQ ID NO: 31941 - DNA, 432 bp, Zea mays
  Peptide Sequence Number=SeqID_75316
atggagtactactccgccccgctcctacagggcgcacctgtgaaagggaaatgtgcctttgggccatttctaagtattttggtgattgagtgccaacacaagtgtttttgtgttgatctatgcaatgtggtggacaaagtgcaaatcatgtcaaaaggaaaaatcgaattggaaatgagatggctttgttcagccaaagtctgctcagtctgggagcaccggactgtccggtggtgcaccggacagtgtccggtgcgccaggctggctccagcgaactggccgctctcgggaattcaccggcgacgtacgactataattcaccggactgtccgtgtgttgctaatccctcccttgctccgtgcttctttgtgaatttcaagtgtaagggcgagaggctccaagttgtggagattcctcgcaaacgggattga

SEQ ID NO: 31942 - DNA, 414 bp, Zea mays
  Peptide Sequence Number=SeqID_75317
atgactcgcccgaggctcctctcggtggtcacttataactccgcctcgcccgagcctgtcctcggaccaggtatagcgattattgttcccccacgctgccaaccaactcccgatgggacatgcgtacaacaaagcacggactggtcctcgggaggaaactacatctcgcccgaagtcggccttagccttggaacaaacttcgcatcgcccgagcccggcctcagctacctactccatgcgaatcccgcaggaggccactccttcaactgtgttgtgcacgtctacgaatcccggagcaggctcggtcatggcctcgggcatggcttcggcctcgatattatcaatgaaagggcgcccgacgtcaccagaaacagcagagctgacgtattaccaatggcttttcgccatacttag

SEQ ID NO: 31943 - DNA, 561 bp, Zea mays
  Peptide Sequence Number=SeqID_75318
atggcttccttgggaaggagccatcaggcaagggtaaagccagcgttctacccgggtgctaggaaccttctcaaagtgagagaaatcaaattggaaaagtttggctcaagcgagtcagacatgcaccagcctgtggtgcaccagactatctggtgtgcaccagacagtgtccggtgccaaggctggcgccccgacgaacaggccgctctcgggaaaatactgcttcgtggctataattcaccggactgtccgatgtgccagcgacacacccgaccaacggttgaccaaacgatcagtggtgacatgtggctcagccaacgatcagaaggtcgcatcggactgtccggtgtgccacgagagcctatcgctgcaatggtgagctttgccagaaaaggaagggaatcacgcactgttcactgtccggtgcgcccacgaatagaaggcagccatgcccttccaaatggaactcaaacgactcctagctgccttggggctataaaagggacccccaggcgtatggagcaccacaccaagcagtcattgaacatccaacaaaactga

SEQ ID NO: 31944 - DNA, 529 bp, Zea mays
  Peptide Sequence Number=SeqID_75319
atggctgaaaaacttagcgtccttcctccccgtgacccgtggcctatctcctccgttgccgacgaggatctgcaagccctgccaaagtctgctcagtctgggagcaccggactgtccggtggtgcaccggacagtgtccggtgcgccaggctggctccagcgaactggccgctctcgggaattcaccggcgacgtacgactataattcaccggactgtccggtgtgcaccggactgtccggtgagccaacgggcggccgggccaacggtcggccgcgcgatctgcgcgggacacgtggtcgggccaacggctagaagggggcaccggactgtccggtgcgccaacggctctcaggcgactgttggggcgaaggcaaagacgccacccttcgctcgaggccttcgctgcagccgctggtccgacggaggcaaagcgggcagggacacccttcgcaggactcggcactttgacgaaggcctgcggcgacgtcctcacacggcgcggcctcgttcagcccccaatgccccac

SEQ ID NO: 31945 - DNA, 168 bp, Zea mays
  Peptide Sequence Number=SeqID_75320
atggagttgcttgctatttggcagggaggtttatctggagtgtgctttgctttgagcgagatgggagttgagggagccgatgggggggtttttataggcgagcgggctctagccaaagtgaagaaaaacttcactacccaaatgcatgcagaggactgggcatactaa

SEQ ID NO: 31946 - DNA, 264 bp, Zea mays
  Peptide Sequence Number=SeqID_75321
atgagtgagctgctcggccaccagcgagggagtacgccgagcggggaaaatacacagggcacgcacgagttgagcgacggcaggacggacagatcgacgtcaggggcgaggtggagggacttcatggagcgtggtggagctgagcgccggcaagcatcccaggcgcgccgcgcagaggagaaactcggcacgcagagaggtaagccagagagctccggtgtcgaggggatgcaggctccagcaaatcccagggcgtggccatag

SEQ ID NO: 31947 - DNA, 429 bp, Zea mays
  Peptide Sequence Number=SeqID_75322
atggggcttcgcggctggaagagagagaagcgcggtggccagggagcaggcgatgccgcggctggagaggaagaagaagtagagcgcacgcactgggaggagatggagctgagcggctgcgcagtggagcaagcagccatggaagagcagagattcgactgggagggaggagatgggacggcgcttgggatgtccgggaccagggcgcggctgcaggaggaagatatgttagacaacaggcgcagaggaggaaggcgtgctcagcaggagcaggcagcaccgcaggatgaggcaccccagcaacagcagctgccaccaccgcccccgattaccatcgagcagatgttcctaatgcagactcaggcggtccaagccattggtcagaccctgtgtcggtgtttcgaccacggggggtccctggaccgatga

SEQ ID NO: 31948 - DNA, 384 bp, Zea mays
  Peptide Sequence Number=SeqID_75323
atggctgatccaacggttatacccattgccacacctgcacccttcatcgaggatccaacgaccctcacccctcttccaccccaagctatcaacgccgtggcgcacagcgttccgcccgcggtggtcaccatggccggcccacccaatctgcgcgttccggtgcgcgattcccaaatcaatctggtgctacacgatgtaggtgcatgggcggatcggtatgaagagttcttaccgtgtctcgacgcagtagaggacgcgaccacggcgcacagcggtgtggcggcgttcacctgcgacttcttccaggcgagatccgaaatccgcgacgccggtgagaatcccccgagctaccagccgaggccaagcggcttcatgagcaagtag

SEQ ID NO: 31949 - DNA, 729 bp, Zea mays
  Peptide Sequence Number=SeqID_75324
atgtcagagattgatagacttatatctgatgtggctcccgagaaggacatagctgaagtatccactgataaggctttggctttaaaaatgaaagaatttaaaaaggcttcttcggaggacacagagttggacctacgacacctgggcggccaagaactgtccgatgaagatatttctgaattgaaagaatttgcccttgctgcccttgccctgcacgcacgtggcatgctcgccgcggcggccggcgctgccccggcgtggcgcgcccccaggtcggtccgcctgcgctggcgcggcctggcgcgcagcgcggccccgccgtgctcgcccctggctcagtccgcctgcccttggcgtggcctggcgcgtggcgtggccccggcgtgctcgccctcggctcggtccgcctgcgctggcgcggccccggcatgctcgcccccggttcggtccgcctgcccttggggtggccccggcgtgctcacccccagctcggtccccctgtgcgtgcggccctgcgtagtgaaggagtgcggtggtgatggggatgatgattatgactatggtaatgatgagtcggaggtctcctcggacgaggggaactcttctgactcgtctgaggaggggagcaacggtgacgacgacggcgagggcgagggcgacgacgggggcgacgtcgatggcgatggcgacggcaagggcggcagcggcaacggcaaggccagtggctag

SEQ ID NO: 31950 - DNA, 471 bp, Zea mays
  Peptide Sequence Number=SeqID_75325
atggggtgcgttcgattcgagcagggagatagagctgacgaagatggtccgcgtgcaagtggctggcgcgaggaaaacagcgccgctcgccccgctccgactattgtgccacccaactgggtgaggctgacaacagccaagttcagcctcgggcgcaacaggaagctccgcctcgcccgaccccagggctcggcctcaacctcggcttcggaaggaggtctccgcctcgcccgacccaagggctcggcctcgacctcggcctcgggcggaatcacatcctcgcccgaccccggcctcggcctcaggagaaatctccgcctcgcccgaccttgggctcggaccgaccgcgccacggggccccctacggaagcaaggagacatcagcaagatcccagcagcacagacagctacgcttctacagggctcaggcacttctccgacggccacgttaccgcgtacacagggctctag

SEQ ID NO: 31951 - DNA, 531 bp, Zea mays
  Peptide Sequence Number=SeqID_75326
atgcaggtggcgtgcaaccgcaccacggtggcgcaccccttcggcttcgtcgtgtccagcatggaggcccaggcccacacgtcatgtaaccggcgcgtcggttactacgtgcaagaaatcgcaccgccacttgcgccaatgtcgcgccttcttgactgcggaaccggtgtcgcgactcgaggcagccctgcgcacgacccaacagtgccaatcaagcacaggggttcgaaggctggcctctcggaagggttcgacagccgcccagagcactcgggctccaagcccattactgatcaggggttcgaaggctggccccttggaagggttcgactgctgccccagagcgcccgggctccacgcccactactgatcaggggttcgaaggctggcccctcggaagggttcgacagccgccccagagcatgcagagtgagggatgactctgggtacgtccgttacatggccgaggctcgggctacgctcccgaggtaccctaggacatttccgagaccagcaggagcgattttgtaa

SEQ ID NO: 31952 - DNA, 603 bp, Zea mays
  Peptide Sequence Number=SeqID_75327
atgccccctgcaccacctcaaggcatcccggctgctggaggagaccctgacagagacggagacgacaacgacgtcgttggcagttcgagccacgacacggagctctcggaggagccggagccggagggatggatcgctagacccatcactcgtgacactgctcgcggcggggtagctgatggccttgacctgaagtactaccctcgccgttcgaccggcagtgctggaggtgtgactgtctcgccagttggtgagggcaatcccaggctgagcaacatggtgaacttggtcgccgtgctcaacaaacagttggaccacgcccttgacgagttgggcaaggttcgggcagaggttgcggaattgcgtgctgaatgcgcgtcacgccactacctggatggtggatctcccgccctgttaggattcagcacccttaccgttcatcgccccgtggtcgcttcgactatgatgtctgagaataggcgtagaggtgcgaggcgtgctcagccagagcagcaggcaccccaagaggaggcagctccgcagcagcatttgccaccgccacccccgatgaccattaagcagatgttcttgatgcaaacctag

SEQ ID NO: 31953 - DNA, 534 bp, Zea mays
  Peptide Sequence Number=SeqID_75328
ggcgagattcgcatgtttggctgctcagcaggcgcaagatcaaaggcagaaatcaacagccacgtgttcgacgcgctctggactcgccagagcacgcccgacgcgcgccccgcatgccccgcgtcgtgccaaagcccagccggcgccatggcccgcgcccgcgcctataaaacgcccagggaccttgaccgtacccctccgcacgcgctcaacctcgccggagcccaaacccaccggcgtttgcccgtgcacggcgtgtccgcggctgcccgatccccctaccaccgtagaccggccaaccgagcccttaccaaccccgtccaaccctcggagaagactgtgcacacctcggtgaagctccccgagcgaggaatcggagtttgcttcgccggagaggccagtccacgttcgccggactccacccgaccgccggcgagcgtagaccgggtaatcctctgctccattcttcgattccttgtgcacacagcctctacgccaccccgtgaagctcactgtgccattggattgaactag

SEQ ID NO: 31954 - DNA, 87 bp, Zea mays
  Peptide Sequence Number=SeqID_75329
atggggacaacctggggtggggtggtttgtaaagcaagggtccttacaaagaggtactcaggaaagagcctgagccccctaaagtaa

SEQ ID NO: 31955 - DNA, 1134 bp, Zea mays
  Peptide Sequence Number=SeqID_75330
atggacgacctagggttggccgcccctaggggctgcgccccctctctatttattcaggagctgcgcctcctttatttcccgagttttgttttacgaaacgatcttcgtgatcaggccgatctcgcatcagcaaggtcggtaaccacagggagttggttcagcgattgcattggcgcctcgggcttgctcgtcgtagtcggatcgcaagggctacatagtgataccctgctaggccacctaggtagtggtgaatggggagtagctctgtccgggcagaaagggaatcgcaacttgtgggtaaaagatgtttggattacatgtggtgatggggatgatgattatgactatggtaatggtaagtggtattccttccgtttggaaagggagctggagcagcagggctcttcttcctcccctcagcaggtagtggagtctgtgaggagctgctcccttgtgctcccgctggaggcgccccctgcaccaccactaagcgccccagccgctggagtagctgtcgcaggagaccccgacgacagaggtggcgacagcagctcgagcttcagcaccgacctttcagccgagcaagagccggaaagatgggttgctcgacccatcactcgcgacgccgctcgcgggtgtcacttccacgacgcgctcgacaccctgctgcgccaggcactcgaccggcatacttggtcgatcgagtatcgctgtgttgtcttccagcacagtcacagggtttacccggaccgctgggaggcgacttgcttggtgcaccgtccggagaacagtctccgggtgcggagtggggtggccgatggtctcaacctgaggtattacccccgccgtccatccggcagcataggaggcgtggttgtctcacccgttggggaggacaatcctaggttgagcagcacagtcaacctagctgtcgtgctaaacatggagctgggccataatttagacgagctgagtagtgtggcagaccctcccaagttattgggcccacatgcacctgccgttgtctcaaagaagtcagacggctatgcatgtgcaccggataacttaacaggatccgtccgagtgtctctaggacctcggataaaccacttacaaccaagatcgcaagattaa

SEQ ID NO: 31956 - DNA, 651 bp, Zea mays
  Peptide Sequence Number=SeqID_75331
atgatagtaggtatgtttccagatgattcacatattgcagaagtgatatttgatactggagcaacacattcttttattactgcatcatgggtagaagcgcataatcttccaataactatcatgtcaacacccattcaaattgattcagccagtggtaaagttcgagtcaatagtgtttgcttgaataggtggtacaactttacccacaagccgtgtatctcctctagcctgggtcgaccaaaacccgtaaacacttctgagcacagcgcctcctctcctgctctccagcgcctgcgcccgcgccgcgcctcctctccagcggccagcgtcgcgctgctgcgcgctcgcggctcgcggccagccgtcggccaccggctaagccgcaccacggcaggcggcactgccaggcacagccgcacaggcgcccagctgcccagctggcgtgcagcgcaacgcgctcgagtgctcgaccaccagccagagtttgaggatgatccagatctttatgtgctgaagcctttgaagtatattggaattgaagtttggcaggctgaaaaggaagcttttgaagaagctgaaaaggagaggaaagctagggaggataggttggatctagttatttctatgttgatcatcatttatgattcttga

SEQ ID NO: 31957 - DNA, 498 bp, Zea mays
  Peptide Sequence Number=SeqID_75332
atgacgaactttggcgagacgaaggacgatgagcagaatgtgtggcaatcaacgggcgagcagcatcagtgcgagtgctgcaccggcacgataacagagagtgagagtgaagcaaggaacaggttcgacggcgaggtgttgtgtcttgacgcggtgggtgactgcagcaagcggcgcggcagcaaggcgatagcaacagtgcacggggaggtggaattgaggcaaggaattaaccggcgagatcgagggggtgattttataggcgagcagaggaggccgagagacgctagcgatggagctccaataatagcgttggctgttaatggagatggggaaggaactgccgccatgaataagaaagggagaggaatggttcagagcggcgcagtagtggtggcgattcggctgggcgacataggcgcgtccacaagcttcactggatgggagatgagagggggagggaggagaacgtcacataggagagctgacgcggcgtag

SEQ ID NO: 31958 - DNA, 357 bp, Zea mays
  Peptide Sequence Number=SeqID_75333
atgggcgcgaggaatttgagaatggctgactggatagctcggcctacgcgcggtggcgggcggccaaagtctggcgacgatgatctcgctgttcctgtgaggcagggcttcgatccttgcttggagaagcttcacggctccacgtggaagctgtccaagggctcggttgaggctgagggtctctggaaatggctggccgcgatggccggcgctcggacgggtggtgcagagctcgcgcggagccaaggatggtgtctggccaacgaagactttggcccggctgctcgcggctacagcgcaacatttgtgatcaatggcgcaccaatctgccgtatccctcccctctcgcctatataa

SEQ ID NO: 31959 - DNA, 243 bp, Zea mays
  Peptide Sequence Number=SeqID_75334
atgagggcaagacctaccccactcctcctcctgctcctctcctgctggagcagcatcccactcaaccatccaacccggcggcagggtgctgaggtgcccgatctttcggcgagtagagataattccgatttggcggaagatgacccttgcgattcgactacgacgagcaagcccgaggcgccaatgcaatcgctgaaccaactccctgtggttaccgaccttgctgatgcgagatcggcctga

SEQ ID NO: 31960 - DNA, 603 bp, Zea mays
  Peptide Sequence Number=SeqID_75335
atgggcgcgattaaggtcaaggctcagtccactcaagggacacgatctcgcctcgcccaagcccagcctcgggcaaaggcagccgaccccggaggattcacgtctcgcccgaggcccccctcaagcaacggacacaccttcggctcgcccgaggcccagtcttcgcagagaagcaaccttggccagatcgccacgccaaccgaccctaagtctagcctcgggcgctataggaagctccgcctcgcccgaccccagggctcggactcagcctcggctccggaagacgacgaactccgcctcgcccgaccccagggctcggacacagcctcggctccggaagacgacgaactccgccttgcccgacctagggctcggacaaagcctcggctccggaagacgacgaactccgtctcgcccgacctagggctcggactcaacctcgacctcgggagacggtctccgcctcgcctgacccaggggtcggactcagcctcgacctcggaagacggactcgacctcgacctcggaggagcctccgcctcgcccgacctagggctcggactgaccgcgtcacaggaggggccatcattaccctacccctag

SEQ ID NO: 31961 - DNA, 981 bp, Zea mays
  Peptide Sequence Number=SeqID_75336
atgttgttctttcgccacgtggggaagacgtcgttggttccgccgccggtgggcgggctgacagccgccattgtcgctgtcgcgcggcggaggaaggagtatcatgtcgtagctgtcgtcaagggaaatgaaatcaagactcccgaaacggagaatcgtcccgggttggaaaggttgctggagactacccatctggagcttgacgggaagctgttcgtcaacacgtcgggcgaggcggaggctcctccgaggtcgaggtcgagtccgtcttccgatgtcgaggctgagtccgacccctgggtcgggcgaggcggagaccgtctcccgaggtcgaggttgagtccgagccctaggtcgggcgttgcggagttcgtcgtcttccggagccgaggctgtgtccgagccctgggtcgggcaaggcggagttcgtcgtcttccggagccgaggctgtgtccgagccctggggtcgggcgaggcggagttcgtcgtcttccgaagccgaggctgagtctgagccctggggtcggccgaggcggagcttcctatggcgcccaaggctggacttagctgctgtcagcctcactctgtcgagtggcacagcagtaagagcgatgcaggcggcgctgtcttcttgtcagctttgtgctgatgggggttaccagctgagattaggagtcttcggggtacccctaattatggtccccgacaagtgctacgggtgcgatggtgcggccacgagtagcgaggtaacgacgtcactggagaaggatgccgaggcgaactccgacgaatggtggcgtctagagagctcccgcgacatcatgctggcgaacttcagaggggttctgaaggcgacgtcggtgaggcactcgcagcgaagctttgatgatgaggcatggcgggttctgatgagacgaagaacgatggcgaagcagttacaggaggggctggcgcactgtatgatagcaacagagcagtga

SEQ ID NO: 31962 - DNA, 312 bp, Zea mays
  Peptide Sequence Number=SeqID_75337
atggtcctaccatgtccgagcaggtccacgaagctgctgcgcgatgaagcgagccttggtgtcatcggggcagtctcccgaactcctgataggtcgccgcggccggaggtcgccacggttggcctccaccatgttgctaaggatggggctggcgctgcaagagctatcgcagaatttcgttctgctgagccatcaactcctgcactgtgggagctagaggaggtggcgggggaacttgctcgttctgaccgcgatgctgccaagttgccatctgaaaacagagattgccgccattgttatcccaattcataa

SEQ ID NO: 31963 - DNA, 441 bp, Zea mays
  Peptide Sequence Number=SeqID_75338
atgggcaagaacaacaagcgcaagcgtgagccaactcctccatcggaggattttggtgactcggagtactcagaggaggagttctcctctgagtctgaggggtctccggctcccatccccctgcgtgagtcgtctgacgactcagacgactcccaggggctcgcggcggaggtctggacgtacatccgggccgtcgagcgctccgggctcgagggctcggatgagtcagagtactcctcggacggtggcggcgaggacgaggacggcgacgacgacgacgatgacgaaggcggtggtggcggtgatggtgacggcagcgacagaggcggcagcagcggcagcaaggacggtgacggcggcggcagcagtggcggtggtggcagaagcaggggcagcaacaggggcgactgcggcggtggcagcaacagggccagtggctag

SEQ ID NO: 31964 - DNA, 453 bp, Zea mays
  Peptide Sequence Number=SeqID_75339
atgagttctaggcgtgggttagcggcaaccctcagtcggctgcctgtgaaggtcgtccatttggagaggctgcaccaccgcatgcacgaggagcaagagcatcggcgacaggagttggagcagcagggctcttcttcctcgcctcagcaagaggtagagtctgtgaggagctgctctcctatgcccccactggaggtgccccttgcaccaccactgggcgtcccggccgctagagtagctgttggaggagaccccgacgacagaggtgacaacaacagctcgagccccagcaccgatctttcagaggagcaggagccggaaggatgggttgctcgacccatcactcgtgacgccactcgcgggtgtcactttcacgatgcgcttgacaccttgctacgccaggcacttgaccggcgtacctggtctatcgagtatcactgtgttgtcttctag

SEQ ID NO: 31965 - DNA, 354 bp, Zea mays
  Peptide Sequence Number=SeqID_75340
atgtcaaactccaccaccagcagaggcagaggcggcggcggcggcgtccggcccaagccccgcggttcctgcagggcgtctgatgatgcggcgcaggcgcagcagcagctagctggtcacacgctaactccgcctagcccctggctccctgctagcctggttcgcggcgccacgttaccgccaaaatatcgccggcaattaatgggtgacccacccccgcccgcatacacggatacgccgcctggatcggagtggaggtactcactgcacttgacgcagcaggctaacgacgagcgtttcgatgcttttaagctccagcggcagcctaggctagcggtacggtgcccaagctga

SEQ ID NO: 31966 - DNA, 555 bp, Zea mays
  Peptide Sequence Number=SeqID_75341
atgaatgcacttgttgagagtttggtcagccaagatttcgtgggagaggcagaagtaagtaagagagagagagagtgtgtgagggggtatataaaggatcccccaaaagctggcagctattgggagaaaaggggtaaaaaccggttgaaccggttttcagaccggttgaaccggtttccaccaggaagatcccagttcacaaacctactcagccggagactcgaccagattcaaaaccggtcgagccgggaaaaactccggttgaactggttttcccaaaagatctacaacgacttttctgacagctctgactgtcagacaggtcagagcagggatggcagaggaacagtcccaaaaccggttgaaccggtttccaaggctgaaaaccaagttttgaatattttgaagagaacaaaggtggagtttttgtgggaagtaaaaatggtttttctcaagggcattcatgatctggaaaaatgttctcgaagatgttttcaaaggattttgaacttagctcattgcataacttacttaaccattgcggatccctcttaa

SEQ ID NO: 31967 - DNA, 913 bp, Zea mays
  Peptide Sequence Number=SeqID_75342
atggcggccgctacggggagagcaggctggccggaatcccgcgccgtggctgcgcacgcgcagtcacgcaggggcctcgcccactcgcgccgtgggggctgcacccgcgcccacaacgcgctgggacgggagacgccggggccgaggccaccgcgcccgagccgtcccgagcggatctacctgtgcgcgccgccggggttgcacaccgagccgtcgaggccgagggccgccccgcgccgccgtggccgtaccgcccgcgccggacaggctgggccgcgcccgcgcgcgccgggaccggttgctcgcgtaccgccgggtggccgtgcccgagccgacggagacagcgtccgcgcgcaccgtcggggtgggctgtgcccacgccacagcaggggccgcacccgtgctgccgagggccgtcgcgcccacagccgccggggggggccgctcccacagccgctagagggtcgcgcgcgaggccgtgcccgcgccgccgaaccgctggccgcgccatcggctgcgcgcccgcgcgaggaccgcgctcctgcaccgagccgctcccgcgccgacggggccgggggccgccgcgcctgtgaccaaggccgccatggccaccgctcctgcctggccggggccgcgcgctgtcgggccgccacgtacgcctggccggagccgcgcgccaccaggggcccaccggcgctctaccggagggggccgcgcttccggctgccatggccgtgcctaggccgctcccacgcgcgccgggtctggggcacgcaggccgcgggccacgcgctgtcgggctgcggcgcgcagcgcgccgtgctagcagcacagcgtgcgcgcgcgcgccgagcgcaccgtcgcacgagcgtcacgccgctccgagcgcgcgcaggcctgccccgtgccatca

SEQ ID NO: 31968 - DNA, 894 bp, Zea mays
  Peptide Sequence Number=SeqID_75343
atgcaggtggcgtgcaaccgcaccacgggggcgcaccccttcggcttcgtcgcatccagcatggaggcccaggcccacacgtcatggaccgggaaaggggatattccgaaagggatccttctccgtgaaggaagcgggccccgagccctcctactgatcaggggttcgaaggctggcccctcggaaggagcgagggatgactctgggtacgtctgttacatggccgaggctcgggctacgctcccgaggtcaaggcctcgtctaccaagggacgcgatctcgcctcgcccgagcccggcctcgggcgggaacagtagtcccagacgaattcatgcctcgcccgagggcctcctcaagcgacgggcgcaccctcgactggcccgaagcccagctcgggcaggctttgttgcgaagcaaccttggccaaatcgcctcaccaaccgaccgtatcgcaggcgcattcaatgcgaggatcgcctgacaccttatcctgacacacgtacctcagtcggcaaggtcgaacctcatgcgcaacaggaagctccgcctcgcccgagcttgggcctcggcctcaggaggaggtctccacctcgcccgaccctagggctcggcccccacctcggccttggaaggtggtctccgcctcgcccgaccctagggctcagcctcaacctcggcctcggaaggtggtctccgcctcgcccgaccccagggctcggcctcaacctcggcctcggaaggtggtctccgcctcgctcggcctcaacctcggcctcgggaggaatcacgtcctcgctcgaccccagcctcggcctcaggaggagtctccgcctctcccgaccttgggctcggaccgaccgtgccacgagggacacatcattaccctacccctag

SEQ ID NO: 31969 - DNA, 486 bp, Zea mays
  Peptide Sequence Number=SeqID_75344
atgcatcgcgcccttcctccttccgagcccccggatggggagcgcccgcattgccttcgtctagctgctgttggagggcaggtggccgctgtcgtcggtgctgaggtggtggcagccagagaaggtttctccgccgacgagaccgtcggcgccacctgcggtcggaccttcggctcttcgactttgacggcttgtcctcgcccctcgtacggggactggtcgcgggcgagccacctggagtttgtcatcccgcaggccctctggtgtggaggttgttcatacccgcgggagtggaaccggagttccgtttgtaatggcaccctgagtatgggtaaccctcagctgctcttcgatgagccggagccggaggcagcggtgtcagcgtggacagaggcggagtcggctcgaaaagaggcttcgtcggcccaggagcaggtggcttcccaggccgaggaggtgcggcagcggcggctggagcttggctag

SEQ ID NO: 31970 - DNA, 913 bp, Zea mays
  Peptide Sequence Number=SeqID_75345
aagtcagatggaggtccgttgccgaaccagcttttgccagaatgaagatggtttccccaagttactgagagcatgcacagttcgcctcggaatcaggagccagccagagtatgcgggtcgtgaattcgtcgagcatggcacagagaaggcattaagggccctgtgtcagatctatgaagaagaagtggccgacacaccgctcagattctttccgccctttcagagagaccgtcctgtttggatggccaggatgcgtgcattggaaggacagcagctacttgaagacgaccccacagtcgtgtacctcactgcatacctgctcaccctggatgcacaatatgatttcttggctcggcaccaccgtcagatgattgctcgagcagaagatgcagagaagctcaaccgtaagctccatgtggatctcaccacagctcaagcccatgtggctgccttggaaagtcgtgaagtcattgttgttgaagctctgaagcaagccaaggatgagcacgtccagaagttgatggaggcctacttggtaacccataaccaacgtagagccctgcggatccaagagcccgcttcatccaaccctgttcaatccatcagagctgaagacccccagattcttgaagtcttccctcaggctatggaaaagcaagagcaccctgaagcctaccaagatcccccgtcggagttgtttgagcccctctccatgaagaagattccagccccatcccttgaagtcaaagaagaagctgcaagcaccccgccagcaccgccgccctctgaggaactacaagagccagtcccgcttgaagaagagtttgacctcgtcttgccatgtcagtttccgccagaagaagtcatcaacatcagctccctcttgacccatccaagagatgtctcagattga

SEQ ID NO: 31971 - DNA, 1092 bp, Zea mays
  Peptide Sequence Number=SeqID_75346
atgcaagaactagggcacgaaaagcaaaggcggctaaaagcgcgactcttaagggatattcttgagccagataccctttcaaaaagtgcccagtcatcacccggcggtcatctccgaaatcccagcatgccacgtggatatccgacaattgtttccaagagagccgacgtgccacctcatcactcggttattttcctcaaaataacttgtaaagctggctatcactcggcgttgcctctaaaacgccgaccacgtgttcaatcgctcggcattacttctaaaatgccgatgccgaccttcactcactcggcgttgcctctaaaacgccgaccacgtgttcaatcgctcggcattacttctaaaatgccgatgccgaccttcaatcactcggcgttacctctaaaatgccgaccacgtgttcaatcgttcggcattacttctaaaatgccgatgccgaccttcaatcactcggcgttgcctctaaaacgccgaccacgtgttcaatcgctcggcattacttctaaaatgccgatgccgaccttcactcactcggcgttgcctctaaaacgccgaccacgtgttcaatcgctcggcattacttctaaaatgccgacgccgaccttcactcactcggcgttgcctctaaaacgccgaccacgtgttcaatcgctcggcattacttctaaaatgccgatgctgaccttcaatcactcggcgttacctctaaaatgccgaccacgtgttcaatcgttcggcattacttctaaaatgccgatgccgaccttcaatcactcggcgttgcctctaaaacgccgaccacgtgttcaatcgctcggcattacttctaaaatgccgatgccgaccttcactcactcggcgttgcctctaaaacgccgaccacgtgttcaatcgctcggcattacttctaaaatgccgacgccgactttcaatcactcggcgtgtcctctaacgcgccgaccacgtgttcaatcgctcggcattacttctaaaaataccgacgccgaccttcaatcactcggcgttgtttctaaaacgccgaccctgtattctgtcgctcggcattacttctaa

SEQ ID NO: 31972 - DNA, 378 bp, Zea mays
  Peptide Sequence Number=SeqID_75347
atggcgataattaagcctacaaatgaagaggctcaggttggccctaggagcaaggttaataatatggtccctgatcaaagatcatggctcctgtatagcggagggaggcatggtggagatgggggtatacctgtccgatggagcgtgtcgtgccagcacgacacgggtcgggccaacttagtcgagtcgaggcgtgacacggttatgttttgggctaggacatgtcgacacgtgggcctaaacatgagcccagacacgacactattacacttaaccaggtcgtaccgtgtcgtcgagctgggtcgcgtgctacagtgtggtgttggcctaggcccgctgccgtgtaacagtttaacatccaccagccctgatggatga

SEQ ID NO: 31973 - DNA, 576 bp, Zea mays
  Peptide Sequence Number=SeqID_75348
atgggtccagtaggaatggtcggtaaggttgacgatgctggtatggtcccatcaccacttgcctcacagagtggctcgacagttcagactgcgataggagtttccggtggagtccttctccacttcaatataactccacaagttagtgccattgtcctcttgttagatagacagaggcagaagaaggtcactgactttgagacccaccaccgagattacattgatgaatgggatcaggagagcaccctaaactacgtcaacgatcagccgcacacaaactaccacttccgcaggtgcaagcttaagggccaatggacaactgcacactatgtcgatcaagagtcatcagacgacgaagacactttgttcgacatagctactcggctagggtcgcaaatcgaggccactccaatcctagacagagtgagggtgtcacgtcgccttcgttgtgctgcgactcgttgtggatatgtggacgatgatgacgccgatgatgatgacggtgacgacgacaatgaggatgagggggaggagaacatcgtggccgcacgtcacgacgtcattggaccatcctag

SEQ ID NO: 31974 - DNA, 240 bp, Zea mays
  Peptide Sequence Number=SeqID_75349
aggagattgaaggcggcaaatgagaagagagcacatgatgcaagggaatgggaggcggctagagccgagaaacagatgttggggaatcttgctggtcgtctgagtgtaaagatcgaatgtgtcgtgaactatctcgcagatgaggctcgtgcaagatacgttcaggaaaaaatggcgacatcaaagttgagtgagcttatcgcgctcgctgaggcaagattacggggaagaggaggatga

SEQ ID NO: 31975 - DNA, 630 bp, Zea mays
  Peptide Sequence Number=SeqID_75350
atggctggttgggtgaaaatatatataggtccccaactcaatcatagcccgttggagaaaagcacagcttttctgtggcacactggacagtctggtgccctgtctgcatgtcagtggtcagtgcaagatggtgaggacgaagaatgtcacaccgtcaggggaggagatgatcaggaccctcctcgccccttcagacaggacaagggcaaggaggtttaccttgagcaggtccgtcacctctcatctcgggcttgctccactcctgctctcttcgacccttcagccaccactccaccttcctccactacggcagctcctgtcgctcttgagccttccaccacacctgttgcgctccctgcctccaccacaccagcttccactgctcccgctccctctttcgctctgcctattcctctgcctcgcttctgggagcatgacgagactgaggtgtgcccccttgctgcggactcgtgcctgctcgatcttcagagagccacatctgccagggtgcgacgtttccgtcatgtgccagtggagccttggttgcctactcagcgagatctagcaattgctcctctcttcagcactaggacccaggagtccttttatagagcgcagttgacaacatag

SEQ ID NO: 31976 - DNA, 486 bp, Zea mays
  Peptide Sequence Number=SeqID_75351
atggaggggaagtcgcggcctagctttgtagtcgcaggagaaagttcgagggagagaaacgatcggcgcgagatgcggaggtgcgcgacggaagatgcggaggagcccaacgcacacatctcgaagaagcagctgacccctgggcccccacctggcggtgacccaagaggagcagcgcgcggcgtgttccaagctgctcttgatgactccaggctcttttttggtttttaccgcctagcttctgaggacacagctccagctttagaggatatgttggcacccgattttagagatgaggatgaggtgatctaccagtttgaggatcagggtgccactgctgatacttcttctgatgatgaggatctcgagataccgccaccacctcctgtgccacctcattcccatgatcacgaggctggtggctccagtgctgctccttcggttgctcctctagcgattgatcctgctctggccgctatcatttag

SEQ ID NO: 31977 - DNA, 540 bp, Zea mays
  Peptide Sequence Number=SeqID_75352
atggggggcactgccttctgtcttggggaagagtgtgccggccccttaagctgggagcgatttctggttcaagctgctgagacaagtggggctgcaagtgctcgccccacagccaagtttgccctccttcatgatatgcgatttctggttcaagctgctgagacaagtggggctgcaagtgctcgccccacaaccaagtttgccctccttcatgatatggtttttttattgggtgcattggcaaaacttggagctactgtagtcacctatccattgctagtcgtgaagtcaaggttgcaggcaaaacaagaaattggcagcaatgtgatgtccagatacacgggtacaatagatgcgataataaagatggttcgctacgaaggactacacgggttttacaaaggaatgggcacaaaaattgtacaaagtgtctttgctgcctcggttctctttatggttaaagaggaattggtcaagttagcagtgcttttagttgcgagtagtaggactatgcttattactacatccaagaaacaatag

SEQ ID NO: 31978 - DNA, 588 bp, Zea mays
  Peptide Sequence Number=SeqID_75353
atgaactgctttacatcaccggcccatccccccgttgttcactatgaaatgctgcagcttcaaggggacagttgctggcttcctgctgcactgctgcttgactcaggggcagacctagttccaggatacaagcgccggtgggggcggtcaatgtcaggagcgctggtggggaagagtcgggaagcaccggggcatagggcagttcttatttatgaaaacattttttttatttcatcatgcaccattttacttgtagcaagcaatatcatggttttcaagtcgccaggtcgtccagtcgatgatggtgaccgattagccaacagtaggtatttagctaatcaaacttacaagaccagggagtcgccggagttggtcaaggactggaggagccgatggttcttgatcagggaggagccaccagagttggttattgaggaggaggagcagccggaggttttcgcagggaggagtcgccaggagcccaggaacaagaggaacagtagccagccggccaggaaggataagagactgagagatgaaatcaggaaagcaaaaagggatttggaaagccaaccaataagtgcttag

SEQ ID NO: 31979 - DNA, 609 bp, Zea mays
  Peptide Sequence Number=SeqID_75354
atggaccgaaggtccatgacacctggtatcagctccaggttatcctcaccaccaccagccgcccatccctcaccaccaccagccgccgcgccatctgccgccgcaatgccctcccacccgccctctccaactctagatgcattcactcggctcgaagagaagtgggatcaattcattgtgatgttccaccgctacaaggagaagacagagaaggaactccaagcagcggtgcggcttcaggcggcagcgcgagggttcctggcacgccgccaggtacagtcccttcgtggggagaagcaccttgctgtggcctccagggccaccccatggccgtcatcacatgagcaggccgtggtgcgcctgcaagccgcagtgcgcggcttccttgttaggcgggcgcccccctgcacggccaaagagggtcgtctccttcattcgggcaactgtcttggtgctggacagacccaacataagaacgggctggttcctccttcacctttcatccaacgtgaactcgaggacgagctggtccttaagggagggggagatgtcatgggcatcatagggagcgagacgcaacagccaggctgggataaggctagagaataa

SEQ ID NO: 31980 - DNA, 136 bp, Zea mays
  Peptide Sequence Number=SeqID_75355
atgacggcggggtcggcgaagggggtcgcgctcgtcgacgggccgagtcgagggcgcgagcgggtcgacggcgccgtgccagcgatcacgttcggcaggcagctgtcacggccgccgtggccagctgttccaactg

SEQ ID NO: 31981 - DNA, 1293 bp, Zea mays
  Peptide Sequence Number=SeqID_75356
atgacattggttgctcttgctctcaaccccctacggaagcaaggaaacgtcagcaggatccatgccgcaccaccagctatgcttctacaggactcaaggcaccactccaacggccacgtgaacacccggcagcagacggagaggtcaacgaagaagaggaaggccaggagcggcgccagcgccaccccagcctccaccatgtaccagatgctccagctgattcaaaccgaaggatggagtgggttgtacagcggcctcaagccctctctcatcggcactgccgcgtcgcagggaatctattactacttctaccagatcctcaagaacaaggtggaagatatagcggttgctcgtagcaagaagggccttggggatggtactgtcgggatgctttcttggcttggtattgcagctgttgctgggtcaatcaatgttcttctaaccaatccaatatgggttcttgtgacacgtatgcagatccaggaggtttaccatgagtctggtgtaagaggattttggaaagggcttattccaacattaatcatgttcatgatctatgaaacattggcaaagcgtctgcagtcaaagcgttctggaaagcagctaccaaaaaggcacctcacagctatggagccgccgccgccccctggttccttctccctcccccttctctccctggccgccgccacctgccagcagcgccctgcgccccgagccccacgccagcagcagcgcctggggccgcgtgcccgcaccgcgaggccgcgcacgcctgctggcggctcgctgcggctggctgggctgcgcctgcgtgaccgcgcaccgggactgggccgcgcgcccaaggccacgtctggccgcgtcgctgcagggacgctgctcgcgcgccagtgcagcctgcactgccatcgggggggacgcgcgcccacgccgggcggcctcgctcgcgccgagtcgctggggccgcgccctgcgctgctgtggtcgggctaccgcggctgcgcccgcaccgacgccgcgcgatgcgcgcgagctccaggagccgcacccagcgccctgcaccggcgccccgcgcccgtcctgctcgcgcccgtcgaccccgcgccgtccaggagcaccagcccggaagacccgcgcccctgctgttccgcgccaagcagtgcccctgctgtcccgtgccgaggacgcccgacaccgagcactcagccgcccctgctgttccgcgcccggcttgtccagtccgcgcctccctgcaccggtcgccatgaactttacctcgcccggctgctcctc

SEQ ID NO: 31982 - DNA, 789 bp, Zea mays
  Peptide Sequence Number=SeqID_75357
atgccccaacatattctcactgaaaactctgatagtgaaggtaaggtgtatttggaacatgaacattcctttaatctgcttggctcctttaaccatattgatgaaaaggcattgaattcaaacaagtttaccggcacaataccccctacgctcggtttactctcaaacctcttctggctggatctggctgacaatcagctcactggatctatcccggtctccacagcaacaacgctggggctcgaccaacttacccacacgaagcacttccacttcaacaagaaccagctgtctggaacactcacaggcctcttcaactccaacatgagcctgatccacatactgttcgacagcaatcaactgactggcccggataccagaggagctagggggcatttcatcgctccaagttctataggaacagccttaagggaacggttcctcctaaacatcagcaacttggtcaatctgaaacgagctgaacttggccagcaactagctcactggaccattgccagatctaagcagcatgaccaaattgaatgtcgtgttggtgagaagggtggcctcacaaaaaagttgtttgattttgcatataagcggaatcttgcatcactgaacggcgttgaatggttaagaacgtgggtaccctacgttcttaacgttaagaatgtgggtacctacgttcttaacgttaagaacgtgggtaccgtcgaacttaatgggcagccctcgccgacccacgcaggacccataagttcgacggccacctggacctgtcgaacttaa

SEQ ID NO: 31983 - DNA, 384 bp, Zea mays
  Peptide Sequence Number=SeqID_75358
atgggcgccgccacggcagccgtgcggaagggggatgggccggagacgggcaaggacgggagtgagatgtggcggaggtccacctcgccgaaggtgaagtacagcagcggtccggcggtgcgggtccggaggtccggcggcgcggcttgcgagtctgtgtttggcggcggcggcgtggaggggatgagagcgtgttgggcttcagctggacggcgtgatggcgttgtcgtcggatgcggtgtccagaacaacctgagagtcgtcgacgttggcgacaaccatgaggtccccctacttaacgatggacagcggcacatgcgaccacgtaggactgcttctagaggtcgaactggtagtcgccaagcttcttttcgtcatcgatga

SEQ ID NO: 31984 - DNA, 894 bp, Zea mays
  Peptide Sequence Number=SeqID_75359
atgaagcagctcgctggcactccaaacccccgctcatggaaggggatgaaactgaccacataccccggcgacagagtcgggttgcggaaaccaaagcaggaggcaagcgcaaatggcagggtaaagaaccaccaccggcccctcttccgggtatataaaggcccaggcgagatccacccaaggcttcgcccgaacccgccgcagaattcaaactcgaagggcaagcgacaccttcggcaggcgaagcgggtgccgtttcacctccgtcatgatgaccgcatcaaaaaagggaccgggaaaggggatattgcgaaaaggatccttatcggcgaaggaaacgggccccgagccctcctactgatcaggggtttgaaggttgggccctctggtgttcggcaaccgccccagagcactcgggctctgagccctttactaatcaggggttcgaaggctggcccctcggaagggttcgacagccgcctcagagcacgtagagtcagggatgaccctgggtacgtccgttacatggctgaggctcgggctacgctcccgaggtaccctaggacatttccgagaccagcgggaacgatttgtaatggaatcccaccggagggaggcatcgagccctcggaccctatcgaatgggtccgggttcggcaaatcacctgcagcctcgggcacgacagggagctccgcctcgcccgaccccaggccttggcctcgggggaaggtccctgtctcgtccatcctcgggcctcggccacagcctcagcctcgggaggagtcacatcctcgcccgacctcaacctcggcctcaggagaagtctccgcctcgcccgacctcgacctcgggccgactacgcaacaggggatacatcattaccctacccatag

SEQ ID NO: 31985 - DNA, 621 bp, Zea mays
  Peptide Sequence Number=SeqID_75360
atgaagttcaaacccagggacgaaacgcccgttcctcgaacggctcgcacgcgcaacgggcgccacgcgaatcgcccgtcccgtcaccttaactccccggcgaagcaggcgacaccttttggcaggcgaggcgggcgtcgcttcgccttcgccataatgaccgcgtcaaaaaagaggctcgggggctgctctcgcacccggctatggccaaaactgttgacagcgtcaacaaaccagcctgataacttggaacccgaccacgcacccgggctactgtcgggccgcaagagggaacgaccagaccggccgaagcactacgaaaagcatttagacctcagaggagtcaaaccactcctccgaggcctcgggggctacacccggcgggaaaacagtgccgcccgctctgctccgactgatgtgtcagccaccccggcaacaactgacaacaggtcacgatcaaccaccaagctcaagcctcgggcgccacaggaagctccgcctcgcccgacctcacgctctggcctcgggaggagatctccgcctcgcccgacccccggactcggcctcgaccctggtctcgagaggaatcgcgtcctcgcccgaccccggcctcggccataa

SEQ ID NO: 31986 - DNA, 324 bp, Zea mays
  Peptide Sequence Number=SeqID_75361
atggcccttgggcccactcgtcataggcacagggaggtcttcttcaacctccagccatctcctccacgcaagggagcagagaaggggccgggctgggaggtgagggaggggagacggccatggatggaggagggcgccatgaggaaggaggagctccctgctcagccgaacagagaagggaagggagtgagcgactttgggcgcccattttcgtcgttttcctcttggaatcggatcaaggttattgtaggaaatatcttccttgatgtgaaaggagaggtcatcaacctagatggcttctgggtggagcagaggagaacttaa

SEQ ID NO: 31987 - DNA, 735 bp, Zea mays
  Peptide Sequence Number=SeqID_75362
atggcgatgcacctggctttgttccttaaagtcgggtgtgacatatcaactaaaattgagcaactagagtctagtgctacatccactgctaccgatgatagtcttgttaaaaggaatgaaaaactcaaggctaagttagctagctcccaagaagctattgaaaattttctaggaaaaatggaaatccttagcatacacaataatgagctaactactaagctagaaaacattagtagcaccccaggggcatctttagttgaaattcctgaaattattaagaaagatgcttctacttcctgctctaatttaattgatgattctaacccctgcgaccaagttgcaaaggaaaatgagcaattaaagcaagaagtggctcgccttggaaaagcattgtatgacaagaaaggcaaagccaaacaaatccaacctccacaggataacaccactacagaagtgaagaagcctgtggagggcaaaactgtgatctgtaggctatgtcacaaagaaggccacaagtctttccaatgcaaggtgaggaccggggataagcaaaagctcaagcaaaagccaacaagcaaaatctccaacacctacatcaaaaaggtggataaaaaggctgctatatcatatttgatcaagaagaaaaagaatggaaaggtgatagcaatcaaggccaacaagcaagccaacaaaggaaagggggccaaacgtgtgacggaacctcccaagtcataa

SEQ ID NO: 31988 - DNA, 498 bp, Zea mays
  Peptide Sequence Number=SeqID_75363
atggcgcggtctgagcagcggcggtgctccaccggtgctatcggtcccgaaccccggaaccctaaccgccgagctggctccgccgacgatgtacgcggtattcgacggcggcagattcgggttccgccccgcggcgatacctatgttacccacgactggtgcacattcttcgtgtatcttagctgggacgacagcgcgaggacggttgaggcacaacgaggatctaggctcgcatatattctcgatgtagctcgcgatttccggcgggtgaaacggcggccgtttggaagacttcggtgtgatctgcggctgaccaagaacgagaggaaagttgttgatttcaccgcaagggaggtctgggcggagcttcaggtcccggaaatagcgtcgatttgggaagagtcgttgcggcaaacaagggaagtcccgcagcggcggtctgctacgccccggaggtccacacggcgaggaagacgcattctgttgaagggagactga

SEQ ID NO: 31989 - DNA, 504 bp, Zea mays
  Peptide Sequence Number=SeqID_75364
atgaagcttcggtactataatgcatctgaagacgaagcatttgagaacaagtccccaacaatcatgattgggaaaaccgggacctttgagatgtcgcgaaaaatatgtcggggagaggagccaacttcctcaaggccatatgcttttgcatgtgatgaaaggaacggtaaaaagaaggctcccactccaagttcctcaagtgaagaagaggaagaagaagaaagtgatgatgatgaagataatcaaccatcaacatcatcctccgaggacgaagaaacaatccgacgcatcgaaaaggtagaggatcttctctttaacattgacaggaaaaagcaaagaaagagaggatgctttgcatgcggggacaagggccacttcagggacaactgtccaaccatggtcgtacccataaaggagaggagcaaaggcaaggcgctaacaagtgtcaaaacttgggatgattcttcaagcaaagatgaacctccaaggacgcgcagccactga

SEQ ID NO: 31990 - DNA, 399 bp, Zea mays
  Peptide Sequence Number=SeqID_75365
atgcgcctaggggtcccttttatagccccaaggcagctaggagccgttgagaacattcctggaaggcagatcttgcctagagatggcaatgggtacccgaaacccgaaacccgatgggtttttaccccattaggattttggatcatgatatcatcaatcattacgatacttattgattatgagaagataattatattggagatgaaacccgcgggtaacccatgggtacccgttaacccgatggttttctcaaaatatgcgcaacagtttcaaaaatcggttcaaccggaattaaaacggttcaaccggttttcccctctgtcacagtctgacctgccagtcagccagtcagaaaaagtcatgtgcagatttttggaaaaccggttcaaccgaatttga

SEQ ID NO: 31991 - DNA, 237 bp, Zea mays
  Peptide Sequence Number=SeqID_75366
atgacaaacccccagcccacggatccaacggctcagcttcaattggccgatgggggtctatcttctaatctcggccgcccaaggaactatcaatggtccaggccctttcttcctccgcagcccagaggggatgacgatccacgacgacaggcggaatatcgacggcagcggaatcctggcgagaaattcaccaagctctgccaccgcatccgtagttctggcggtagcagaagctag

SEQ ID NO: 31992 - DNA, 816 bp, Zea mays
  Peptide Sequence Number=SeqID_75367
atgggggatatccgtcgtcttttcgcctcgtcgttggaggaacggaactccgtgggagttggtacctttcagccatcgttcagcttcaaggattttcatcagccagcccggctgtacgccccccccccccgccgccgccggcggtcacccaagacggtgaccaccagcccctgggtggggagaagcaagccgggctgcgatcttggtcccaccctcagcttcaaggatgttcatcatcctcgctggggtggaggccgggctgaaccggagctctacctcccgcgcgggttcgtgggtcaccctctcctgcggcgttcgagggagagggcactcgctggccctgcgggcgggtcggacttcgacaacgcggggccagtcgacggcaggcatcgtcagccccagcgtgtcgggctcgtcgggttggcccccggtgccccctcctgccggaaggcggctgccgcgccgtgtgcacgggaggaccgcccaagatgtcgcgcgctgctagggcggcgttcgtgttctggggcggtcctgcctttgcaccggtacggtgcctccacggggaggtcggtgccctgctcgtccgggaggatccgagtggggatctgccggcgggctgacggcccctgtcgtcggtgccgaggcggaggcggctcgagaagtccccgtcgccgacgggatcaccgccaccatccgcgcttcgggcctccagatctttgtacttgtcctcgcccctcgagcgtcggcgtgggcgagggcaagcttgcagcaacgttcgccctgaggccatcaccgctgcagtttggccacccgtag

SEQ ID NO: 31993 - DNA, 288 bp, Zea mays
  Peptide Sequence Number=SeqID_75368
atggcggcctggctgaggatggagctcgacgtagtcgtgaagaataggttgcatggccggatcaaaggccacgaaagtgccccagataatatgtccatcgtgaagagtgacatgcacagcaatcatggtgacaccaagcgaagccagaaaagaggtggtgttggtggccagggcaaaggcagggcccctggtggtaggaggaggaagcacaagggtgctcattgcggtgacgggggcgacgggatgggcaggatggccgacacagaggtggagaccgacggcggctag

SEQ ID NO: 31994 - DNA, 546 bp, Zea mays
  Peptide Sequence Number=SeqID_75369
atgcaggcggcatgcaaccgcgccaagtgggcgcgcttctccgactcccaacacgcccagcatggaggcccgggcccacgcgtcatgcaaccggcgcgccgaatgcttcgtgcatgcaacagcaccgccactcgcgcccctaccgtgcctcctcgactacggagccaataccgcgactcgaggcgacccaccgcacgacccagcagtgccagcctggcgcggcggagaagcgggcgacgcttcgccttcgccataatgaccgcgtcagaaaagagaccgggaaagggggataccccgaaaaggatccttccccgtaaaggaaccaggctccgagcctccctactgatcagaggttcgaaggctggcccctcggaagggttcgacagccgcctcagatcgcgtgggccctacacccactactggtcagaggttcgaaggccggcccctcggaagggttcaacagccgcctcaggctactcgggctccgcgcccattactgatcaggggttcgaaggctggccctcgaagggttcacagccgccttag

SEQ ID NO: 31995 - DNA, 381 bp, Zea mays
  Peptide Sequence Number=SeqID_75370
atgaagctttgggactgggacaaaggatgggagtgcgcacgcacattccgaagtggaggcattaatgtagatcatatcgctttcgatccaaaggagaccaaccgctttgttgctaccgattgcttggatggcaaagtgatgatttggagcctcgactctcccgaacctgaatatcatctgcctaagacggattttaagggtatcatgttcctggaattcttcacacgttatggtcggcagtgtttgattattgctcatgaagatcataaagcacacggtaaagatggtttcacaaatgtggcatacatgtgccaaagaggcccacttgtgaacttctacctcctcctcaaggaagcatcaaccttccttgcctatctatag

SEQ ID NO: 31996 - DNA, 1263 bp, Zea mays
  Peptide Sequence Number=SeqID_75371
atggccacaggatggtggggcggctgggccgcggcgccaggctgcctaatccttgagggaactcaactgcagtctgctggcaagttattacttcaagtccacccgaccttcctcgtgtttgagttgcaacccgccgggaagttgaccccatgcctactgcacctcacaaacgacacggatgaagacatggagtttaagcttaggatagaagagggtgtggaccagcgatggtcggagcaatttggtgaagagcgtttttcaggatgcggtgttgtggctgcgcgatccacttacactctcattctgacggtgtcgtgggagcgggacgatattcctgaaaacagattttgtgaaatgattctcgacagctggcctaagcaaaactggtactctgaagctaataagaattcgaaggaggcaaccagcggccagttgggcgtcacgatctcatggatggagaaaccccgcacactttgttctgtcaaattcattgcgcggaagcaatggttcatttgcgccacagaaaccgaaggtttcgcacatgtatacagttatgaaaccgaagaaatgcaaaaggttaacagtttcagagctcaagaaatgcaaaaggttaacagtttcagagctgacgacgaccatatccgccccatatcgctggccgttcatccatcccagccctatgtgatgtcgtggtactacggcaacgagacaatgaagctatggaactgggacaaaggatgggagtgcacacgcacattccaaattagcggcaaaacctttaaaaaaatcgcttttgacccaaaggagaccaaccgctttgctgctaccgctgttggcactagcttctttgatactgatgtcgacgtcatgatttggagccttgactgtcccgaacctgaatattatctgctttggacggatattagggttatcatgttcctagaattcttcacatgttacgatcgacagtatttgattattgttgatgaagataacaaagcacacgtgtgggacttgcagcagcgggaatttgcttttaagaagcgaaaatccttgtctcttgaaccttctgtcttctcacatcccaatctaccgttactactagcagcaccaattgaacgcacatgttgtttctggagcgctaaggatttcagtttttatggagtccttgacaattctggtggagaaaatgtggtgggtatcgcttgcttgatggggtcaaaaagaagaaaatttcgtgactccgcatctttgtcaacctag

SEQ ID NO: 31997 - DNA, 972 bp, Zea mays
  Peptide Sequence Number=SeqID_75372
atgtcggagtgccgtctcaatactggtgtcactatcacatcggtgccgaggttatttaatgtgtggcatcgcgtgtccagtcgcgtgacgtttcgttttaaattcagtttagatgacgtgatgacgaggatgatggttatgattatgcttatggtaatgatggctcgtcttagacacactgcacgaaaatcagtcattcctttcttgccttctcgtctcgcggagcgtccgcttcgccgtccggtgactgaggtgccccctacaccaccactgggtgtcccggccgctagaatagctgttggaggagacccctacgacggaggcgacgacggcagctcgagccacaacaccgaccttttagaagagtgtcacttccatctcgacaccttgctacgccaggcacttgacccgcatacctggtctatcgagtatcgctgtgttgtcttccaacatagtcgcggggtttacccggaccgctgggaggcaacttgcttagtgcaccgtccggagaatagtctctggggtgcagaggtctgctcagagcattactctatttctgagcgggactcagctgaggcggccatgcaagatgtcgcacggcgtgcgcttttgcactattgctcagtgctcggtggggtggccgatggtcttaacctgaggaattacccccgccatccatctggcagcacaggaggcgtggttgtctcacctgtgagtgaggacaatcctaggttgaacagtacagtcaacctagccgccatgctaaacacggagctggaccatgccttagatgagctgagtagggctcgtgctgagatcgcccagttgcgggctgagcgtgcggagcatcgtcacctagtggatggttctcccgcccccgtcgggactcagcacccgtaccgctcacctcagcatggacaccatgcttatggtaaccctgactgcaggaccaggataaatttagaaccatag

SEQ ID NO: 31998 - DNA, 228 bp, Zea mays
  Peptide Sequence Number=SeqID_75373
atggccctgctctccttaatggaaacatgctctgcttccgccttgaactggtgctgcttgactgttttgttggtgctgaaatgtcgggaaggtatgattcatcagctgatactggagagggtcaaccaagcctctcaggaagcgatactgtcgcttggcgtcggtgttgacatcttcaggagcatagcgagacagatgcaaaaatctgtctcgatactcactaactga

SEQ ID NO: 31999 - DNA, 546 bp, Zea mays
  Peptide Sequence Number=SeqID_75374
atggaaaaagaaaaagggaaagggaatagagtgggccgcgcgagggattccttcagccccggcggcggccctgctcatgccccccccctcgcgaccctgctcgcacccccacgcgcccctgcccggcccccggtggcgccatgcgcggcctcctgcgtgcccctgcccggccccccggcggcgccccctgctcggccccgacgcggccccgcggccccgcagccccggcgtggcccctgcatggcccccgcacgcccctgcctggccccccggcggcgccccatgctcggccccggcgcggcctctcgctcgcacccccgcgcacccccgctcggccccggctgcggcccccttcccggcggcgcccacgctgcccccggcgcggccccccgctcgcgcccccgtgcacctccgctcggccctggcggcggccccctccccggcggtgatgacgaggatgatggttatgattatgcttacagtaatggagaagatgaagtcgtggaggaagacttccaggagttccaagagtacgatgagttctag

SEQ ID NO: 32000 - DNA, 747 bp, Zea mays
  Peptide Sequence Number=SeqID_75375
atggacgctcttggctttgaatattcacattacaacaatcttgctcaggaggccgaggctagagtgaaaagaaagtggaagcgcggcgttgatttttcctcctacacggggcttacttccctggatttatctcctgccaccgctcatgggtctctctacgtcggattttatctcaaccaccacactgtttccagatatttggtcaccgccgccctctctctgccctggatttttctacgcgcaactccagcccgcgatatttcgtccgctaaggctgtctccaacaaggagcggtatatggtcctgtcctctaaatatagaggactgtcaggcactctaaatgtggagggctccgggagtgcgctatccgcgctcttcgtccaccagccgccgccagaaaagttccccgcattcgtaccccgcgctggcgactgcttcttccgggcccgagccctcgatccggcgcgcttcgccgccggcatcgaggcaggagggggagaagcggccgtgcggaggcgggtctgtcggcgtagagctcgcaccccttgcaaccgaggccgcgcgaccccccgtaaccgcagatccaagccaggttccccctgttcgtcgccggagagtcgccatcggcaaaaggcttcgtcgtccgccgacttcgtcgaaggcagctggcaaaaggaagagaacctcctcgccgccgtcgtcttcgtcttcgattcggtccaccgaggcagatccgcgaacagctag

SEQ ID NO: 32001 - DNA, 369 bp, Zea mays
  Peptide Sequence Number=SeqID_75376
atggtttggcatcatggcccaaacttcgattggcagcatgaaccatttgatgccgcaatcatgcgagctagtggtggcgagaacgcacatgaacagtacacgcttttcgacataatgattgactcaacagagcccaaggagcaggagttggaggtggctaggctgcgcggggagctgagacagcgtgacgagcatcataaagtgcaacaagactacatgttctctttcatacagcagcaacacgagattattcaagaattatcccagcaacatggcttggatgtagtcctcccagagtttcgaccgccactgccaccgatgctgccacaattgagtccttttctatctacaatatctcaagtacactaa

SEQ ID NO: 32002 - DNA, 187 bp, Zea mays
  Peptide Sequence Number=SeqID_75377
aggtggtaccctttatccacaagtcatgttacccgtctgccaagggatcgctgccaagggatcgcgacttcccatacacctctaccgaggaggcgaggcaggggttcttgcctgaccgccatcgcagcaaaatcaaccaaggacctccctacactgaccactcccctactgcccttgcccctttcgg

SEQ ID NO: 32003 - DNA, 276 bp, Zea mays
  Peptide Sequence Number=SeqID_75378
atggagtgggtatttctcaggaggaaaaatgcttggaggattatctgtggaatatttgggcagtatttctggaaagaatcaaaggggatcagtgggaaatatctgggcagtatttctggaaagaacttgagggggatcactcgggaaatatttgtagactcttcgaggagatggaacttcaacaaaagccgacctttgaggagcatctggttgctgattgcaaacgctgattctggctactcaaagatcatcttcaggcttctggctttcgcttga

SEQ ID NO: 32004 - DNA, 213 bp, Zea mays
  Peptide Sequence Number=SeqID_75379
atgggagttgagggagctggtgggggggttataggcgagcgggggtgctggggggtgtggagtggtagtgatggagcaggtgacacgaggcagcaggtgcgacaaggggaaggggaggacggtgttgccggcgatgatggcggcggtggggctctagccaaagtgaagaaaaacttcactacccaatgcatgcagaggactgggcataactaa

SEQ ID NO: 32005 - DNA, 435 bp, Zea mays
  Peptide Sequence Number=SeqID_75380
atgggcaagaacaacaaacgcaagcgcgagccgactcctccatcagaggactttggcgactcggaatactcagaggaggagttctcctctgagtctgaggggtctccggctcccgtctctcccccagtgtcgtccgataactcggacgactctcaggagattgccgcggaggtctggacttacatccgggccatcgagcgctccgggctcgagggctcggatgagtcagagtactcctcggacgaggaggactcgcccgaggaggacggcgaaggtgatgacgacgacgacgacgacgacggaggcgacgtcagcgacgacggcaacggcggcagcaggagcggcaacgacggcaacaggggcgacgacggcggcagcagcaggggcagcaacggcggcggcagcagcaaaggcagcaacagggccagtggctag

SEQ ID NO: 32006 - DNA, 477 bp, Zea mays
  Peptide Sequence Number=SeqID_75381
atggggaatgttcgtttactcgtcaggggagaattttgcccgtttacatccttgtgggggaagaaacttccccatcctcatcctctaatggaagaattctccacggtaaatcaagaatcggggtccattgccatctctagttgcgggtcattggggtatggggtcatggtggtactagtcgtgggggtaatcctaataatccctacacaaatcactaatgccaagtctgtggcaagcttagtcacactactcttaggtgttggaagcggttcgacaaaaacttcaatggccctcagaaagataacttcagccgttgtggcctcatacgacatagacacaatatggtatgctaacattgtagccacataccatattactgaagatcctaaagagttgactgtgaggaaagattacaatggtcatgatcagttcaccctgagtattttctttgcaaggatcatcaaacacgatgaatga

SEQ ID NO: 32007 - DNA, 354 bp, Zea mays
  Peptide Sequence Number=SeqID_75382
atgaaggccctggacctccctttttatagatgcaaggagagggtccaggtgtacaatgaggggtgtagcttatgcgctaacgtgtctggcagagaagtgcctgagccctgtgtacatgccaacgtggctgtcggagaggtgctagaggcctacgtacacgataacgtggccgtcggagaagtgcctgagccctgtagaagcacagctggcggtgctgctgggatcctgctgacgtctccttgcttccgtagggggctgagaatcaccgtcgtcatggacgcacgcggggagccatcattacctgttaccgggacgagccagatgggacgccggtcttgttccctcgtagcctga

SEQ ID NO: 32008 - DNA, 681 bp, Zea mays
  Peptide Sequence Number=SeqID_75383
atggtggaggaaggccacgggtcgtgtggcggaacgacggttgcggaaaccaaagcagaaggcgagcgcaaatggcagggtaaagaaccaccgccggcgctcttctggggcaagcgacacctttggcaggcgaagcgggcgtcgtttcacctctgccatgatgaccgcgtcagaaaagggaccgggaaaagggatatttcgaaaaggatccttctcagcgaaggaaacaggcccccaagccctcctactgatcaggggttcgaaggctggccccttggaagggtttcgacagccgccccagagcacttgggctccgagcccattactgatcaggggggttcgaaggctggcccctcggaagggttcgacaaccgccctagagcacgcagagtgagggatgactctaggtacgtctgttacatagccgaggctcgggctacgctcccgaggtaccctaggacatttccgagactagcaggagcaatttttgtaacggaatcccaccagagggagatatcgagccctcggaccctatcaaacgggtccgggtctggcaaatcacctgcaggaaaacagcgctgctctccccgctccgactgctgtgccagctacccgggcaaggctaacaacagcaagttcagccttgggcgcaacaggaagctccgcctcgcccgaccttag

SEQ ID NO: 32009 - DNA, 273 bp, Zea mays
  Peptide Sequence Number=SeqID_75384
atgagcaagaacacaagagacacaagatttatcccgaggttcggtcacaccacaaaaagatcagaggtcagaggggtcagagaccagctgaactgcccctcaggaccagttcaactggtcttgaccagtgagtttaggagagaaaaccccagctcaactgcccggaggcaagttcagctgctgaagaagctcaactcagctgaagtcaagttcagctggaaagctcagctgcagttgaagaagttcagctgcttttcagcaagaacactctag

SEQ ID NO: 32010 - DNA, 1353 bp, Zea mays
  Peptide Sequence Number=SeqID_75385
atggcgaagctagcgcgatcgccaacgacctccccgccggcggcggccgcggataagcaccgctccgcggccgggtcggggctccggtccctcgccagtgccgcctccggatggtgggaccggtggacggtcattggttccggactctccaagctcgaaagggccttcggcgaccagttccccgagggcgagcgctacttcgggctcgagaacttcggcaacacctgctactgcaacagcgtcctccaggtgaggaaccgtttgggtggcctctttttagcttttgatgaggtaggtgtaccattctgtttgtccaaagtttggtgcagtgtggcatgtaggggaccagcattgtattattgtgctccattccgggaacagttgctggaatactatagaagaaacagaaatctcgaagatgctgaagaaaatttgttgacctgcctagcagatcttttttcacagataagtgcatcaaagaaaaagactggtgttattgctccaaaacgtttcattcaaatggttaggaaactaaatgaatattttcgtggctacatgcatcaggatgcccatgagtttttgaatttcttactgaatgaaattgttgatattctggaaaaagagtctagttctgcaaaggattctcctgggaccacatcttctgaaaatgtctcaaatggcgcagctgttgatggagttagaaaagaaccactggttacatgggtacataagaattttcagggtattttgaccaatgaaaccagatgcctaatgtgtgagacaatcaccgcaaaggatgagacattttttgacttgagcgtcgacattgaacagaatagttcactcacaagctgtctgaagaatttcttttctactgagactttaaatgcggatgacaagttcttctgtgataaatgctgcagtttgcaagaagcagagaagagaatgaagataaaaaaggcgccacaaatattagtgatccacctaaagcgcttcaagttcatcgagcagcttaaccggcacaagaagctgtcgtaccgagtggtgtaccccttggagcttaagctcagcagcaactccgctgatgccgactgtgagtactccctctttgccgtggtggtccacctggggagcggccccaaccaggggcactacgtagccatgatcaagagccatgaccattggttgtccttcgatgatgacaatgtcgagatgatcccggagtctaccctacagaccttctatggctcttatcatgaatattcgggcaacactgatcatggctacatcttgttctacgggcgcattggtgggagtggaaatgagaagaccgactcttccgatggagtgtga

SEQ ID NO: 32011 - DNA, 819 bp, Zea mays
  Peptide Sequence Number=SeqID_75386
atgcatgccaacaaggcacagctaccctatagtgatcgtgagagagcaccgaaattactacatgctctagatcggagggtttgggaggtgaaggtctcggtgatcatcgagtcgcccaactatgagactctcaccgtggacgagctcttcagcaagctcaagtccatagagattgaccaccagactcgggccaagattgagaacccaaggagcaggtcgagagccttggggatgaggagcttgcacttgtggtcacccgctgcccccaagaagggcaaatcagagtttggcccgcgcgaccatcactctggtcgccataagggcaagtactcctccagcaagtacaagtccaagtccaagggaggattcaacaaggaggcgctcaagaagaacgacctcgaccatgactccgatgatgttgtatcttcctcgagcgacgaggagactgagaggtgggtcgaggacaagctgaatgggttgttcttcatcgccgacaccgcaggaggcttctgcaccatggcacttggtgaggacacggtcggcaccagcgacgacaaagacatcggcgacgacactacttctaaggtactaccttccaccgatgatctcgccgttgagatagaagagctgaacgctgctttggctagtcaggataagttgcttaggcaggctgctcgtgagaggagagagattagatccaagtacaagagcacgcttagggaacttgagtctgctagagcttcagttgaggtgtccgacgagactgaatgtgatgagtgcgctctacacatgtcgaacatcaccactttgcagacctag

SEQ ID NO: 32012 - DNA, 450 bp, Zea mays
  Peptide Sequence Number=SeqID_75387
atgcctaagaaatggtgtggagcacaggaatggtggtcgatggttgaggtgaaggtcatgcgggctcgtgctgatggactgggagcggtgaagggcgagtgctgggtcttgactgacaaatcagagcagccaggtgaccaaccacggtggctgacacctgggacacgcacttgtgcgaggacgtggtggagtggaccgtgttgccgacatggtcgaggacttgcgggacactcgtctcatcgtggaggacgtgcacgaggtgcggtgctcacgacaatttggtggtttgggcctcaaaaccacccagcgctacagatgcctggttttgctgagtttggtcctcaaaactcggcggtggcggttctagagggaaccggtggcggcatgcggcgtgattacggagggtgcgtaaaggcgaagcatctccgtgtgaaggacgtggccatctga

SEQ ID NO: 32013 - DNA, 1443 bp, Zea mays
  Peptide Sequence Number=SeqID_75388
atgaacagacaccggcactcaaggtgccattacaaacggaactccggttccgtccccgcgggcggcgctgacggcctcgacagtggggaagcttcccccagctgccaccacgtcagcaccgacggcggcgtccgcctctccaccaacgccgcaccggcgaacgcgggccgctccaaagcgcaccagcaggacgcctcctccgcagagctggaggatggtttccaccaccagaagctggaagaggaggtggccagccgacccacgcgggaggagctggtggtcaccgtcttgggtgaccaccggcgaggggatgcggccgggctgcctgatgttttccttgaagccgaacgatggctgaaagaccagcgggtgaaagggcagacagccatgcaggcggcatgcgaccgcgccaagtgggcgcaccccttcgactccaacgcgaccaacatggaggcccaggcccacacaacatgcaaccagcgcgccggttgctacgtgcgagcaactgcaccaccactcgcgccactaccgcgcctcctcgactgcggaaccagtaccgcgactcgaggcaaccctgcgtatgacccaacagtgccagccaggcgcatcggtcactggtcagtcagctgcgggagaaggtgcgacggtcaatacgaccaaaaatgggtcggcagtaatggcggtggcaagcgggcggaagcagcggtcacgttgacaggcggcacctttggcaggagaagcgggcgacgcttcgccttcgccataatgaccgcgtcaaaaaagggaccgagaaagggggataccccgaaagggatccttctccgcgaaggaaacgggccccgagcccccctactgatcagaggttcgaaggctggccactctgaggggttcaacagctgcctcaaagcgctcgggctccgcgcccactactggtcagaggttcgaaggccggcccctcagaagggttcaacggccgcctcaggccactcgggctccgcgcccactactgatcagggcgggaacgatcttgtaacggaatcccatcagagggaggcattgagccctcggaccccgtcaaaaggggaccgggtccggcagatcacccgcaggggctcgggggctgctctcgcaaatccgactccggccaaaccgttgacagcgtcaacataccagcccgagaacctggtaacccccgtcagcacaaagctgcaaaggcctgatggggtgcgattaagccaaggttcggtccactcaagggacacgatctcgcctcgcccgagcccagcctcgggcaagggcagccgaccccggaggattcacgtctcgcccgagggccccctcaagcaacggacacaccttcggctcgcccgaggcccagtcttcgccaagaagcaaccttggcctgatcgccacgccgaccgaccgtatcgcaggagcatttaa

SEQ ID NO: 32014 - DNA, 807 bp, Zea mays
  Peptide Sequence Number=SeqID_75389
atgacttcacccacccccatcagtggaggagacactcatttcagttccgactacctttcccatgagggtttcccttccatcttgtgggagatgctcagctccgccggttaccctacaccccctctgtacacgatgcagttggcagacgacaccaccgaggctgcagctatgaagaccctgacgagtttctacggataccatcccttggaaatgacactgcaaagcgacgccatggcacacctcactaaccttgctcagaccactaagctcaccctcgacagtcgagaggacttcgtggtcgacttgtctttagaattggtggagaaatacctacagctccacgatgtgcaagaggagcttgaggaagccaatgaccacctggagatgcaccaacaggatatggaggcaaacgaggccgaaagccagccgcagcgtcctttgaccgcgacaacctatcaagagttcctgagcacgcagccgcccctattcaccaaggcagaggatccgctagacgccgatgtgtggctaagaggtctcaacaccaagctgtgtgagcgcctcaacattgtttgggctaacaacttcaatgaattggtcaacctggccatatcacaggaagactgtattatagctcaccgggcagaaaagaagaggaaggcaccaatatcaggaccctcagctccacccagagattccggattgtctccaacagtcagagcagaggatttcagtagcaggcaggaagatgggttatcaggccacctcagcagccgcaagcgcccaaccgttttccagctcccaccctaa

SEQ ID NO: 32015 - DNA, 264 bp, Zea mays
  Peptide Sequence Number=SeqID_75390
atgaacaagaacacaagagacacaagatttatcctaaagttcggtcacaccacaaaagagggggtcatagaccagataaactgccctgaaaaaccagttcaactggtcttgacaagagagttcaggagagtaaaccccagctcaactgcccggagacaagttcagctgctgaaaaagctcaactcagctgaagaagctcaactcagctggagtttagttcatctgaaaagctcaactgcagctgaagaagctcaactcagctga

SEQ ID NO: 32016 - DNA, 237 bp, Zea mays
  Peptide Sequence Number=SeqID_75391
atgtccggtggtgcaccggacattgtccagtggcacaccggacagtccgagtggactttagaagaatttgaagaattgattcacaaggcattcaaagatgttgtttcagttgaccttgcaatggcttcaaatcttgattcttcaaacaagaagaatatcaatcgaggctttggatttgtgagattttcttctcatgcaatgtttgatatatttgttttgttgtggaatgtggtgtaa

SEQ ID NO: 32017 - DNA, 1113 bp, Zea mays
  Peptide Sequence Number=SeqID_75392
atgcgcagagccaaaaattttggctccggctctcagccgttttttggctcctgctcctgcgcaagagctggtttgacacgtggtgtttggaagggcttaagcgaggagccggtgctggagctgtctaggagccctcccaaaccgccagttaattcatgcaagcgcgaacaacagagaatgtgtctttccacatatcggggtgacgacgacgtagcccatgggatgcggcggctccatggtgaccagagtgctccggacagcgccgcccgcgccgctccgactgctgcgccactcgacagagtgaggctgacagcagccaagtccggcctcgagcgccataggaagctccacctcgcccgacccagggctcggactcgggctcagccccggaagacgacggactccgcctcgcccgacccagggctcggactcgggctcagccccggaagacgacggactccgcctcgtccgacccagggctcggactcggggctcagccccggaagacgacgaactccgcctcgcccgaccccagggctcggactcgggctcagccccggaagacgacggactccgcctcgcccgacccagggctcggactcgggctcagccccgaaagacgacgaactctgcctcgcccgaccccagggctcggacgcgggctcagccccggaagacgacgaactccgcctcgcccgaccccagggctcggactcgggctcagccccggaagacgacgaactccgcctcgcccgaccccagggctcggactcgggctcagccccggaagacgacaaactctgcctcgcccgaccccagggcttgaactcgggctcagccccggaagacgacgaactccgccttgcccgaccccagggctcgaactcgggctcagccctggaagacgacgaacttcgcctcgcccgaccccagggctcggactcagccctggcctcagccgacggtctccgcctcgcccgacacaggggctcggactcgacctcggcctcggaagacagactcgacctcgacctcggaggagcctccgcctcgcccaacccagggctcggaccgaccacgtcacaggaggggccatcattcccctacccctag

SEQ ID NO: 32018 - DNA, 411 bp, Zea mays
  Peptide Sequence Number=SeqID_75393
atgtcaccaggccgttgggttccgaccgttggagcttctgacaactgggccactggacagtccggtggtgcactggacagtccggtggtgcactggacagggttgtccgagttccgttggacaaggacaactgtaggtgagcctaatgacttgggaggttccgtcacaccggtgcccaatccaacggcctggattgaaatacccaaaggaattccaccatccaatctggtacatccccatagaatcggacggcacagggctaccccctcccacgacgcggacacggtggcgtcgcccccgtatgcggtggagaccatgccagaattcaccgagcgccaccctggtgtcgtaatcgtggttgggaaccaagcaaaacttaggccccgtttgggagggctccagctcctctag

SEQ ID NO: 32019 - DNA, 309 bp, Zea mays
  Peptide Sequence Number=SeqID_75394
atgagcaccagagaacccccctacactatccgcatggtcaggaacaaagacccacacgccggtcaccgaaggcggctccaatcccctcctctcactttgtttagctatggcgagacggtttgtgccctgggtgactcaggttctggactagatggccaagggagcatggggcgggaaatatatacactgatgtggtgcccaggatcatggattgggtcccaacaaactctcgacgatcgtggtgctaggaggtttgaggacgacttgacgcggcggcccgaccaggcggtgatacgcggtcgcgcatga

SEQ ID NO: 32020 - DNA, 330 bp, Zea mays
  Peptide Sequence Number=SeqID_75395
atggcgtcgccgcggggcgggttcgatgagcaagatcgccggacagagaagggcaccgaggtgttcgtcggcgggctgccgtggtcggccacagaaagcatgctcagacagggatatggttttgtgcggtttgcaaagagggattatgctaatactgccaaaaggcaaaagaatggtattgagcttcaaggaaagaggcttgtgtttgagctttcaatggatcaagatacagttttctttggaaatctttgcaaagaaaaatcagcaatacctgttcattgtcttagacaacccaatgtagcagtgccagaactcttgtctgcgtcttga

SEQ ID NO: 32021 - DNA, 690 bp, Zea mays
  Peptide Sequence Number=SeqID_75396
atggcgagagtggcacgtaccctcctggcaacggatcgcctaaaaggggtggtgtactctcgggtggcgcggacctgttcatgcagtggaggatccgtgggaatagtagacatcaagcatatccttgagagtcttttctttagtcggtggtttatccggtgtccgtggggcaatcggacggatcctgttaagttatctggtgcacatgcatggccgtctgagttctttgagacaaggacaggtgcatgtgggcccgataccttgggaggttctgccacacggagcggagttcgtcgtcttctggggctgagcccgagtccgagccctggggtcggggcggagcggagttcgttgtcttctggggctgaccccgagtccgagccctggggtcgggcggagcggagttcgtcgtcttccggggctgagcccgagtccgagccctggggtcgggcggagcggagttcgtcgtcttccggggctgatcccgagtccgagccctggggtcaggcggagcggagtttcctatggcctctgaggccggacttggctgctgtcagcctcactctatcgagtggcacagcagtcggagcggcgcaggcggcgctatcctcttgtcaggccggtcagtggagcggcgaagtgactacggtcacttcggctctgtcgactgaagggcgcgcgtcaggataa

SEQ ID NO: 32022 - DNA, 1068 bp, Zea mays
  Peptide Sequence Number=SeqID_75397
atggggaacgcccgcaatccttccgccttgccgttggagggacacaacttcgtggaagttgatacctttcagccatcgttcggcttcaaggattttcatcaggcagcccggccgcatcccctcgccggtggtcacccaagacgcttcaaggatgttcatcatcctggctgggccgggggctgggctgagccggagctctacctcctgcgcgggttcgtgggtcagcctctccctcagcattcaagggagagggcgctcagcggcccagcgggagggtcagacttcgacaacgtggggctggtcggcggcgggcgtcgtcagcttcagcgcgttgggctcgctggctcggctcccggtgccccctctcgccgcaagggcggttgtcgcgccgcgcgcaccggaggaccgcccaagacgtcgcgcgctgctagggcggcgttcgtgttctggggctgtcctgcctttgccccggtacggcacctctgcgcggagatcgatgctccgctcgtctgggaggatccgagtgggaatctgccggtgggcagacggctcctgtcgtcggtgccgaggtggcggcggctggagaagtcctcgtcgctgacgggatcactgccaccatccgcgctctgggcctctggctctttgtacttgtcctcgcccctcgagcgtagatgtggccgagggcattgttgcagtggcgtccgccctgaggccatcgctgttgcagttcggccacctggagcggaggtcgttgtcgctgctgctggagcgggcgacggtgggcgacctggagccttgtcgccccgtgggccctccaatgtgggggggttggaccctcggtcgctcttcgatgagccgaagccggaggtagcggtgtcagcatggacagaggcagagttggctcgaaaagaagatttggtcggccggagcctggccgggtcgtccgctggcaggaccgacgccggagttgggtcaccgatgcgacgagccgggctgatgtcctcaggggacacctggctgaggcttcggggcggccggccgagccgtttgctcgagccggattcctaa

SEQ ID NO: 32023 - DNA, 1275 bp, Zea mays
  Peptide Sequence Number=SeqID_75398
atggctgaaaggtatcaacttccacgaagttgtgtccctccaacggcaaggcggaaggattgcgggcgttccccatccgggggctcggaaggtggaaagacgcgatgcataagggagcgcgaagacatggtcgcctttcaaagggatcaccctccttttaaaggcgactctccccacttgcgtcctcagccatcgcgggctgagtcttctccaacacgctccaaggtcctcccccctacggcacgggggctgggtcccacgcgtcatgcaagctggcctagggcagaagaagccaaaccaccgtgcgcggtgcatgcaactgcccagcggttacaagcattcctccactttcgcccagaccagcgggtgaaagggcggacagccatgcagtcggcatgcaaccgcgccaagtgggcgcaccccttcgactccaacacgcccagcatggaggcccaggcccacacgtcatgcaaccggcacgccggttgctacgagcgagcaactgcaccgcccctcgcgccactaccgcgcctcctcgactgcggaaccagtaccacgactcgaggcaaccctgcgtatgacccaacagtgccagccaggcgcatcggccaggggccagtcagccgcaggagaaggcgcgacggtcgatgcggccaaaaatgggccggtagtaatggcggtggcaggcgggcggaagcagcggtcacgtcatcagccaagctcacgtcccctcatgggaccgcgagagaaccctctcccacggcgcgcccgtgttccgttcctcgaacggcttgcgcacgcgcaacggctgccccgcgaaccactcgccccgtcgcattaactccgcggcaggacaggcggcacctttggcaggagaagcgggcgacgcttcgccttcgccataacgaccgcgtcaaaaaaggtgcgccacatcgtttcgatttagtatactttcccttttcctctttctctctcttacaacagggaccgggaaagggggataccccgaaaaggatccttctccgcgaaggaaacgggccccgagcccccctactgatcagaggttcgaaggctggcccctcggaggggttcaacagccacctcagagcactcaggctccgtgcccactactggtcagaggttcgaaggtcggcccctcggaagggttcaacagccgcctcaggccactcgggctccgcgcccactactgatcaggggttcgtaggctggccctcgaagggttcacagccgcctcagacgcagagcgagggatga

SEQ ID NO: 32024 - DNA, 390 bp, Zea mays
  Peptide Sequence Number=SeqID_75399
atggcgcccctgctttctctgtccggccaggaaaatgcccttccctgttttcctcttcccagcacgccaaagcaccctgctgttccctgcgccctactctcccatggaaaccagcaggagctccatttcctccatggtcggcgccccacgcagcgcctctgcgcgactccccctccacaaacagtgagcccccttgctcgctgttctccgtggtgcccgctggctgttcgacaaaatgcgcagcaagccgcgcgatgcagcagcccatccgcgacgccgtcaaaacccttgctagtggtcgatgtcgcgctttgcccgttcgacaaaataccgagccatgtggacagccatgcgtctagtcacgactcgttcaggttgattgatttatag

SEQ ID NO: 32025 - DNA, 681 bp, Zea mays
  Peptide Sequence Number=SeqID_75400
atgaagtcacgagcaagggaggacgggagctcgacacgaaagctcgacgcgagcagggactacggcgaggaaccatggcgcgcagggaaaacactaaagcagcagttgcggcgagatagacaggggcgcggctgggctgagcagaaagctaggagcggcgtcgcggctggcgagtcccggcagggtcaacggcgcgacagcgcccacaaccggaacaaacaccagacaaggcacgagcggccgagctgggcaccagggtgcgcatcccaacagggaggccacggccagaaatttgagctcggcaaaatccaagcgctgcaggggatgaggacacgggagtgtacacggcgagcaccggcgtgtgagacatggtcccgcgcgagcaactactgggagaaacggctgggcgcgcagaggagatccggcgagcagagcatggcgcgcaacacagggagaatcggagcagcagggcgagcagagccgggctacgagctgagcgagcgcatggccatggagacgaggccgacgagcaccatggctgggagggagcgcgcggctcaagggaggaaaggcaaaggcgagccaggaatggagctcacgccggcgaggaagagagagatgggctggacatttaaagagccaggggcggctgggcggtccggcggtgagcggcggccgtag

SEQ ID NO: 32026 - DNA, 300 bp, Zea mays
  Peptide Sequence Number=SeqID_75401
atggtgcagagggagagaaggggaggcaggggcgcttggcaggaggaggaagagggcctgcacaccggcctggggaagaagggcgccgagggaaagggtggcgccatgggagaagccatagctcagctagggaaggagctgggcggccatggagcttcggccgagcggccactcggcggctctgctcacctgttagcaggggtggcgtgcttgagaagcctggtggcaaggaaatggaagaagggagcgactgctaggggcttctacgcgctgcggaagaacggcagcgctccacggctg

SEQ ID NO: 32027 - DNA, 474 bp, Zea mays
  Peptide Sequence Number=SeqID_75402
atgcggaggggatctggggctgctgctgcaggcttgctgtggcattatgtcgagcacgccgagggcacgacgcaagggagatccacgtggctgcgcgaactagcatcgcggctgttgacagggcgagcgttggggaaacaaacaccatgggaggtcatctgctgttgtgggctggtgccggagatggaggaactagccaacctagggagcgggtctggagggacctcactggatttggagcagggagctcgggcatggggaagcaggggaaccctgcgcgtgaacgagagggtcgagcggggccctgagcttgtgctcacgcgcggtcctggcattggaggtgggaaagctcgttggcgtcctgtggaagacgttggccggcgagtggagcgggtcgacgacgcactactgagggagggcaccgatgccatggacgccgggttggagcgccgggcgaggaggagatcctcctag

SEQ ID NO: 32028 - DNA, 348 bp, Zea mays
  Peptide Sequence Number=SeqID_75403
ctcgaggaaaatattatgaaggttggatctaatgcaggtttctcatggaaagctatgccccttgtcgattcaaaggtcatggaattaccactagacgcacagagcagcggaagacgtctcgatgtagacgaacgcgtcgagcagtgccgtgcagtcgtcggtgtccttcacgtcctcgcacggttcgtcctagtgctccagatgcagcacctccgagggatgaaggccaagtcacaccatcaaccaaatcaaggaggtacctgcaaaaattatgccacaaacaaggctgagtatactaatactcagctagacttcttcggtgtgaggagtctactcctctacctctag

SEQ ID NO: 32029 - DNA, 465 bp, Zea mays
  Peptide Sequence Number=SeqID_75404
atggcgaataagaaatcgacgaccgtgcgacagaggccgggaagctgccgacggtcggcccaacagcgagcaggggtaccaggacacacgtgtaggaataaccttgacaggacgcgtccgagcgagaccacggcactaggaaatagcaggcgactaagcaaaaatccaagctgggcaccgaggaagaaatccgggcgcggcaaccgggaaactgcgcgggccaacagggagcagcgcgcgcgaagggagagacagggcgcgcagaggctcgcgcgcaaagatcctgaacccgagcagaagtccgagcgccatgggagctcgagaccaccggcgcgcagaacaggaagcaggatgcaacgcgaggaaatgaccagggagaaggagatttcggctgggagtagaaaaagacagcggtatcgaaaaaatcttgagcaggggcggcagcgcgataaggctgggcgctga

SEQ ID NO: 32030 - DNA, 594 bp, Zea mays
  Peptide Sequence Number=SeqID_75405
atgtcaagggtgttggagcctctcattgtggggaaagtgattggtgaggtcctggaccatttcaaccccacggtgaagatggtggtcacctacaactccaacaagcaggtgttcaacgggcacgagttcttcccttcggcagtggccgccaagccgcgtgttgaggtccaagggggcgacctcaggtccttcttcacgttggtgatgaccgaccccgatgttcctggacctagtgatccatacttgagggagcaccttcactggcatttatatgtatatatagctaatcaggggcgtgtttttttgtttgctggaccacacactggcactggcaggattgtcactgatattcctgggactaccgatgcttcttttgggaaagaggtggtgagctacgagatcccaaagccaaacattggcatccacaggttcatctttgtgctgttccggcagaagagccggcaagcggtgaacccgccgtcgtcgaaggaccgcttcagcacccgccagttcgctgaggagaacgacctcggcctccccgtcgccgccgtctacttcaacgcgcagcgcgagaccgccgcccgccgacgctaa

SEQ ID NO: 32031 - DNA, 213 bp, Zea mays
  Peptide Sequence Number=SeqID_75406
atggggcgagcgcgggcgagcgccagggccgcgcgctgggtgggacggggcgggcgcgccgcgccaaagggcgccgatgccgggccgcgccacggccagggcaagccacgcggggagagcgcgcgccatggccatggcaagggggccgagaccgggttgttgggaccatgcttcgtcgccgaaggtcctgcaggaagaaacagcttcggctga

SEQ ID NO: 32032 - DNA, 159 bp, Zea mays
  Peptide Sequence Number=SeqID_75407
atggggaagcctgtaccatcactcctcatgctcctcctcagtcgagtgaccgcacttgtacccaccataaccagaatgggagaccacgtctcaggtcgcgtgaggggcaaagtctactgccaggttcaatcaggacttagaaatcattatgctaagtga

SEQ ID NO: 32033 - DNA, 150 bp, Zea mays
  Peptide Sequence Number=SeqID_75408
atggccgaagctctggcggcaatggcgggtggaattaagctcgccggagctaaggaaaggtggctggccggtgaggagatatggagccaggaaatctggtctgtctccctgcccaaacccgaggcaaattcaaggttttgtcgtgtctag

SEQ ID NO: 32034 - DNA, 777 bp, Zea mays
  Peptide Sequence Number=SeqID_75409
atgacttcccacgtacccactgacgggggaaacccgcattctcacacagacggtctggcacgagagggctttccccgcattttgtgggaggtgctgcagggagcaggttatgctacacctccccaatacacggtgcaactgttcgaggagcacccagtgcctcgctgtagggtgaggaagaccttggagcctcatcccctacagccaggctggcgttctttggactcagagtctttcggtttcagggccgatgacactatagagtccacaactttgcatgtgctgacgaccttctgtggatttcaccccttggagatgtcgacccaccccattggcttgttccccactgagaaggaggatgacccgatttggaaggatcgggttgagcatgccaaggatgtgtgggctctctaccctggccataccgcccacctgacggttcggtgcatgagtgccatgtatcgtctccaggccttacgaggtgagacgatgtcccagcttatgggcctagtggagtctaccaagatcaccctggataacagggaggatcttgtagtagatttgtccactgagctggtggaaaaggatctccaggagctgatggctcaacaaaatgagattctgcggcatctcgctcagcgtcagccaccgcctcagcactatgggggtggtgatcaccaccagcgtgccccggcagcggccacctaccagaagtttctcagtactcagctgtcgttgttcaccagggcagaagatccatttgatgctgatgtctag

SEQ ID NO: 32035 - DNA, 558 bp, Zea mays
  Peptide Sequence Number=SeqID_75410
atgcagtacaatggatcaagcagtctcattagctgcgagaagcagacgattcaaatcgagtttttatccttgcaagtggccgcacttgtacccaccataaccggaatgggagaccacgtctcaggtcgcgtgaggagggcaatctgcgggcagatcctcgatggcaggttctggtgctggatcctgggctacctcctgagcaactccttgctccggcacgaggatgcggcggaggtcgtcggcggctcctgctccggccaaaccacgacgagggttacccggtccacgtgctccgccgggttcacgaactccggcgagcgcgattacactattccggtggggctggtcctcggctcaagctcgagcaagcttcacggcctcccgggaaagctatccgagggcttggatcgagcggaggtgggcgggaaagaggttggccacggtggttgccctcgggcgtctctggcggaacgcggggaggtcgccggagctgcgggcgagctcgagagagttaggcatggtacagaggaggcaacggtgaagatggctgtgcactag

SEQ ID NO: 32036 - DNA, 207 bp, Zea mays
  Peptide Sequence Number=SeqID_75411
atggcggaaaaggacctacaggtggaacagatgtccaatgagatccaggagcttgaggaactagtggggaccagggagaatattgttgaggttctcgaggatcagctcatcaacactcaacaacaacttgcggaagctaaccaacatttggatatgcaccaccaggatgatagagctggagtgcccgatctttcggactctgactaa

SEQ ID NO: 32037 - DNA, 1332 bp, Zea mays
  Peptide Sequence Number=SeqID_75412
atgaggaaaaaacacggctccgtgccgaaattacatacatgttcaggccccgacagccacaatgaacagaaaacactggcattcgaaatgccattaccaacggaactccggttcccccctccgcagacacgaacaaccccactccgagggggaaggcctgcggagcaacggaaggccgacgaatggtgcgccgtcacctgctccagcagcggcgacgacgacgccttctgctccgagggaccaagcagcggcaacgccgacctcaggctcgatgccgctgccaggaggcccccgcccatgccaaaactcgtgaggcaaggacgggcagaaggccgtagagttggaggtcagcccgtggccggtcctggctatctcgccggcagcagaacctcttcaagctgccgtggcggatgccggcaccgcgagcggctccgaagccactcgcgcctgaaagccaggcacgctgcagatgccagcgccacggacgacggccgcctttccctccgatcactgagtgaaggagcgggccgccgcccacgcgggggccgacctcaactcggcgcactcccctccccagccctggtgatgaaaatccttgaggctgagggaggggaagaggccgcagcccggctcgctttcccccaccatcaagccggaggtcgccatctcagggaccgggaaagggggatgccccgaaagggatccttctccgcaaaggaaccgggctccgagccccccactactgatcaggggttcgaaggctggccctccgaagggttcaacagccgcctcagatcgcgtgggcccgacacccactactggtcaggggttcgaaggccagccccccgaagggttccatggccgcctcaggctactcgggctccgcgcccattactgatcaggggttcgaaggctggcccccgaagggttcacagtcgcctcagacaccgagcgagggatgaccaggggtacgttcgatacataaccgaggctcgggctgcgctcccgagctcaccggagacaccatgttcggtgcccatcgagggtaacatggcgcactcccccctcctccttgcggaaaggcgacgtaggggcgcgcagccgccagactttacaaagacgggaagtgctgttgagagcctgagatctgggacgttgttactttgccggactgatgtccagaatattggctcccccaagcagagccgaagtcaccgcgcgtcactccacccgcttgttaaggaacctgacatgcggccgacttgtctttggaaaaatgcgactgcgtacgcgtcgcgacagatggaatctgaaccagatggtcagggctag

SEQ ID NO: 32038 - DNA, 552 bp, Zea mays
  Peptide Sequence Number=SeqID_75413
atggcgctccacaagctctatgacgacggtggccccccagctctcttacggaagcagaacgacgtcagcagggactcgaccgctccaacagctgtccctccgccaggctccgccgcacctccgacagccacgacatcacgccagcagggtgccccagatctctccggctgccacattggcatggccttctcagaggaggttggccgcgcgggaccgaggacgggacaggcgctctcttggggccgctcgcttccctcacccgcgtggacgcttgtaacccccctactgcaagcgcacccgacctgggcgcgggacgaacacgaaggccgcgggacttccacctctctcacgctcgactccggccacctcgcctctccccccttcgcgctcgcccacgcgctcgacccatctgggctggggcacgcagcacactcactcgtcggcttagggacccccctgtctcgaaacgccgacaagcatagactctacttatgggcttcatgggtcgggactgctcttaccggtagagataaaattaggtttgatctgtaa

SEQ ID NO: 32039 - DNA, 1092 bp, Zea mays
  Peptide Sequence Number=SeqID_75414
atggctctcgcaggagacgagagacttccgccattccacctctcgctgaacgtcccctcccgtcccgccgtccaggagtcgtccttccgccacgccaaccctccaagctcgaccaaggctatcgcaagaaacaagagacttccgccgttccatctctcgctgaacgtcccctcccgtcccgccgcccaggagccgtcctcccgccacgccaaccctcctgtggccgcgccggagccggcctcgactccgctcgcacggtcgacccagttccgcctcgccgacttcgacaggctcgccgtcctgggccgcgggaacggcggcaccgtgtacaaggtgcgccaccgcgagacgtgcgcgctctacgcgctcaaggtcctgcacgaggacgccggcgccgaggctgacatcctgggccgcctcgcctcgccgttcgtcgtccggtgccacgccgtcttgccggccagctgctccgccggcgacgtggcccttctcctcgagctggtggacggcgggtccctcgacgcggtcagccgccggcgcggggcgttcgcggaggccgcgctcgcggaggtggcggcgcaggcgctctccgggctggcctacctccacgcccgccgcgtcgtgcacctcgacgtcaagccgtcgaacctgctcgcccaccgcggccggcgagatcaaagggtgctctcccgatctggcgaccactgcacgtcgtacgtgggcaccgccgcgtacatgagcccggagcgcttcgacccggaggcgcacggcgggcactacgacccctgcgccgccgacgtctggagcctcggggtcactgtcctggagctcctcatgggccgctaccccctgcttcccgccgggcagcaacccaactgggcggcgctcatgtgcgccatctgcttcggcgagccgcctgcgctgcccgacggcgcggcgtcaccggagcttcggagcttcatctctgcgtgcctgcacaaagactactgcaggagggcgtccgtggcagagcttctcgctcacccgttcatcgtcgggagggacgtgctggcgtcgagggacgcgctacaacagctggtcgccgaggcgtag

SEQ ID NO: 32040 - DNA, 429 bp, Zea mays
  Peptide Sequence Number=SeqID_75415
atgtcagactttgagaaggatgtcgatgacgtattggcgccggtgaagaagagcctagatcggcgctccgtggtgacgctgagggagtggtgtaagggccctaagtccatcacgaatggatgtgaggcagaagtggaagggtcccaacccgagggtcgcgctcagcaggctgcggccagtggggaaaccgcccgcgacggaagtgacgacaattgcagcgtggagggccgcgtgcgcagcaagggcaacatggggggctccgagaaggggcccacgaccggcgatgaagggggtcccatccccgagaggctcgctgttgtgggagatgaggctgcccgcgacggggaggggacccgcgaccgtggtggctgcggtgcgcacgccgcgtccgcgctcgcaccagtagtgttggcgacgaggtgtgcgtga

SEQ ID NO: 32041 - DNA, 627 bp, Zea mays
  Peptide Sequence Number=SeqID_75416
atggcgcgaggggaaggtgacggggacacggggggaggggaggaatggggaatgatccaaataatattgtccattggttttgatggtgtattacgtcttgttgcaatttgtttggtggatttagtggcggttatggcaccaggcgaagagactggcgaaagggacaggacaacaccgtccacctactcccctacggggaattcgaaatatgattctcccagcctatcaatgaggttccttcaacgatatccgacgagcatgatgcacatgcttttcacctcttggctgaagtcgaccctcctttctcggccattcggcggtaggggaaagtcgcactctgacttcctctacctgctaatggatttcacgaaagaagccaacaacgacaacgccttcgtcaacctgacctccccggaggtggcttgttggctatgggggcccatggggcccaccacacataccgatatgctttcaagggcggcgccaaggcctgcacgaccctctacgtcgacctactaccaggatccatggcgccaagacctaacgcgtcggcaatggcccgagctccatggcgttcagattagctctcatcggccaccgtcaagctccacccttgactcgcactga

SEQ ID NO: 32042 - DNA, 498 bp, Zea mays
  Peptide Sequence Number=SeqID_75417
atgaagatgaatatatctactggcgccctcgtggcctccccttcctctttgctctcctatggccagttcaacggcggggatcaggagcaccaccaccgtcgacggaggcagaagaggcggcgcttcggggtgggggaaggagcggcggcgctggggcagggcaagacaccgacgccaggatggatgaaggtggtagcggaaggagccgcggcgtttactgggatagggtttttattgcctcaccggctcacccccaaagctgttgatgctgctcgtgctgcggctgttgcagttgcagaggctagatgtgcggcgttggtggctgagaaggaggcacgagcggcggtgcaatctgccagtattgccgcggataaggttcaacttgtcgtcgaagctgtgaagtatcgaagctttgttgaagataactccatggtggaatccttggtgactgattttgtttctcttttcctttgccgcatgtggaatgatagggtttag

SEQ ID NO: 32043 - DNA, 186 bp, Zea mays
  Peptide Sequence Number=SeqID_75418
atggagaaggcgaagaggtacaagggcgtggaggaggcagagatgtacaaggccgtggcggtgcctaggccaagggcccgcggcggttccgctgaggccgtatcatcaaaggcgactttcggccatcacagatatatttctatgaccattatggtatatctgcatatgagacaacatcactattaa

SEQ ID NO: 32044 - DNA, 399 bp, Zea mays
  Peptide Sequence Number=SeqID_75419
atggagatgggcgccgagctggaggagcaaggggcgcgccagggagaggcgaccgcggccaccattgggaacaagccggagctgcgcgcgctggaaaatcaccaaacagaggacggcaacctcgagaccctggatctctgcacttccttttctcgtctccaagcttccaccggcgagtggtccgtcgccgaacccgcccaacctcgagaccttggatcccagcttcgcagaggtgtccgagtacaatccgccaggatcctaccggcgtcgttgacgagagctttgctacaggaagagggcgtgagaggaagctttcgtctccgcgcgggagggagagagacagtgtatagcggacgtctgagatccgccacatttacagtctctggtcacgcgctctaa

SEQ ID NO: 32045 - DNA, 1806 bp, Zea mays
  Peptide Sequence Number=SeqID_75420
atgtcgctccgatccggcggccgccagctatctttcgagcttctcgcgggcgacctcaccgccgacgacccggacgacatctccccgcgctccctgcccgatacatcgtccgatgggcagcgccggcgcaggaggcggtctaagcgcaagcgtgggttccggagccccccgatccaggaggcggtttcggagggggagcagcagccgcgcgtggagggcggcggcaactcggccgcggcgttcagggtcctggatctgaagtcgactgcggagacggtgtgcgagagctcggacgcggaaaggtctgcggcgagctgcgtgacctatgttggcgtggagctgaggcagaggagcgtctccgggggcgggagggtggtggcagcgtccgcggatgatgggaccagcagctgcggaagcagcacgcgggagagcgccgcagctgctgcggctgtggcggatgtggcagccatggcgtggcggcctgaggcaaaatggcggcatgaagaagaagctggaagaaggagtcgtcgctggactgggagaaaatttgagcgccttgacaaatcaccattcagatactttcttggggaactatatggtggcaattcactgagaagcacaattgcagtgggcaatgagaagaagcggcagcgggtgtacaacactatgtttcatgtcccatggagatgtgaacggctaattgtcgcaggattcttcgtctgcttggattcctttctgtcattgcttacaattatgcctgcacgaattgtcgttaccatctggcgggtgatgaagaccaggaagttccggcggccaaatgctgctgatttatcagattatggatgttttgtagttctagcccttggagttgcctctttgcaaatgatagatattagcttaatttaccatgtcattcgtggtcagggcacaatcaagctttatgtcgtatacaacgtactagagatctttgacaaactctgtcaatcattcggtgaggatgtgctgcaagttctgttcaactcagctgaggggttgtcagcatgctcgacagataatgtgacatttgaactgatgcggttcattttggatgaggctatagccgttgttgcatttgatatccttttctgcagattgcatcagttaattttcttgctagtcactgtagctcaggcgatcaccctgtcaacatgcattattgcccacaataatgcattattggctctactggtatcaaacaattttgctgagattaaaagtaatgtatttaagcgtgttagcaaagagaatcttcataatttggtatactatgacaaatacatcattgagcgatttcacatcatggcctttctgctatttgttcttgctcaaaatatcttggaagcagagggcccatggtttgacagctttcttattaatgcgtcattggtttttttgtgtgaagtacttatcgatgctatcaaacattctttccttgcaaaatttaatgagataaagccagttgcatattcagaatttttggaagatctttgcaagcagattttgaatgacaaacctgatgaccgtcagaaggacctaacattcatcccacttgccccagcttgtgttgtaattcgtgtattgaccccagtatatgctaccctccttcctgctggcccttttatctggagaatattctggattttactttggtcagttctgacctattttatgctcgccatattcaagataatcgtgggattgatactgcgctgccttgcaaattggtatgtaaatctacggctcacaagaaaacaacacgtggattga

SEQ ID NO: 32046 - DNA, 273 bp, Zea mays
  Peptide Sequence Number=SeqID_75421
atgggggagattaaaagctctcttgtgggttttggtggtttgaatgaaaaccaaattaaaggactgacagtgaagaagaacattgcttatgtaaaacttggtgtgcatatcttgaagacaactggtcaagccaaatatgaaggcaagaagagcttcgaagtatcgagtgcatgggagaaggacaaggacgccgaggaacccaaagccacgggcgaaaaagaagatttgcaaagtcaaggattgattgagttgagaaaagatatggtgcactga

SEQ ID NO: 32047 - DNA, 174 bp, Zea mays
  Peptide Sequence Number=SeqID_75422
atggagagtcatgatctccgggcagaatgggaatcacggcttgtgggtggttatgagattgatggttctggttatgattatggtgctggttgtcagcattgcaaccactgctcaggcgaagatgaagctgtggaaggagacttccaggagttccaagattacgacgagttctag

SEQ ID NO: 32048 - DNA, 924 bp, Zea mays
  Peptide Sequence Number=SeqID_75423
atggctcgacttagacacactgcacgaaagtcagtcatccccttcttaccctcccgccttgctgagcgtccgcttcgccgtcccgtggccggacagtccagccacttggagagactacaccaccgcctgcgtgaggagcaggagcgtcgacgacaggagcagcggagctcttccctctcgctccaccaggagatagagtctgtgaggagctgctcccctgtgctttctctgaagccgccccctgcaccaccactgggcgccccagcttctggagtagctgctggaggagacccagacgacggaggaggcgacgacagctcgagccacgacaccgacttctctgctaatcctgagccggaaggatgggttgctcgacccatcactcgcgacgctgctcgcgggcatagtcgcggggtctacccggaccgctgggaggcgacttgcttggtgcgctgcccggaggacagtctccagggtgcagaggcctgttcagagcactattctatctctgagcgggactcagctgaggcagccatgcaagatgctgcacggcgtgcgctttcgcactactgctcggttttcggtggggcagctgacggtcttgacctgaagtattacccccgccgttcatctggcagcacaggaggcgtgattgtctcacctgtcggtgagggcaatcctaggttgagcagcacagtcaacctagccgccgtgctaaacacggagctggaccatgcattagacgagctgagtagggctcgtgctgagatcgccctgctgcgggctgagcgcgcggaacgtcgttttctggatggtggttcccccgctcccgttgggactcagcacccgtaccgctcacctcagcgtggacaccagtcttatggcaatcccgcctgcaagaccaagatcaacctagaaccatag

SEQ ID NO: 32049 - DNA, 321 bp, Zea mays
  Peptide Sequence Number=SeqID_75424
atggcggcgggaggagaaacaattcacgtggatcaactaggtacgtcgactggcatggacatcatagctgtacctaatgggggacaccaacagaagagaatggaatcatccgacatggatgttgtgaccggaggcgcgaacattgtagctgttactctagcggcggcgttgagggcaccaagaaatgttgatgacaacacaagatcgacagagatggtaggagcagatcaacacattcccatgagacatattgatccgtatgatcaggacacacctcacattctgcaaatccatgtgcacaaccagacaatattgatataa

SEQ ID NO: 32050 - DNA, 312 bp, Zea mays
  Peptide Sequence Number=SeqID_75425
atggcattcaggttcgccgagatcgagtatgtcaccaagatcttgcagcatccaccgaggctcaagtacaggaagcttgtcaatagcagctttgctgatatgcaaaagccacagacggagctagatggaaaggcttgcgctgccgttggacagagtggcctcatggctctctatgatatgttatttactcaagggacattgtatgatgctgctacgacagcttacgggcaggtctgcgcgttgtttcttagctgggcgatcaggaaggctgttggtgctggcatgtacactcttccaaccagggagcagtag

SEQ ID NO: 32051 - DNA, 1482 bp, Zea mays
  Peptide Sequence Number=SeqID_75426
atggcggcgcggcgcaagatccagggcgggagaaggccgatcggtccagcagctccgtccatgggtgccgatccgcaagcgagcgctgcgtcgtctcggccagccgactcacgaagaggcggaaggtcggcgtggcgagcaccgtgttggagaggcctcgtggcggaggacggcgcggagccgccaccggcagccgtgctggtcacgaggagcaaaggcgcaggtgtcgcagcggaggccatgggtgaggtagaatttaggtcaattctttttgttcctgctacaaggaaggaagatgtaactgctgatagtaggaagaccaagaatatcagactatatgttaagcgtgtattcatatcagatgactttgatggagaattgttcccaagatatttgagctttgtgaagggtgttgttgactcaaatgaccttccattgaatgtttctcgtgagattcttcaagaaagtcgaattgttcgtataatgagaaaaaggctggtgcggaaagcctttgatatgatacttggcatttcttgcagtgaaaatagagatgattatgaaaggttctgggagaactttggaaaatttttaaagctgggtgccatggaagataaggaaaatcacaagagaattgctcctttgttgcgcttcttctcttctcaaagcaacaatgaattaattagcttggatgaatatgtggaaaacatgaaacctgagcagaaggacatttacttcattgctgcagatagtatgagcagtgccataaatgctcctttcttagagagactaacagaaaaagactatgaggttctacttttggtcgaccctatggatgaattggctatccagaatctgagctcctacaaggataagaaatttgtggacattagcaaggaagatttggatttaggtgataacaatgaggaaagagagaaggagataaagcaggagttcagccaagcctgtgactggataaagaatcgcttgggtgacaaggttgcacgtgttgacatatctaatcgtctcaggtcatcgccatgtgttcttgttgcagcgaagtttggttggtcagccaatatggaaaggctgatgagagcacagtctatgggtgatacagcctctttggatttcatgcgttcgaggaaagtttttgaaataaacccagagcatgagataatcaaggccttgaatgtggcatgcaggaataaccctgatgatcctgaagccctaaaggctctggatgttctctttgaaactgctatgatttcaagtggcttttcgcctgacaacccggcggagctcagtgggaagatttacgagatgatgacctctgccatcgctggcaaatggtcctcacagccacaggcgcaggcgcaacctgccgacccaatcccacagcacgacgcacctgtgaggtcagacgagccgcttgaagctcaagtggtggaggcagagcccgttgaggctggtcagcagaagtga

SEQ ID NO: 32052 - DNA, 894 bp, Zea mays
  Peptide Sequence Number=SeqID_75427
atggggtcagacacccttgcagggtcgacgaccatcgtcagtggtgggagcctaacgaggagctccaagggtggcggtaggaggacgcacaggggccctctttgctgggggtcgaggggcctggccaccagaggacgtgtggctgccgtagggcacactgtagagtgccatggcaaaggcatgggactcagtctccagggtgagctcctcaaggagaatctcattgcgggtgtcgtggaatggtacggttcgcttgatgagagccttcaagtggttatagcggcgactgagaccacgcagaaggttcaggacgaggatgcggtcgaggacaagctcattaagataacagagggagtccgccacaccatccattcaacaatagtactcgctgacggagagctcaacagagagggtgccgatgagtcacaagaggacaacattgtccatctagtgccaggatggagacaatggggcaacggtgtcgtcgagaacgtggtcgacgagcgtgtagcgctggagcgtgaggagcatctgatcacgccagtgggcgtagtgcgggacatcgaatccaacatgacaaccatcttcgtgcccccgcctcccctctccgcgtgtgcccccgcctccgcgaaacctatgcggcatccacaccgactccgctccggggatgctcagctgggctaccgcttcgagctgccggatcccccaggcggggcagcggcgagttgggccacgcgctatggccctgggcggcttcgtgatgtcgaccatcgtgcagggggagggcgcggcaggccctccgtggagatcggcgtggcgcacgtcgggtgcgccgaggacgtcgtcgcgttcgtcgctttggcggacgactgcccatgtccggatctacgttag

SEQ ID NO: 32053 - DNA, 483 bp, Zea mays
  Peptide Sequence Number=SeqID_75428
atgggcgagggccttatggcagcagcatctgctctgaggtcatcgctgctgctgttcggcccctcggagcagaagtcgtcgtcgttgctgttggagcgggtggcggtgagccatccgtcggccttctgttgctccgcaggccctccaatcgtgtggggttgtttgtacctgcggaggtggaactggagttccgtttgtaatggcaccttgagtgccagtgcctgttcattgtggctgtcggggcctgaacatggttctgtcatcgatatagtcgagaaggcccgaaaaatcgtttcggcagaggagttttcgagcgtgaagacttgttcggtctgcggaatcacttatccgatcgtgagttacttatcgcagaaggtgatgagtgaggtatccgtatcccggaggcgtaggagtccctcggctcggtcagccttggctgcttacgtgtactacgtcgtttttaggatcccgctttcgaagtag

SEQ ID NO: 32054 - DNA, 1080 bp, Zea mays
  Peptide Sequence Number=SeqID_75429
atgcatggagggagcgcgaagacatggttgcctttcaagggggtcaccctccttttaaaggcaactctccccacttgcgtcctcagccatcgtgggctgagtcttctccaacacgctccaaggtcctccccctacgacacgggggctgggtcccacgcgtcatgcaagctggcccagggcagaagaagccaaaccgccacgcgcggtgcgcgcaactgcccagcggttacaagcattcctccacttttgcccaaaccagcgggtgaaagggcggacagccatgcaggcggcatgcaaccgcgccaagcgggcggaagcagcggtcacgtcgtcagccaagctcacgtcccatccagggacagcaagggaaccctctctcacgacgtgaagacggacaggcggcacctttggcgggcgaagcaggcgacgcttcacctccgccataatgaccgcgtcaaaaaagggaccgggaaaggggataccccgaaagggatccttctccgtgaaggaagcgggccccgagcccccatactgatcagaggttcgaaggctggcccctcgaaggggttcaacagccacctcggagcgctcgggctccgcgcccactactggtcagaggctggccctcaaagggttcacatccgcctcagacgcagagcgagggatgaccctgggtacgttcgatacataaccaaggctcgggctacgctcccgaggggctcgggggctgctctcgcaaacccggctccggccaaaccgttgacagcgtcaacataccagcccgagaacttgggacccgaccccaagtccggcctcgagcgccataggaagctccgcctcgcccgaccccagggctcggactcgggctcagccccagaagacgacgaactccgcctcacccgaccccagggcttggactcgggctcagccccggaagatgacgaactctgcctcgcccgaccccagggctcggactcgggctcagccccggaagacgacgaactccgcctcgcccgaccccagggctcggactcgagctcagccccggaagacgacgaactccgcctcgcccgaccctag

SEQ ID NO: 32055 - DNA, 572 bp, Zea mays
  Peptide Sequence Number=SeqID_75430
atggcgcctcccgttgacgtgactggcctgcgccctaggctgggcgatgtggaggctcctccgaagccgaggtcgagtctgtcttccatggtcgaggccgagtccgagcccctgggtcgggcgaggcggaggtcgtcggcagaggccagggcggagtccgagccctggggtcgggcggagcgaagttcgtcgtcttctggggctgagcccgagtccgagccctgggtcgggcggagcagagttcgccgtcttccgggtcttagcccgagtccgagccctgggtcggaagaagcggagttcgccgtcttccgggcggcgctgtccttctatcagaccggtcagtggagcggcgaagtgacggcggtcacttcggctctgccggagggcgcgcgtcaggataaagatctttatgctgatgggggttaccagctgagaattaggagtcttgagggagagaaccccgtgttttgcgtggaaaagaaggcaagccgctcgacgctcgtcgatgtgcggagctatgcacaaatcggaatcgccatcgttctcacaaacaccgtttgggtttgtttatg

SEQ ID NO: 32056 - DNA, 948 bp, Zea mays
  Peptide Sequence Number=SeqID_75431
atggcggctctcagctctcttacggaagcaggtggacgtcagcaaggactcgaccgctccaacagctgtccctccgctaggcaccgtcgctcctccgacggccacgacatcacaccagcagggtgccaagatctctccggctgccacattggcatgtacttagggcgtcagctctcccccgctagacacgtagcactctgctacacccccgttgtacacctggatcctctccttacgcctataaaaggaaggaccagggccctcttagagagggttggtcgcgcggggacgaggacgggacaggcgctctcttggggccgctcgcttccctctcctgcgtggacgcttgtaaccccctactgcaagcacacccgacctgggcgtgggacgaacacgaaggccgcgggattcccacctctctcacgtcggactccggccgccttgctctctcccccctttgtgctcgcccacgcgctcgacccatctgggctggggcacgcggcactcactcgtcggcctgagggacccccggtctcgaaacgccgacagaatcgaacatggagcgtcgcggtctcaccgggcgagcccgcagagcgcggagacgccggggctgctgcaggaaatcgacgacgtgtggcttgctgcgcatttcgtcgagcacatagcaagcaccgacggggcactgcgcagcagcacgcaagcagggaggacaccgagtcgcgagccatggcggggatgctccaaggcgtctgctgcagtacgccatggggagttggaggagcggctggagctctgagcgccggccatggagagaaggggaggagctgctgctgcaatttctgggcgctgtgcagaggagggcgcaaggaacagcaaggggcggcgtccatgctggaatggagctcggccatgggagggaagatggcagggagggcgctggagaactag

SEQ ID NO: 32057 - DNA, 399 bp, Zea mays
  Peptide Sequence Number=SeqID_75432
atgcaggtggcatgcaaccgcgccaagtggacgcgcttctccgacccccgacacgccagcgtggaggcccaggcccacgcgtcacgcaaccggcgcgccggatgctgcatgcaagcaactgcaccgccacttgcgccaccaccgcgcctcctcgattgcggaaccagcgggcgggagcagcggtcacgtcgtcagccaagctcacgtcccatccgggggcagcaagagaacctcctctcacggcgtgaagacgacgcgcccgtgatccgttcctcgagcggctcgcgcacgcgcaacggccgccccgccaaccactcgccccgtcgcattaactccgcggcaggacaggcggcgcttctggcaggagaagcgggcgacgcttcgccttcgccgaaataa

SEQ ID NO: 32058 - DNA, 780 bp, Zea mays
  Peptide Sequence Number=SeqID_75433
atggcgacggtggttcttagccccctacggaagcaaggagacatcagcaagatcccagcagccccgacagctgtgcttctacagggctcaagcgctcctccgacggccacgataccgcgtacacagggctctagcacctctctgacagccacgttggcatataatgagcttgttagagatatgtattctcgtttgaacctaatcatcaatgagctaaattctattggcataaataagctaggtgatgcagacattgtgaggaagattatctccctgctaccacaacaaagatataggagcatcatcactattcttcacaacatggaggacttgagtacaatgaccccgacaattgtgattgggaaaatcgcagcttttgaaatgtcgcgaaaaatgtgtcagggagaggagccaacttcttcaaggccatatgcttttgcatgtgatgaaaggaagggtaaaaagaaggctcccactctaagttcgtcaagtgaagaagaggaagaagaagaaagtgatgatggtgaagataatcaaccatcaacatcaaaacaaaacatagctgcctcctatagagctggaggattggagcacaggcggcgacgattccaagtgcttgacaagcattatggttccagcttcaaggagacgacacgggacttcctgttctgcttggctgccctcacgaacactatggagaggcatgccggcgcccaccatggcctgcggacttcttgctcccctttgaggcaggcgactggattttacaatcagcaatag

SEQ ID NO: 32059 - DNA, 396 bp, Zea mays
  Peptide Sequence Number=SeqID_75434
atggcggggatgctccaaggcgtctgctacagtacgccatggggagttggaggagtggctggagctctgagcgccggccatggagagaaggggaggagctgctgctgcaatttctgggcgctgtgcagaggagggcgcaaggggcggcgtccatgctggaatggagctcggccatgggagggaagatggcagggagggcgctggagaactaggaagggtgccatggctgctggaggcgcctactccaagggagctcggccatgcgtccaagcagggaggggcgttgagggcgagcaacagcaggggagggagctcgtccacgccatggaggagaggagctcggctccaagggaagaagacacgcgcgagggagaagaagctgctggtggcggctga

SEQ ID NO: 32060 - DNA, 600 bp, Zea mays
  Peptide Sequence Number=SeqID_75435
atggcgccccgcatgccccatgacgacggcggctctcagccccccttacggaagcaaggagacgtcagcaaggactcgacagccccgacagttgtccttccgccaggctccagcgctcctccgactgccacgacatcacacgaacagggtgccaaaacctctccggctgccacgacggcatgtactcagggcactagctcctccccgctagacacgttagcacactgctacatctcccattgtacacctggaccctctccttgcgcctataaaaggaaggtccagggccctcttacaaaaggttggtcgcgcggggaaggacgggacgacacgcgcataagcatctcgctctctcccacgcggacgcttgtaaccccctactgcaagcgcacccgacctgggcgcggaacaaacacgaaggccgcgggtttccccttttacgcctgtctccctccggcttttccccccttcgcgctccgtctcgcgccgacccatctgggctggggcacgcgacgacaaattactcgtcggtccagggaccccccgggttcgaaacgccgacaaatacgtaaatataattatcctagactgactcactag

SEQ ID NO: 32061 - DNA, 414 bp, Zea mays
  Peptide Sequence Number=SeqID_75436
atgacaggaaaacagcgccgcttgcctcgctccgactgttgtgccacccgccagagtgaggctcgcaacagccaagttcagcctcaggcgcaacaggaagctccgcctcacccgaccttaggcctcggcctcggaaggagatctccgcctcacccgaccccagggctcggcctcaccctcggcctcggaaggaggactccgcctcgcccgaccccaaggctcggcctcaacctcgatctcgggaggaatcgcgtcctcgcccgaccccggcctcggcctcaggaggagtctccgcctcgcccgaccttgggctcggaccaaccacgccacgggggatacatcattaccctacccctagctagctcaggctacgggggaacaagaccggcgtcccatccaggctcgccccagtaa

SEQ ID NO: 32062 - DNA, 345 bp, Zea mays
  Peptide Sequence Number=SeqID_75437
atggcgagcaccgaggagggcacggaagagagagagggagggatgtgtgcgcattgggtgcttgggtcaagacatcgtgggcaggtggacgaggatgaagcggggcacgggcaagatcgtggcgctgacttccctcctccatgcgcggactgggcaggggtgggttgggcttgcgcggcaactgcgcaggctcggcggcggttggggaagggcgcagctgggcgcggatgctccgcacggggcgctgctagcgcgagcggatcatgggcgcgcatgcaggcgcgcgacggcgcgcagggcgggaaaaagaaaagaaaagcaaggaaaagagagggtaacacctga

SEQ ID NO: 32063 - DNA, 213 bp, Zea mays
  Peptide Sequence Number=SeqID_75438
atgggggagaggaaggggccgagcaggggaggagcgctggtcatggaactcctgctgggcgccatccatggaagaagggaagaaacagggaggaggaagaactatgctagctgctgctgccgtgagggagaaggagacagggagagggaagcgctggacgagcgggagatcagatatggtgatatcaagttggttcggataagacttaattag

SEQ ID NO: 32064 - DNA, 1140 bp, Zea mays
  Peptide Sequence Number=SeqID_75439
atggctccggcgcagcaccagaagcagcggccgggactgccgccgcccgcgcccgcgcccgcgggggcaggctcccactctctgcacgccgacatgtgcgtggacgacagctcggcgccggggcgcgcgcaggcgctgggaggcctgccaccgcgcaaggcgcaccgcaggtcccgcagcgacgtcgtcccctacgggtacttccagccgctgccaccgccgtcgccgtcgcccaaggtggaggccggaggctggggcctcgccagcggcggcggcggcggcgccggcgacgacctgctcaatgcgtacatgagcatggagggcatggacgggctgaaccactccgacggggatagccgcgggagcagcggcatgcgcaccaacggagccgacagcagcgagaacgagtccgaggactacggcgccggcgccgacagccagttcttcctctggggcgacggtggcaagaggaggaggaatgcctccggagagcccgccgcgccgccggcggcggcggcggcggcggcgaggcacgcccggagccactccatggacagcctcatggggaagctgagcttctccgccaatggggagcccggcaagttcagcctggacttcggtggcggcgagttcaccccggccgagatgaagcggatcatggccgacgagaagctcgcggagatggccctcgccgaccccaagcgcgtgaagagggttctcgccaacaggcagtcggcggcgcggtccaaggagcggaggatgcggtacatcgcggagctggagcagaaggtgcagatcctgcagacggaggccaccacgctgtccgcgcagctcactctgctacagcgcgactcggcggggctcgccacgcagaacaacgagctcaagttccggctgcaggcgatggagcagcaggcgcagctgcgcgatgcgctgaacgaggctctgacaggcgaagtccagcgcctgaagctcggcgacacagcctcgtccggtaataatctaccccagcaagtgcagctccgttgccagaaccaggtggcggggctgcacaagcagcagcagcagcagggtggtgagcagatacccttctatcagctggagcagaacggcgcgccgaggaacgacgcgcctaaatga

SEQ ID NO: 32065 - DNA, 384 bp, Zea mays
  Peptide Sequence Number=SeqID_75440
atggaggacggcgactcggcgtacgggggcgggggcacggacgtgactcgtgacggggacgcggtgactcgatccatcgcagccggagttttggcattcgggctggcctgtataaccgtgtaccggtgtggccgcggttcacgggctgggaagtgcgtctccggctccgtcgtcgcggcgacggtgggcgcttttcatgctttcagactatggattttaccgccagacacgatcggtgcctatcaaaaggtgaatgcaactgacggagttggtacagcagttgaaagaattgcgcatcaggtcctggccgccgaaaacagcttatttccggcggctggctccttggccgccgaaaataacaaattattttcggcggccacttag

SEQ ID NO: 32066 - DNA, 258 bp, Zea mays
  Peptide Sequence Number=SeqID_75441
atggaagaagggaagaagcatggaggaggaagaactatgctggctgctactgccgtgagggagaaggagacagggagagggaagcgttggacgagcgagaggctagggagagcggcgcgctggacaccattggcatgctggctggtggccagggcttgcccggcgcttgaggccaagcaccacgcgacagccatggccactgcagcacgcaagatcagatatggtgatatcaagttggttcggataagacttaattag

SEQ ID NO: 32067 - DNA, 153 bp, Zea mays
  Peptide Sequence Number=SeqID_75442
atggggccaaggcgtagtgctcgctctgccaaggttggggtgcagaggttcattcgatttggttttgttagtcacccaccttggggaggtaaagaagaaggcgtcgaggcggatctccaggagttccaggactttgacgagttcgaggattag

SEQ ID NO: 32068 - DNA, 483 bp, Zea mays
  Peptide Sequence Number=SeqID_75443
atggccccctggcgacgtggctggtccgaacccgagttggggcgaggtggcgattcctccgaggtcgaggttgagtccgagccctggggtcgggcgaggcggagttcgtcgtcttccggagccgaggccgagtccgagccctggggtcgggcgaggcggagttcgtcgtcttccggagccgaggccgagatgggggccgagccctggggtcaggcgaggcggagcttcctatgtcgcctgaggctagacttagccgctgtcgacctcactctggcgagtggcacgacagtcagagcggggcaggcggcgctgttttcttgtcaggtcggtcagtggagcagcgaagtgactgcggtcacttcggctctgtcgactgaaaaccgcgtcaggataagatgtcaggcgatccttgcattaaatgctcctgcgatacggtcgattggcgtggcaatctggccaaggttgcttctctgcgaacactag

SEQ ID NO: 32069 - DNA, 336 bp, Zea mays
  Peptide Sequence Number=SeqID_75444
atggccgttggaagtgtgctgtcgtatggcgcaccggacagtcctgtgcgccaccggacactgtctggtgcgccagccacgtcagcagaccgttggggttcgaccgttgaagctctggcttgtggggcctctgggctgtccggtggtgcaccggacaggcgcgcatttaatgcgttgcagtcgaccgttgctcgtgaagtagctgttgctccgctggcacaccggatagtccggtgtgcaccggacagtccggtgaattatagtggagcgccctctgattttcctgaaggtgaagagttcgagctgaagagctctggtgcaccggacactgtctga

SEQ ID NO: 32070 - DNA, 759 bp, Zea mays
  Peptide Sequence Number=SeqID_75445
atgcagcacctcgagcccttgtggggaacgtcttctgacaaggtttctactggccgaccgtggtggtcgacgccactaggattgtacgctcctgccaagggtgtcaattctacgcaagacagatgcacctacccgctcaggccctgcagacaatacccatcacttggtcgtttgacatggactaaaaccaatgatctacaacgacctcaacaagtttggcaagcggtggatgaaagagctaccctcggtggtttggagtctgaggacgatgctgagccgggccacgggtttctcgccgttctttctagtctatggggccgaggctatcttacccacaaacttggaatacgattccccaaggacaaaggcttacgtcgaccaaagcaaccagaccagccgagaagactcactggaccagctggaagaggctcaggacgtggccttactacactcggcgcggtatcagcagtctctgcgacgctaccacgcccgaagggttcggccctgaggcttccaggtgggagacttggtacttcagctgcgacaagacgttcgagggcgccacaagcttactcccccctgggaagggccgttcatcatcaccaagattttgaagctcggaacatacaagctggccaacgatcaaggcgaggtctacaacaacgcttggaacatccaacagctacgtcgcttctacccttaaaatgtttcaagtcgttcatgtacctcgtttcctttacatacgtagataaagcctaa

SEQ ID NO: 32071 - DNA, 387 bp, Zea mays
  Peptide Sequence Number=SeqID_75446
atgcaagaggcgtgcaaccgcgccgcgattgtgcaccctttcggcttcgtcgcatctggcggtccagcatggaggcccgggcccacatgtcatggaccgggaaaggggatatttcgaaaagggtccttctcggcgaaggaaacaagctccgagcccattactgatcaggggggttcgaaggctggcccctcggaagggttcgacagccgccccagagcacgcagagtgagggatgaccctgggtacgtccgttacatggccgaggctcgggctacgctcctgaggtaccctaggacatttccgagaccagcgggaacgatttgtaatggaatcccaccagagggaggcgccgagccctcggaccctatcgaacgggtccgggtctag

SEQ ID NO: 32072 - DNA, 264 bp, Zea mays
  Peptide Sequence Number=SeqID_75447
atggcagctgctgacaaaaggctggcatccgaactagccccacgaagttatctgaacggaaaagcagaatcagtgatgcagaaactggttacatgtgttcaaaatacagttgaattatatcatgaattgcatgctttggatagattggaacatgattatcgccttaaacagaaagaacaagatggtttgagtttaagaggagacagtctggatatactgaagcaggagacgattcttgattgtggtgttttgtggaaacaataa

SEQ ID NO: 32073 - DNA, 579 bp, Zea mays
  Peptide Sequence Number=SeqID_75448
atgggtcccggtatcctccgaaatctccttcatgaacatggacgtgtcttggcaagggttgagaggaggtccacagagcccgggattgttgctatagatcgatgggttcagaaaccggaggccttggagattggtgagctcgtcagggatgcaatgcgacagggagttgcccgacagatcgatgcccgtcatcagctcgagtatcctctggaacgtgagctcctgccccttccagatgatgtcgatccgatcctagtagatggacccatccagcgatcctgtgctggagttgttcttggggtgcttcatggaagccaggtctcccagctctctcaggatcagccctatcagtccgttgtgggccaagtccagcagctggagctgcgagagctgcgacggctccggagggatctggccgctgaacttgttcgagctgagcctaaggatcttcagcgccggaacgaaggtcccgatccagcgagggatgtcgccgtagaacctgttgttgccgatctctacggtgggcgcgggttggtggcggcgcggtggaggagcgggttggtggcggcgcgcgcatag

SEQ ID NO: 32074 - DNA, 453 bp, Zea mays
  Peptide Sequence Number=SeqID_75449
atggtcaccttaaggactatagacccctactctaaccttgaccttagtgtcttttcaaaatacgccttctcgcctagcggagcgtccactgtgtcgcacagtgtcaggtcagtccagtcaactggagagactgcatcgtcgctctgcacgaggagcaggagcgccaacgccaggagcaggagcgggagcagcaagactcttccccctctcctcagcaggacgtggagtctgagaggccaccttcccctgcacctcagccagagatgccccctgcaccaccacagggcatcctggctgctggaggagaccctgacggagatggagacgatgacgacaccggtggcagttcgagccacgacacggagctctcggaggagccggagctggagggatggatcgctagacctatcactcgtgatgctgcttgcgggtgtcactttgaaagtcgcctag

SEQ ID NO: 32075 - DNA, 162 bp, Zea mays
  Peptide Sequence Number=SeqID_75450
atgacgcacaaggaggtgaccgacaagaggatgatagctttgggagcaatagaaaaggacaagatcatggtagctagggcctacaacaagaaggagacgctcgcgttggcatcactcatcgacgacgagaagaagcttggcgactgccagttcgacctctag

SEQ ID NO: 32076 - DNA, 417 bp, Zea mays
  Peptide Sequence Number=SeqID_75451
atgggggggcctgcggagcaacagaagaccgacgaacggcacgccgtcacccgctccagtagcggcgacaacgacgacttctgctccggggggccgaacagcggcagcgatgacctcagggcggatgccgctgccaggaggcccccgcccatgcccaaactcgtgaggcaaggacgggcagaaggccatagagttggaggcgactctccccacttgcgtccccagccgtcgtgggctgagtcttctccaacacgctccaaggtcctccccctacggcgcagggactgggtcccacacgtcatgcaagccggcccagagcagaagaagccaaaccgccgcgcgcggtgcatgcaaccgcccagcggttacaagtggccctccacttttgcccagaccagcgggcgaaagagcgggtag

SEQ ID NO: 32077 - DNA, 1758 bp, Zea mays
  Peptide Sequence Number=SeqID_75452
atggcgcctcctgtcgacgtggttggttcgcgccctaggttgggcgatgtggaggctcctccgaggtcgaggtcgaggtcgagtctgtcttccgcggccgtggtcgagtccgagcccctgggtcgggcgaggcggagaccgtcggctgaggccagggctgagtccgagccctggggtcgggcgaagcggtgttcgtcgtcttccggggctgagcccaagtccgagccctgggtcgggcggagcggagttcgccgtcttccggggcttagcccgagtccgagccctgggtcgggcggagcggagtttcttatggtgcctgaggtcgggcctgactgcctatcagcctcactctgtcaagtggcactgcagccggtgcggcgcaggcggcgctgtccttctgtcaggccgctttgtgctgatgggggttaccagctgagaattaggagccttgagggaagagtggttattacgttgtcttatcgatcattcgacacaagatacaaaactacaaatattttgcttatccaaggggcggcccgaggccagccagcagtagtgcgtggtggcgccaacaagaccagaccgacggccggcggcggcagcggcggcggcgagacagccaccgatgacgccgccgccaacgcgaaacgctcccccgcggacaagccgccgttcacgctggccgacatcaagcgagccatcccagcgcactgcttccggcggtccgcgctgaggtccacgtcctacctcctgcgcgacctctccgccgtggccgcgctcttctacgtggcgctggtggcgatcccgtcgctccccgccggcggcgcgctccgcctggccgcgtggccgctgtactgggcggcgcagggctgcgcgctgaacagcgtgtgggtggtcgcgcacgagtgcggccaccactccttctcggagcacgcagcgctggacgacgccgtcggcttcgcgctccacacggcgctcctcgtgccctacttctcctggaagcacagccaccggcggcaccacgccaactcggcgtcgctcgaccgcgacgaggtgtacgtgccgtggaggcggtcggagctgccggcgctcgtgcgggggctccacgccaacgccgccgtccgcctcgtcctcctggcgctggtgctcgtcttcggcttcccgctctacctgacgtgcaacatcaccggcaggccgtacccgcgcctcgccagccactacgacccctactcgcccatcttctccggcggccgggagcgcgcccaggtcgtcgcctccgacgccggcatcgccgtcttctcgctcgccctctaccgcctctcgtcctcctccggcggcggcgggctcgccacgctggcgctcgtgtacggcgcgcccctgctcgtcgtcaacgtgtggctggtgctcatcacgttcctgcaccacaccgacgcggccgtgccccgctacgactccggcgagtgggactggctccgcggcgcgctcgccaccgtggaccgcgactacggcgccttcctcaacgccgccttccacaacatcgccgacacgcacgtcgtccaccacctcttcccgtccatgccgcactaccacgccgccgaggccaccagggccatccgcccggtcctcggcgagtactaccgcttcgacgacacgcccatcgcgcgcgcggcgtggcgcgccgccaaggagtgcttgtacgtcgagcccgacgcacgccgcgagggcgtcttctggttcgccagcaataagcaggcgtaa

SEQ ID NO: 32078 - DNA, 510 bp, Zea mays
  Peptide Sequence Number=SeqID_75453
atggcaccgtcgtccaagaaagtagtgctggtcatcgtagtcgtagtcacggtcgcagccgtcctcacagcaccgggcccggccctcgccgcggacctcttggttggggacagccagggctggcgcctcaacgtcgactacgacgagtgggccgacggcaaggacttcatcgtcggcgacacgctagtgttcaagtacgccaagggccagcacacggtggtgcaggcgacggcggcgagcttcgcggcgtgcagccagtccaacagcctcgggacgtgggcctccggcgacgacagggtcccgctcaacacgtcgggccagtggtggttcttctgcggggtggcgggccactgcgagcagggcatgaagttcggcgtcacggtcctccccgtcgtcaagctctcctcttcgtcgtcgtcggcaccaccggcgcttattgctcacggcggaggtgccgcagcggggctcgccgccgctgccgtggcggccgcggccgcgctcctgttctag

SEQ ID NO: 32079 - DNA, 336 bp, Zea mays
  Peptide Sequence Number=SeqID_75454
atgcgcattcgatcggaatcgagcggaaccaggggtgagaaagagagagaagtcggggccccttcgccgacgacacagacttccgcgggcggggtcgtggtgtaccgccgatgtgcgcgagatccggggtggtttaatcgttgcctgcgttggcgcgtggacggttcggcttgcggcaatcgctcgtcggcgcacagaatccgccgcggatcgcgggtcaccgtggtcaatgccccacgcaccataaccgccgatcattatgttaattggaacatggagaactacccgggaaaacagtgctaccacaagggtttatggacgcccttggctgactaa

SEQ ID NO: 32080 - DNA, 504 bp, Zea mays
  Peptide Sequence Number=SeqID_75455
atggcgatggccgtggccttgcacctggggccggcgtctgcggagtactacctggtcggggactcggctggctggaccctcaactacaccatcggctggccggaaaacaagaccttcaaagttgacgactttctaggtacggactacggaggaacagaacaaaagccggcgcatttagcttcgtcgtcgtcatatcaggatgaaaatgatggccggccttcgattttgtttccgcagtgtttcaggtacccgagaggcgagtacacggtgacggaggtggacagccagacgttccgggagtgctaccggcagggcaacgcggtccacgagtggacctccggcaacgacaccgtccggctggactcgcccggcaggcgctggttcttctccagcctcgacgaccactgtgacatggggctcaagctgttcgtcgacgtcgtcggaagcgcgccccccgcacagcatcccttgcctccagctcaggccccggccccggtgttatga

SEQ ID NO: 32081 - DNA, 765 bp, Zea mays
  Peptide Sequence Number=SeqID_75456
atggggaagcctgtcccatcactcctcatgctcctcctcagccgaggcagggtcccactcgacagtccaacccggtggcaagatggatggccaagtcactccaacaaccatttcctccagagtttggacaagtgtgagatttgtgccatggtctttgtctgccttgagctgttgctgtcctttcataataaaatcagtaatcgaccaggggaaggagatgaccagagagacagagatggatggggacctgggggcttggcagcttggggcttcgccgagtcgccgtcacagagtcgctgtccacagccgcagtccggactccggagacgcctcgccgttcgccgactcagcccctcgcagactcgcacaggaaggaacacgaacaggcggcagttgtgtcctgtacggctgtactcctgtgtctcatgcgtgcgtgccttgcgtggacgcgtgggcatgtggccaacatgggcccatgggccatggccgtgggatgggctgatggctgattggcagtacaatggatcaagcaatctcattagctgcgagaagcagacgattcgaatcgagtttttaaaccttgcaagtgaccgcacttgtacccaccataaccggaatgggagaccacgtctcaggtcgcgtgaggagggcaatctgcgggcaggttcactcaggttatgcataaaccggggcttgccttccaaagcagtggcaggcaggtcctctggtgcaggctctggtgctgggtccggggctacctcctga

SEQ ID NO: 32082 - DNA, 405 bp, Zea mays
  Peptide Sequence Number=SeqID_75457
atgccgccgtggtttggccggagcaggagccgccgccgacccccgccgcctgtgctcgtggccagggtagctccgaccacctccgacaccgacccgcacaccgacgtgaccgtcgcgacctcccgaacgtcactgaccaccccgccggagctctactgccgccgttttgccccttattctatgatatgcttaaggataaggaaaatagaaaaggcaataccaatccactatgttatcctaaaaggaaacctaagattaaaagactgtaatcttgctgacggagagtacatcctcgtgccggagcaaggagctgctcaggaggtagccccagatccagcacccgagcctgcaccagaggacctgcctgccactgctttggaaggcaagccccggttttatgcataa

SEQ ID NO: 32083 - DNA, 405 bp, Zea mays
  Peptide Sequence Number=SeqID_75458
atgccgccgtggtttggccggagcaggagccgtcgacgacccccgccgcctgtgctcgtggccagggtagctccgaccacctccgacaccgacccgcacaccgacgtgaccgtcgcgacctcccggacgtcactgaccaccccgccggagctctactgccgccgttttgccccttattctatgatatgcttaaagataaggaaaatagaaaaggcaataccaattcactatgttatcctaaaaggaaacctaagcttaaaagactgtaatcttgctgacggagagtacatcctcgtgccggagcaaggagctgctcaggaggtagccccagatccagcacccgagcctgcaccagaggacctgcctgccactgctttggaaggcaagccccggttttatgcataa

SEQ ID NO: 32084 - DNA, 960 bp, Zea mays
  Peptide Sequence Number=SeqID_75459
atggcgggcgagagcattgagatcttaccggatgggtgggactcgtctcgatctggtgcttgctcctgcgatgtgatccgagcctcgaggagacatggatgggttgcccagagagttgtgcctcaagatcttccacctcctggatcaccagtccctcgcctcttctccccaaggccagagagcttgatacagaggagtagttggtacgacacgcagatagagtgcgtagcgatctctcgttttgggcagttacgcataccaattaactgcgacggtgctggtcctggctcatcagtttgcaggaaatggagggcgttgacctcagatgatgaactgtggcgcaagttgttcaacgacaggtggggagcggacgccgcagcgttctacgcgccggagggatccaagtcttggaaggacgtcttcgccgtgcaggaccggtgcgaccgatacagactgggtgtcaggatcatcagggaagggaagaactactacctgatctaccagggcgagatccagaggtacttggacaaccagaaatttgccatgacctcgttcctgaccaagaaaaactgtcaagcacaggtatcagaggctgatatgaatgcaatgtggaaacatcctgatgtgtataaggagtggataaaatctggtgagagacgtggaaatgtacgattctcccatgatgcaaagaacaggccttacctttctcgcgtcgaggtgaaggcgtccacaaaaggttttggtgcacggttctgctcaggatccccgtacgcgatacaatgcaagtttgtcgaggccgccatcaacgccatcctcccgcaatccccgccgactgccttgcctgccccttccatcctcctccccacccatccttccatcctcgcccgcgcgctccgcacgcgttccatccatgctagcctacagcaacagatgaaattaaaagactttcatgattggtaa

SEQ ID NO: 32085 - DNA, 1551 bp, Zea mays
  Peptide Sequence Number=SeqID_75460
atggcgggagaggccgtggaccagtcgttgctccacctgctgccccaaatccatgccctcttctccgacccgcttcgcgtgatctcgtacaaatggcttagccgtaacttctctgtatcatcgaacgatgccaagaggttgcttcaggagtttgtcgacaaacatggaaccgacctccaggtgatttacagtgtgtcagggtggttgaagagcaatcccgaaaattattgtgtaaagctcgtttcaggcccaaaacttgaagaagcaaggcatggtttcaaagattcttgttcagttcagatctacagcatccaggcctgtattccaaaagatacagctgtgctttggaatcatgaatttgtgcaggcagaggagcttttcaaccagccttttgatgatgagaactgtttgagagataatagattttgtggtgttttgaattcttttgtcaagcgaacatccaatgggaagcatgtgagttcattgccaccaaagcccttaaacagtgctgcagtggtcgaacagtctaaacctagtgttactccaaaggagcagtttgttactgctcagcagcaagatttgcttgtaagttcaaagcatggagcaggcaataagtctgagaaggataattccacattattagataaggctggcaatgctcctgttgtcaaagaacaatcaattgatgcccatgcaagtaaaagtagagctcacaatggaaagaccatgcctaataatggtggatctctggctaacatgtggggccgtgcatcaactaaacctaagcctccaagtaccactaattctacagttgtagaaagtgttgcagctactcttgatgcacaaatatgtgcaaaggaagaagcagatggaaatagcagtgatgacgaacagggaataaagtacaagagggaatccaccaatgcaaataacagaaagcgaagagcagtatttgatttttcggacgatgaggaagatgagaatattataagcattgcatctcctgaggtactaaaacagcgtaccccagaccctgttattgaaactgctgaagacgctgaagtaaatcaaaagaacttggaaaataaagatgatgtaccgaacactgagaaaggttcctcaatgggggtggattctgacttcacttctgaatgtaaaaccaaaactgtcaatactatgaaccattctgggattactttaaaagaaaagagcagcgatcctccagtcagtaacaagaaacaggattctgcagttgagcctgcctccaccgcaccgaagagaagaaaggttttgaagacacgcatagatgagaggggaagggaagttactgaggctgtttgggagggtgaaggttctgcagatgacaaggcagagaagaatgtcagcacaactgctgcgagcggggcgactctcccaagcaaaccgaagccagcaacaagcactgaccaaatcaaggctccaagcaaaacggcagcaggcaacaagaaacccgcgaaggcgaaggctggaaccaagcaagggagcattatgtcattcttcaagaaagcatga

SEQ ID NO: 32086 - DNA, 597 bp, Zea mays
  Peptide Sequence Number=SeqID_75461
atggccccagcccctagctcgagcaaggctgcaacctgcaaacctgcaagggcaagctggcacagtggcaccagccacaggcccccacaggcaggagccagccgccactccgccgccaggagcaccacgcccgccgccaggagcaccgccccctccgcccgcccgccaggagcacctgcaccgcgcccgccacctgcgcaccctcccagtcccaggccccagctcgagcaagggcaagcagccaagcaccagccgccagcgctccgttcgccttcgccagtcccagtgcagttcgcccgtcaggccgtcagcgaccaggccggccagccatggccactcgacgtctacgtccacagcctacagaaccttggagccaacacgcctcgaccagcagcaaatgtttgtgtgaccatcagtgacctcaagaccgaagaaaggaagcaaaagctttccaggtatgggaagaagaagatcaagcggaactttggcaagaagatcaagtacgagtgcgggaaggctctggcagacagccagccaagagtgcgagggagatttgccaagatcgaagaatgcaacctgctgaagccaagcaagtag

SEQ ID NO: 32087 - DNA, 189 bp, Zea mays
  Peptide Sequence Number=SeqID_75462
atgaagaaggtggtttactacgagaccgactcatccgtgccctcaacctccaacgccgagtcaacatcttcaaagcgtcaagaacacaagaagtataacaaatcaccatattttgatggtgaagagtattatatgtggaccttggtcgctgatgcccttgggcaaggctgggaacaccatgacacgtga

SEQ ID NO: 32088 - DNA, 376 bp, Zea mays
  Peptide Sequence Number=SeqID_75463
ggtgaatgatgcttcagattcttttgaaactgctgctattcagaatggtatgtacattgcggtcattggaagcctcaagggactgcaagagaggaagcgtgctactgctttctcaatcaggcctataaccgatttcaatgaggttacgctgcatttcattcagtgtgttcggatgcatatagagaacactgaattaaaggtgacacccttttctgtactaaggcaccgggtgaccagcgggtcatccgatactgatctgcacacgcaggtcctgaatttttttaatgaaccagcgaacctggatgctattgattacaatatggactcggggcgtctttactcaacaattgatgaattccactacaaggcaacttaa

SEQ ID NO: 32089 - DNA, 234 bp, Zea mays
  Peptide Sequence Number=SeqID_75464
atgagtgggcaagatcttgagcaagcgaaggtgttactgttcgggagtatcgtcgaaaagattgtaaacaactgcgacatcattgtaaccaaccccgacatagtggaaggctttgtctgtcgcattgatagatctgagcaaacggaggacaaagatattttgagacatgaacttcatttccgctgcaacctactcgacgtgatattctttccgccacaatcagacttcgagtag

SEQ ID NO: 32090 - DNA, 387 bp, Zea mays
  Peptide Sequence Number=SeqID_75465
atgacgacggacccgaagcgccctaagacgcagcctcttcgccctcctcgactccaccaactcccacccctcgacatccgcccccccagggagtcgaggcgtcgtacggaaggtggaacgccgaacatggggagacggacgggactccggctgaagacgaaccgcagcggtggccggaggtctggaagaaagcacgacgtcgcaaaggggagcccagaggatggcacgctgcccgggctatctcctccccatcgctcgaaattagtcctccgtcagcatggatcaagcagtctcattagctgcgagaagcagatgatccgaatcgagttttcaaaccttgcaaggattttagtaatcattatgctaagtgaagaaaaactaagttag

SEQ ID NO: 32091 - DNA, 396 bp, Zea mays
  Peptide Sequence Number=SeqID_75466
atgtcgaggacggaggcggcgaagagcggcacagccgcaccggtgcggtgccaacggatcggctgcgacgccgtattcagcgacgacgacaaccccgagggctcctaccaataccacccctccgcacacttgctggatggtgtaggcgatgtcgggcctggagaaggtcaggtactagaacacgctggtcaggctccggtagaacgttgcgtctgcgactgggggctcgtcgtcctcaaagagcttcgcctgagtgtcggcaggcgtggagcagggcttgcaatcgggcatgccagctcgctacaggatgtcgagggcatactggcgttggtggaggaagagaccctgaggctggcgctcggcagtgatgccttggaaatggtgaagagaccctag

SEQ ID NO: 32092 - DNA, 666 bp, Zea mays
  Peptide Sequence Number=SeqID_75467
gagctggagcagcagggctcttctttctcgcttcagcaggagatagagtctgtgaggagctgctcccgtatgctcccgctggaggcgccccctgcaccaccactgagcgccccagccgctggaggagacccagacgacggaggcgcacagtcgcgggatttacccggaccgctgggaggcgacctgcttggtgcgccgtccggagaacagtctccgggtgcggagatctgctcagagcactattctatctctgagtgggactcagctgaggcggccatgcaagatgtcgcacggcgtgcactttcgcactactgctcagtgctcggtggggtagccgatggtctcaacctgaagtattacccctgccgtccatctggcagcacaggaggcgtgattgtctcacatgttggtaaggacaatcctaggttgagcagcacagtcaacctagctgtcgtgctaaacacggagctggaccatgcattagacgagctgagtagggctcgtgctgagatcgcccagttgcgggctgagcacgcggagcgtcgtcacctggaggatggctcccccgctcccgttgggactcagcacccgtaccgctcaccccggcgtggacaacaggcttatggcaaccccgactgcaggaccaagataaatttagaaccatag

SEQ ID NO: 32093 - DNA, 333 bp, Zea mays
  Peptide Sequence Number=SeqID_75468
atggttaaaaattttggtagcaaaacagtgcaaatagcaatgaatgctgtggtaacttcacacctactcgtctgtttatatagtgctgcaggagagaaggcgaagcgccagaatttttacaccaggcggacacctgctcgcactcgctgcctggtggaccgcagagaccgaacagtaactctgcaaggtggggtcgctacgcgctgggagatcgaatcgtttctcgacaacgagctcagggaagttgagaacaagcccccaacagggtgcctcatcctacggggctgcctgctcctgctgagcacgccttcctcctctgcgcatgttttctaa

SEQ ID NO: 32094 - DNA, 468 bp, Zea mays
  Peptide Sequence Number=SeqID_75469
atgtcccacccactctatccggctgtcttgagagccttcatagactgccggaaggtcagagtgccgccagagattgtcggtcggctttctgccctcgctgatgacgtcgaaatgaattcagacgacatacaagaacagcgacgagcagcagacccagagctcgaccagttcatggagatctactatcacatgttggtgaggtacagacaggagctcacaaggccaatcgaggaagccgacgaattcttcaggagcatggaggcccagatcgatgcattctcgttattaggcagaactagcttaatagtaatcagaggagcacgaccatgtgtagcttctaatgatgtaactcagcaaattcatcagacccctccagctaccttgccgacgcatgaacgagaagacgagttagactttgtcgaaaccctcttcgctagtggaggtatcgaccatcactcgtcattgtaa

SEQ ID NO: 32095 - DNA, 447 bp, Zea mays
  Peptide Sequence Number=SeqID_75470
atggctgctagcataccttatgattttgtagtcactggctcaggagtgtcagcggagcaggtcctgcatgtgctcggcctcgatagacaggaagaggcggggtcggcagcgaaggggcgtgctgcagaggcggcaacacatccatcgggtgggatagcgcatgcgcggcggtgctgcactgggagtagagggggaggacggaggggtcaacgttggggcggtgcagaagccacaaatggcaagacggaggcggtagagggggccatgctcattgccgtcgctgtcgtggccgagggaatggcttggggagggggcatcggatttgaggtgctgaggacggggaggccacacggttgccgttcccttgcatcgcgctgtagggatctagggcggaggcgaatgcggatctgggagctagggtcggcgtgcgaggggggcgatttctag

SEQ ID NO: 32096 - DNA, 2448 bp, Zea mays
  Peptide Sequence Number=SeqID_75471
atgaagaacgtgggttcgcgtgctgatcctattcccttgtttttatacacggtgagaggggtccgcaaccagaagttgttacctgcccaatcaaggcgtgggagacctccggccaccgctgcggttcgtcttcagccggagtcccgtccgtctccccatgttcggcgttccaccttccgtacgacgcctcgactccctgggggggcggatgtcgaggggtgggagttggtggagtcgaggagggcgaagaggctgcgtcttagggcgcttcgggtccgtcgtcatgggccctccccctctgtcttcaatggcgtttgcttcaactgcctttcacctcgacacctggcccgccaatgccgcttggaaacaaggtgtttcagttgccttgcgctgggccataaggctgcgtcctgtcccgggagccctgccacctctccggagcctaaggcacgagttcataccaccaccgctgtgcaccctgtctgggcgaggcttggcggctcagaggcggccggatcctccgtttggtcgcggcttggtggcacaaagggcccgaggcgccccaactcggtctggggaaggatttcccctcccatggatcgctcggacgcggagaggcagcggctgactcttgctcctaagaggatccatgctatgtcatctgctgaggaagacctaaagaaggcggtggtgatctcggtgatcagcgagcgttcttctgttccaggggaggaggtggcagccctgctcgcgccttggttagaggttgaggaaggatcgcttagtcttcttcgactatctgtgtccagttttctgctgttccttccttctgtgaggctgatccagctcttggaggagaaaaaatcattattgaaagcgccgtccttttcggtgctctgccaacaatggtcaaggttcgcaaattcctcaggagggatccttcctttcttggtgaattttcatttggatggcattcctgtgcatgcttgggaggctgccacggtggaacgactgctcaaaacctttgcttcggtgttctgcgttcagtcggacctggatgacctcacctcttttcgatgttctgcatggtgtgttgatcccgcattgattccggattcaagggagttatggattacagaacccctgcagtcgccagagaatgctggtcaagggttcagaactctaatttatcaagtcagaattcattggtccttcccttcgtcatctgctgagcatgggccccctccatcactgggcgattcgggcgccagagatagggctcgccggagtcccagatcacgttctcctccgggaaatggcagagggcagagtagccgacctcgacgttcagtcatggagaggttaggcccacaaattaatgatggtcaaagtaatcttgaagggcggcgttccagtgctagcaacaagcgctgctcgggcatcgagacatttcctttgggtgcttcggctctggtgcctttggctacagacttgggtgatattgatgaaggcatttcgaacttggttagccgtgcgggcctcgaggcgtcttttgtgactgccttggctccggtgccactggttccattaatggcaagagcagacaaggagggagaacatctagtctatgatcatcgtgcgggcctcgagaccccttccttgggtgtctcggctccggtgtacatggctgcaacgtcaccaattgatggagctactgcggcagaaactctgaactgcgatcaccgtgcgggcctcgaggccccttccttgggtgtttcggctctagggcgctctcatgggatgttggatcccatttctgtcagagggggggcgttgtcggttgctgggactgtttccccgcgggctctgcttgtctattctagaagacgccccattctcgcagatgttggggcggactctgtttctgggacagcagaccgggtggatgatctcgagcttagttctccgacgggaaggcaagagctactagagggacaagcgggggatgattgctccgctgactgtatttcggcatcggttttggataccacgacatcggatgttgaccattcgctggtgcaggattttttggccaccatcactaagccagttgactgcatcttggccagaccagctacccaaaagcggcgacgtaagcagacgccaaaagactttatacctagaagaagtaatagactgaagaaggatggtaggggggcgccttccacagctgtcagaaaaatcagagtggatattgctagaactttggggatattggctgaccaggagggattggcacaagaagctcttgatgaatatgggcggctgttttctaagcctctatctcaggaccatgtcgctgccttagctgcattgttcggttgggcaattccggagaatgccgatgctgcagattcattgttgggacagagtcccattattgtgtag

SEQ ID NO: 32097 - DNA, 582 bp, Zea mays
  Peptide Sequence Number=SeqID_75472
atgagtgaggaggaaagagcgagaggcgttgttatcgaactcgcggccattgtcacactgcagagcacggaccgggcgacgaaactgagtggatacccaggtgaagaagtgtgtgagggtggtgaatgtgtccgacttcaaccgaagcgggaaagtccagagaaaatgggaaaaatcatccaaaatcaccaaatagtatttatagccagaaagactgagtacaggggaggtccaaagatcacagtgaaccagactactggtgatcttggtcatgacgtcgggtccagggtggccgagacgtcgatgccatgtggtggaggaggtggtggagaccagggcaggaggtggagacacgccggcggtggagggctggagcgtgtagagtggccccgagctgtcacagcgggcgagaagggtcctggtggccagatccttcacagaaaaaccagaggggtcaaactcaatggaacaggagttgtcagtggtgaatcgacgaacagaaagaaggttgtgagtgatgtggggagctacgagaacatcgttgaggtaaaacggcccagggagaaccgaggcacctactga

SEQ ID NO: 32098 - DNA, 363 bp, Zea mays
  Peptide Sequence Number=SeqID_75473
atgtcaggcggcgacgagactgggaagatgacggactccgagaagcttgatcgcattctagggcaactcgccaccatgaatcatcgactggacactcatgcgcagcgtatcactctcatggagcaggaacccccacccatacgggctcgctgcgggtacaaccttcgccctcgacgaccctgcctacgggtcctgcactcgagagccatgttggcgcagggcacactgcctctgggggtagcgacgacagatatggaagtggtcgccggggctttctgggcggacaccgtgatcgccacgacgacggaggaccactgtgatatcctagcccttgggatggtgatatcctggcccaaggcttaa

SEQ ID NO: 32099 - DNA, 447 bp, Zea mays
  Peptide Sequence Number=SeqID_75474
atggcctctcaagaacctccacccgtcgctgacgccgacgctgtgcaggagacagctcgccaggccctggtcgccgccgcccaagatcgggtccgcaccgctcaggacgccctcgccagggaatgccaggccgcctccgaccctgagcgtgttgcggccgtcgcccacaacgtcaccttcccaccaccccacggcggcgttccaaacaacgacgccgatgttgttgaaggccccaattacgaggttgtcctcatcgtcaaccttcacgcgcgagtatccagaacatacgtgcccttgtgcccatggttttggatcccctttctccccactacaatcattggtgtgatctcgttctactcgccctcgagcgccatcgaggagcaattcctcggcaattgcgaagctcgtgcacttcgcctcgacgccgagcttcgtgttttcatatag

SEQ ID NO: 32100 - DNA, 1384 bp, Zea mays
  Peptide Sequence Number=SeqID_75475
atgggccaggtccaacttcgtaccagagccagtcttctctcccctcctcccacccctcagctgccacctctgcttcctaggcgacctccaaccaccgctcacccacctgccttggctgccgaccaccccaccgctggccaacccccttccccgtcggaagctcacttccctgcctgggagaaatcctcacgcggccccgcgccttggtctgcgctgctcggacccgtgcacgtggttccttgcgttcgcgcgcctggcaccgctaggacaccccggggtcctcccaaggcttgccccttccgtcaacatgctcctcttctccgtcgtcgggcttctccagcgtcgggacgctgctcgcggccacctctgcccgaaccctcgtcgggccgccccatctccaccggttgcttcctaccaggccgccgccccctggtcgcacagcgctgccgtactagccagcccgccctgcgtcgtctcctcgttgtcggtctgcacctctgcccgcgcctcgacgtgctcccggggctgcgcctcctcgcatggacgtccgtttcgcgcgctgtcgcatgcccgtgcgacctctgccccgccgtcgactacctgctcgtcgcggtccagcccccctatgtcgctccctccctggcggcccccatctcctactccttcgacgccgtcccgtttggcccgtcgccgcccgtatcgatcatttgctcggcagccaccctccccagtagcgcgaccgcacccactggcgttcttggccctgctcctatggccgcagccccctcagttcccatgccttccactgctcacgcgactcccgacttctctggccccgcctttgcactggctaccgacaccccctccttcctaactccgcctagttccgctgagatcgttgtgtgcgtcctccttcatgacggccagcttgtccatggcactttcgtggccttcgatcagaccatgaaccctgttccccgtgactgtgttgagatccaccatcaggcgaaccgtcacatgcctggactgcttgtcttccccactgttgcagttgcctccctaatgatggaggcctacaaccccagctcccatcccggtgtccttctaggggcacctcagcactctccacgcaacccgcgccttcgccaccccctccctctcccacaaattgggtggtcgacttcggagcctcttcccacaccactcctaccactacctcgttatcccatcaccatcctccacacccctcgcatactccctctatcgtgggtggggatcggttctatcgtcccggtcccctcagtaggtgcatcggtttctctaggaccattctaccttaacgacgtccttgttgctctcgatctaaacacatcctcttctctcg

SEQ ID NO: 32101 - DNA, 570 bp, Zea mays
  Peptide Sequence Number=SeqID_75476
atgaagggactatcgaagcaacttagcgggatagaaattgtaaaagatcttaccaaaattatcataaatgagaaaggggatatgtttcaaggttatggcggtgatggtggccacgggagacagccggcgctcggcgtgattcccacccagccgcgagccaagaggtttgaggtcaagttcgcggaccccccctcgccgtggcccccgctcccacacccgcacaggcatctagcccccctccccctcccgctcgagatctccgccgatctagcctatcgggggtccgcgatgtgtggaggggtgagcatcgacggtggcggtagaagaggaggaagccttcgaggaactctgaggtgggtggtggaggaggagagcgaggggggacgacgaggctgcctggccgagccacgaggggaagatgagcgtcacctgcaaggccacaaccttggtgagactgccaccatgagtgtgccccacggtcgccgccaggatctcgagctcgccatcgatgacttcgacgaggagttgatcgaccctgagctatgctactcgttccagcacaataccaag

SEQ ID NO: 32102 - DNA, 426 bp, Zea mays
  Peptide Sequence Number=SeqID_75477
atgctggtagactacacaacggtactcgatagaacaagtgtgtcggtcgaaggcccgacacaacaaggtgtcgagagcattgtggaagtgacactagcgagtagggtcgcgagtgatgggtctagcgatccatccctccggctccggctcctccgagagctctgtgccatggctcgaactgccaccagtgtcgtcgtcatctccgtctctgccaaggtctcctccagcagccgagatgccctgtggtggtgcagggggcatctctggctgaggtgtaggagaaggcggcctcccagactccacttcctgctgaggcgagggggaagagtcctgctgctcctggtcccgctcctgctcctggcgccgacgctcttgctcctcgtgcaggcgatgatgcagtctctccaagtgactggactgacctag

SEQ ID NO: 32103 - DNA, 333 bp, Zea mays
  Peptide Sequence Number=SeqID_75478
atgcaagatgcagcacgacaggcactttctcagtattgctcgctgtttagtggggtagctgatggccttgacctgaagtactaccctcgccgttcgaccagcagtgttggaggtgtgattgtctcacctgttgagctggaccacgcccttgacgagctaggcaaggtttggacgaaggttgcggaattgcgtgctgagtgcgcagcacaccactatctggatggtggttctcccgcccctattgggattcagcacccttaccgctcaccgccctgtggtcgcttcgactatggtaccccagactgcaggacccagatagatttggatccatag

SEQ ID NO: 32104 - DNA, 258 bp, Zea mays
  Peptide Sequence Number=SeqID_75479
atggttattctgatgttggtactggtttcctccaggttggttgctctgacggtactgctgctgctattgctgaggaaactgcctctggtactggtgctgatgctgacgcagatgctgtccctcaagcacatggtagcgacggaagttgtccctgaactcctcctaggtgatggcttcagggttggcatgagtggcgaggaggctgaggttggggtggctgctgctgcacctgctgcattgctattagtgtctgactaa

SEQ ID NO: 32105 - DNA, 1329 bp, Zea mays
  Peptide Sequence Number=SeqID_75480
atggttgccatccaagggagtcgccctccttttaaaggcgactctccccacttgcgtcctcagccgtcgcggactgagtcttctccaacacgctccaaggtcctccccctacgacccgggggctgggtcccacacgtcatgcaagctggcccaggacagaaggagccaaaaccaccgcgcacggagcgcacaactgcccagtggttacaagcactcctccacttttgcccagaccagcgggtgaaagggcagaccgccatgcaggcggcatgcaaccttaccagggggcgcaccctttcgacttcgacgcgtccagcatggagtcccaggcccacacgtcatgtaaccggcgcgccagttactacgtgtgagaaactgcaccgccactcgcgccagtatcgcgccttctcgactgcggaaccagtgccgcgactcgaggcgaccctgcgcatgacccgacagtgccaaccgagcacatcggtcacgggtcagtcagccgcgagagaaggcgcgacggtcgatacggccagaaatgggccggcagtaatggcggtggcagacgggcggaagcagcagtcaagtcgtcagcaagcccacgccccctcctgggacagcgagagaaccctctcccacggtgtgaagacgacgcgcccgtgttccgttcctcgaacggctcgcgcacgcacaacggctgcctcgcgaaccactcgtcccgtcgcattaactcttcggcaggacaggcggcacctttggcaggcgaagcaggcgacgcttcacctccgccataatgaccgcgtcaaaaaagggaccgggaaaggggatactccaaaagggatccttctccgcgaaggaagcgggccccgagcccccctacagatcagaggatcgaaggctggcccctcggaagggttcaacagccgcctcagagcactcgggctccgcgcccactactggtcagaggttcgaaggctggcccctcggaagggttcaacggccgcctcaggccactcgggctccgcgcccactactgatcaggggttcgtaggctggcccccgaagggttcgacagccgcctcagagcacgcagagcgagggatgaccctgggtcaaggctcagtccactcaaggacacaatctcgcctcgcccgagcccagcctcgggcaaaggcaaccgaccccgaaggattcacgtctcgcccgagggccccctcaagcaacggacacaccttcggctcgcccgaggcccagtcttcgcagagaagcaaccttggacagatcgccacgccaaccgaccgtatcgcaggagcatttaatgcaaggatcgcctga

SEQ ID NO: 32106 - DNA, 228 bp, Zea mays
  Peptide Sequence Number=SeqID_75481
atggcagggttccggctacgtaagaaacgctccgagcgagagagagggcgagagggttcgactgagggtgcaagtgagcaggggaaggtgggcgagcagggcgcgaggctcaaaaggggcaaggacgtgcggaggtggccggagatcacgcggtcgtgggcgcgtccactgcgggggtcattggcgggaggttggggacgagctgacaggtggggtcggcaggactga

SEQ ID NO: 32107 - DNA, 678 bp, Zea mays
  Peptide Sequence Number=SeqID_75482
atggtggcgttggcaaaatttatttgggtgaaggccacatatgatagtgagccatcggtggaggttttttacaaagaattattgccttccctagcaaaagaatgtcaccagtggcaagactgtgcagtttggcacatgcacgtttacacagaggaccgggaagacttcgagcgaagttgtggaactcatgccgtgtgccaagaacaagtgggggaactgtttaaagcgaagaagggggatgcgaacgaggactcccttcaccgtgcgtcgaaaacgagtagtggccacaatttagttgagttgaacggcctccactatggaccatatcctgaggagggctctactgatgctagggatgctggtgaacgcaataagagaggtggcgctaaatgtggtgggttggatgaaggttgttctaagggtaaggttgtggtcccgccaatgaagaataggaggaaggttgaggcaaaagcgaagggcccggcgagggcaactggggtggaggaagcctcagacaagtttgctgaggagctggccaagacgtgtgccgagccaggggagtgtgaatcatctatgccccttagtgatgttttggtaattaatgacaaccagttgtggactgacaattcttggagaaataagaatgcaagttggatcatagaggacagaaagtcttga

SEQ ID NO: 32108 - DNA, 273 bp, Zea mays
  Peptide Sequence Number=SeqID_75483
atggagatcctatacatcccaaactccaacctatgcctcgacaatagctccacaaccaacactagatcgctaacggtcatctctgacgacggcgtgctcgacgacgcggtcatggtggacgacgacgaggaagaggacgacattacataccgtctgcgacgtcgagtagtctgcttcacctgggccagctcactggtggcaagcgttttcgtggcacaagcgacatttgaaatatgtgtggcggggttggtggcaatacacgagagcacttga

SEQ ID NO: 32109 - DNA, 195 bp, Zea mays
  Peptide Sequence Number=SeqID_75484
atggcggagaggtacagtgatgatggggaggggaccacctgtggggaggtgcatggatgctcacaaagagtgttccgtgagagacgaaaagagatagaacgagaggaagtgctagatcatcaccacgtccactgcaactccaagcagaggtcaaagttatcgatggaagaccagacggtcacggcgatggcgtga

SEQ ID NO: 32110 - DNA, 282 bp, Zea mays
  Peptide Sequence Number=SeqID_75485
atggaggcacaagatcttcaaggtactagagcaagggagaaggtcaaggtgattgtggtacctaaagtcaaagtgaagaagatgctctgcataagtcaaggttattcagctgaggaagactcatacaggaggcttcgacttcgggatgaaagcatgcgtgatatggagatacaacccgggagtaggatgccgaagctgtggctgaagaagcttcgccttagcacaatgacggaggtggaagatggaaccaacctaaaggagaaaagactaattaacccttga

SEQ ID NO: 32111 - DNA, 333 bp, Zea mays
  Peptide Sequence Number=SeqID_75486
atgacggtgttgagggtggatgagaaccctgcaccagatggagagaaatcttccctggacgatgagtacgtctcagccgacgatgagcacgttgatgatgaagacaaggagaccgatagcgtcggtgactacgaaaaccccagtaggacgtcccagctaaagaaggctccctggcccaatctgaagaaggagccttccaacgatgaggaagaggaaaagacaatcaagtttcacatctggtggggctccaagtgggacatgatggcctcacatgtaattgctgcgctcgctgttctactgcagtttcccgcttccttcgtgcatttgcattga

SEQ ID NO: 32112 - DNA, 897 bp, Zea mays
  Peptide Sequence Number=SeqID_75487
atggactgtgaaattcctagagagtcacatggcaagaaacggtcaaatgagtgctcaaaagaaaatgttgctgatgtgcaagaacttgtggatgagttaattgtatttgagcaccttgactatggtaaggatataatgtttccaaccagacctttgaaacaccatgcatctactggcagtgtgcaaattcctggtgacattgggaaaaccttgaactatgtaatgacaaagaaccagtcgatgcctgtaggtagtgccattggcagtggctatccagtatatggtggcaaactatctactttagggaccatattcagttccattcagacggagatcccttcgatccaaagttccagctatagcataagtaatgactgggttgctcaatgtccttcggcttgcattgagcaatggattccaatggaatgcaatataatatctcaatcaaatgcttaccttatgatgcattcttcttcagctttctgtgcccctgaacatgagggttgttctgaaactcaagctccaaacttatgttcaggttcagatgttgttttcgatcccagccagtgttatccagttgctagtttttctgatcttgggatcccggatacaccactaatagcaggtttcttgaatgatatagcactagaacctacgaataatacatcactaggaggagcaggtttcttgaatgctaatttgaaggaccagtcacatctcaaccggcaggaacctaggaatgagacatcaccagaagcaggtttcttgaatgctaatttggaggagcagtcacatctcaactggcacttgcaggaacctgagccatgggctaatggagacaaatgttttgaccaatggtttgatccttgtcacatgcctgacttcctaggttcctga

SEQ ID NO: 32113 - DNA, 609 bp, Zea mays
  Peptide Sequence Number=SeqID_75488
atggcctcacatttgcctggcagcacagataatgaaataaaaaactattggaataccagaaaaaggagaaaacggagatgtggttcgcctctccatccagaatatatgctttctcaggttactcataaagacatggactgtgaaactcctggagagtcacatggcaagaaacggtcaaatgagtgttcaaaagaaaaggttgctgatgtgcaagaacttgtggatgagttaattgtatttgagcaccttgactatggtaaggatataatgtttccaaccagacctttgaaacaccatgcatctactggcagtgtgcaaattcctggtgacattgggaaaaccttgaactatgtaatgacaaagaaccagtcgatgtctgttggtagtgccattggcaatggctatccactttctgtgcccctgaacatgagggttgttctgaaactcaagctccaaacttatgttcagtgttatccagttgctagtttttctgaccttgggatcccggatacaccactaacagcaggtttcttgaatgatatagcactagttcttgaggagcagtttcctccactgcacaatcagggccagagcgagcagcaaccatga

SEQ ID NO: 32114 - DNA, 2187 bp, Zea mays
  Peptide Sequence Number=SeqID_75489
atgaacccagcagatccagaagggaaggggtacgaattgcgccaacttgggcaacttgcctcccgggttcgccaccacataaaacgccggcgccaccgggcactccttccccaccccaccaccacctcctctcctctgcccctaacccgtccgttccggctcatccgccattttttccctgtcgcggtaagcgatagggttcggcgtccgtcttctaaatccgcccttcttcgtttcgatttttccggcgttctgggagcaagcttcggcttcatcgacggcgttcttggtcttttgcggctcgacatgtctccgttccagggatacagaggcgatgcggttctctccggcgtccggtcgcggaagcgcgtgttcgcgacggcggccgcggagcccgtgacggcggcgcccaagaggcagaagcgcggggatgagatgcccctggacgcgctgccggacgagtgcctcttcgaggtcctgcgccgcgtgcagggcacccgcgcgcgctgcgcgtcggcctgcgtctcccgccgctggctcgcgctcctcgccggcatccgcgcctctgaggccgtgctggccccggccgcccccgccgtgccggacctcaaccaggagtacctcagcgaggacgacgaggccgatctgatggacctggacggcgacgcccgcgagaggaccctcgagggcatggaggccacggacgcgcgcctcacggcggcggccgtcgccggccgtctggctgccgtctccgtccgcgggagccaccccgcgcgtggcgtcaccgacgccggcatctccgccctcgcccgcggctgcccagagctccgctcccttaccctgtgggatgtcccgcaggtgacggacgccgggctcgccgaggtcgcggccgagtgccactcgctggagcggcttgacatctctggctgccctatgatcacggacaagggcctcgccgcggttgctcagggttgcccggaactgaagtcgctcaccatcgagggatgctccggtgtggccaacgagggtctcaaggctgtaggtcgtttctgcgccaagctacaggcggttagcatcaagaattgcgcactcgtcgatgaccagggtgtgtctggcctcgtctgctctgcgaccgcctcttcgttgacaaaggtccggcttcagggtttgaacattactgatgcttcccttgctgtgatcgggtactacgggaagtcaatcaaagacctgaccctttctcgcctccctgctgtcggtgagaggggattctgggtgatggccaatgccctgggcctgcagaagctcaggcgaatgactgttgtctcctgcccgggactcacggatcttgctcttgcatctgtcgccaagttcagcccaagtttgaggcttgttaacctcaagaggtgcagcaaggtctcagatggatgtctcaaggaatttgcagaatcatctaaggtcctggagaacttgcagatcgaggaatgcagcagggttactcttacgggcattcttgcgttcctcctcaactgcagcccaaagtttaagtctctctccctgtccaagtgcgtcgggatcaaggacatctgctccgcacctgcacaacttccggtatgcaaatcactacgttccctggccatcaaggattgcccaggcttcaccgacgccagccttgccgtggtgggcatgatctgccctcagctggagaacgtcaatttgagtggccttagtgcagtcaccgacagcggcttccttccactgataaagagttcaaacagtgggctggtcaacgtcgatttgaacggttgcgagaatctcacggatgcagctgtttccgccttggttaaggcccacggcgcttcccttgcgcacctcagtctcgagggatgcagcaagattaccgatgcaagcctgttcgccatctctgagagctgcagccagctcgccgagctcgacctttcgaactgcatggtcagcgactacggcgtcgcggtcttggcagcggcaaagcagctcaggctgcgcgtcctctcgctgtccggctgtatgaaggtcacccagaagagcgtccctttcctaggcagcatgtcttcgtccttggaggggctgaatctccagttcaacttcattggcaaccacaacatcgcgtccctggagaagcagctctggcggtgcgacatccttgcttag

SEQ ID NO: 32115 - DNA, 468 bp, Zea mays
  Peptide Sequence Number=SeqID_75490
atgacgaccgcgtcaaaaaagggaccgggaaaggggatatttcgaaaaaggatccttcctagcgaaggaaacgggccccgagccctcctactgatcaggggttcgaaggttgcgcccttcggggttcggcaaccgccccagagcactcgggctccgagccctttactgatcaggggttcgaaggctggcccctcggaagggttcgacagccgccccagagcacgcagagtcagggatgaccctgggtacgtccgttacatggccgaggctcgggctacgctcccgagcatcgggcgcagcagggagctccgcctcgcccgaccccaggcctcggcctcagcctcgacctcgagaggagtcacaacctcgcccgaccctagcctcggcctcaggagaagtctccgccttgcccgacctgggcctcggaccgactatgctacatgggatgcatcattaccctactcgtag

SEQ ID NO: 32116 - DNA, 294 bp, Zea mays
  Peptide Sequence Number=SeqID_75491
atggcgctggcagctgccgcgtgtctggctccccggcctgagcggctctggcgctgcttctggtgccacctcctaccgccgaggcggagcgcggctgcccgtccgctgctcgggtgtcgattgcgccgtgcgcgggccggccacgtccaggtcctccttgcaccgtcggctgcaccgggggatcgcgcaacacgtcggttcaagacggctcttaacgaggccgtcaagaactgcaaggtgcttgccgaggcagctgagctagcagaaggaggtcgagcgcgtggccatgtctga

SEQ ID NO: 32117 - DNA, 513 bp, Zea mays
  Peptide Sequence Number=SeqID_75492
gaaaacagcgccgcctgtgctgctccgactgttgtgccacccgtcagggtgaggctcacagccgccaagactggcctcaggcgccataggaagctccgcctcgcccgaccccaaggctcggactcaacctcgacgccagacgacggtctccgcctcgcccgaccccagggctcggactcaacctcgacctcggacgatggactccgcctcgcccaaccccagggatcggactcaacctcgacctcggacgacggactccgccttgcccgatcccagggctcggactcaacctcgacgccggacgacggtctccgcctcgcccaaccccagggatcggactcagcctcgacctcggaagacggtctccgcctcgcccgaccccagggctcggactcaacctcgacctcggacgacgggttccgcctcgcccgacccccggggctcggactcaacctcgaccttggaggagcctccgcctcgcccgacctcgggctcggaccaaccacgtcatag

SEQ ID NO: 32118 - DNA, 1146 bp, Zea mays
  Peptide Sequence Number=SeqID_75493
atgctggacgcgccgaagtcgaaagggtgcgcccccttggtgcggttgcatgccgcctgcatggcggtccgccctttcacccgctggtctgggcgaaagtggaggagtgcttgtaaccgctgggcagttcccggctgcatcccctcgccggtggtcacccaagacggtgaccaccagtttgatggtggggagaagcaagccaggctgcgtactctgccccgccctcagcttcaaggatgttcatcatcagtgctggggaggggagtgcaccgagttggggcctgtctccgcgcgggcagcggcccgctccttccctcagtgaccggggggaagggtgctcgccgttcgtggcgctggcagctgccgcgtgtctggctctccggcctgagcggcttcggcgctgcttccggtgccacctcccaccgaggcagccagaagaggtttctctgtcgacgagatagtcggtgccacccgcggactgacctccggctctacggccttggtagcttgtcctcgcccctcgagtggggatgtgggcgagggccttgtcgcagcagcgtctgccctgaggtcatcgctgctgctgtttggccgcccggagcggaggtcgttgtcgctgctgccggagcgggcggcggcgagccacctggggttttgtcgccccgcaggccctccaatgagtccctcgactcagtcggccttgccgcccgaggcttctcttgcttagttaaaggaaccctcggccgctctgcgatgagccagaggcagcggtgtcagcatggacagaggctgagttggctcgaaaagaagcttcgtcggccggagtctggctgggtcgtccgctggcgggaccaacgccggagtcgggttgcagaggccatgagctgggctgatgtcctcgggggacagctggctgaggctacggagcggccggtcgagccgtctactcgggccgggttcctggaggagaccctagcggcgatggcccaggcgcggtgccgacaggacttgtttgtcggtaacagagttatttgtccgagcgagagttacttttcacggaaggtgatgagtgaggagtccctcggctcggtcggccttgctgcttacgtgtactccgtcgttttcaggatcccactttcaaagtag

SEQ ID NO: 32119 - DNA, 678 bp, Zea mays
  Peptide Sequence Number=SeqID_75494
atggatacaaaactaacagggccgtggtcgtatgaaagggaaggtgtaaatcagggccctcacaggaaaggcacatgctatgggcaaaggcaccgcagagcacagcggcgtatgacgagatccacagaagagacacatgctgtgataagcaaggttgctttaccttgttgcgcgagggatgccaaattatatggcaacatgatttccaagttgagcaggcttgaagacacggaagataatgatgaatggagaactggcttgaaagctcttggagctgacagtattagtaaactaaagaaagcatttccagaactggtccaggaggtttcaaggccatccaatttccaggatttctacatatatgcatttcgttattgcctcacagaggaagtagaaatgtatagaaataccagctgctttcgttattgcctcacagtctcacagacccggtcgcccgcgccgttcgtcgcagatcactgcaccacgcacgcccaacagccgacgaccgtcctcgcgtgcggacgccgacgcgctgccgttggcagccgcgtcgcagccgagatctgcatcgcggtctggggctgtgtcgcaatcgagctccacgcgaagcgccgggcgggcgcaacccacgcgccgtcacgcgctgtcgctggctgtcgtggctccgtcgcgagctga

SEQ ID NO: 32120 - DNA, 507 bp, Zea mays
  Peptide Sequence Number=SeqID_75495
atgggtgtgggcaagggacggcttgatgggtgggagtgcttattgaatgctttgcgactgttcagtgaccgcggttggaaggcacccaagcgcaagcgcgagccgactcctccgtcggatgagtttggtgactcggaatactcagaggaggagttctcctctgagtccgagggatccccggcccccgtctctcccccggcgtcgtccgatgactcggacgactcccaggggatagccgcggaggtctggacgtacatccgggccgtcgagcgctccgggctcgaaggctcggatgagtcggagtactcctcggatgaggaggactcggacggcggcgacgagggtgaaggcgacgacgacgatgacgacgacgacgacgacggcgacggtgacggcagcggcagtggcaggggcggcggcgacggcagcagggacagcaccaagggtggcagcagcaagggcagcaccaagggcggcggcggcggcaggggcagggccagtggctag

SEQ ID NO: 32121 - DNA, 309 bp, Zea mays
  Peptide Sequence Number=SeqID_75496
atggtttcccgttgtgttggctatgaggcactcctgttgtggttgcaactcgcctcactgggcgaggaggcgagcccgtcctctgatcctaaccggaggatgtccagggatgagtcccagacagggtccaacacccctatgacctcgaacgtccctacatccagtcctcgacggcttgtgctaccggcacctttgctgatcaatgctcatagtagggggttacagcgggcgagagagggaggagaggctcccaagtctcttgttttggaggaggtggagctaagggctacagagtggagtccttactaa

SEQ ID NO: 32122 - DNA, 1014 bp, Zea mays
  Peptide Sequence Number=SeqID_75497
atgggcgccgcagcgcttctggacaaactccccaaggtagatactccgagcgagcgaataactcatcaggagatccgagacctcggcctcgctgtgcgacagcaggatgagagctccatgtcgcgacgtcatgagccagggatcaaccgatgcaccgcatctatgacaatagtgaacgacgccatgtcacagcaacccctcgagctcaaagaaagtgtggcgtgggtcccacctcgccggtgccttaggccaggccgaagcgcgcggagcgcgcctgaccatgggcctgaagaggagggacataacaagtcgggcaacacccatcgatacaaccagtgctgcggaggccgcttcgacctcgatggggaccgaagcccgagcccaccaccgctgggcctcaagcatttagctgccgcatccttcgagcaccagtgccgcagcgattcggcgtgtgcatggctagagaacttgaggccaggttgcatccaaaattgggccgacctcgtggaaatcttcgtcgaaaatttccaaggcacgcagaaagtcaagcgcgacaaagaacctgacgggggatctagaggtcggcccaataaaagaaagaaggacaagcggaggcgcgacgaaatgctggtagccacgatgggccagaaacgaaagagaccaccgactgaagaagccaccgaccatttcgagaaactgctcgaggccccgtgttcgaaccaccgctacccggtccgacgtgcctacaaagattgtgggttgcttaggaagttcatgagcaaggggacaccacccgagaaagggttcgagtcccagcaggatggcgagcaggagaaagtgggggtctctttccctgatgaaatcgggtgtttgttgatcttcgatgggtctgactactacatgttaagaaggcatcggaagtcggaacgacatgaggacaccggtaacttcaggaccgaaaccctaaccttcaaggtagttgggttccaggggacctaccacgccatcctctag

SEQ ID NO: 32123 - DNA, 426 bp, Zea mays
  Peptide Sequence Number=SeqID_75498
atgtcggttgaacaaaggaacgagttcaataagaagcatcgtgaagcgtgtcaacgaaagaagggacaaaatgtgatgaccaatgtgtcaggagatggagacaaaaaaacaccaaggtggaaagagggaaagttagagtacataagaaaacgtagagcactgcaggctgacactttgaatcaggggtccattgccctggatgacccaacatatacctctaaggttgtacgccctacagcagatgcaacgaaacttgatggatccgcagttaccgtctgcgactgggttatctctgaattcatcgggacacctttcctgccatcttcaacacagaccgaggatgtcagttcacccgatatgtctactgggccactgagacatgagcagcacaataagaatcccaccagtcagcagcggggccagtaa

SEQ ID NO: 32124 - DNA, 204 bp, Zea mays
  Peptide Sequence Number=SeqID_75499
atgaagaaggcttctgccccagcaggtggtggatttgggggatccatctgcggttcggaactagtggccgctctccttcgacggatgcgtgcaggttttattgtggatatatccccacagatatttcactcaatcaaagatccaaatcaaacaggtatcataagaacaagcattaaagcacataaatatctatataaggattag

SEQ ID NO: 32125 - DNA, 237 bp, Zea mays
  Peptide Sequence Number=SeqID_75500
atgggtgagcctagagtgatggagctccctgagtgggttgacattgttaagagtgtgaggttcaaggggatccctccttatgaccctaactgtataacttttagtaaacaacaaggaattgtgagaacaaaagaatctagtgataaacaaccattagtaggttatggcgttgttttgaaaaagactaagaatatacctaaaagaagctttaggaaaactgctccaaacaatggctag

SEQ ID NO: 32126 - DNA, 226 bp, Zea mays
  Peptide Sequence Number=SeqID_75501
atggattcgaacacgaccgggaatggaaccagcgtaccgacgctcgttaagtgcacgacgcctacgatgttggtacgtcgcaacctcgagctcatggtcttcatcttccatgtcttgtgccatcctaagaaaatattggaatctacgaaccggtccattgttgtggatgagtccgaagctagacaatggcttgttgaagaagtgtcgtggcttacggtggaagcat

SEQ ID NO: 32127 - DNA, 471 bp, Zea mays
  Peptide Sequence Number=SeqID_75502
atggccggttctaaagatcacaccgatatctcccagacaatatcctttaggctggttgttgaaagcctgtcggttgatgagcaacagcaatataaagacttcatgcgtcaagcgaaggagaaaatttttgtcacaattcacggtggatcatcatcagaaggttgtcaaacatggagagaccgaggtcgcatctcttctaccttcgcttcaaaactccaatattctctccacatccagattctccccacagccagattctcagaaaagctccttagaaaaaagctgaaccaaacaggccctatgtctaatacatcggcaacaaatggggattcacagccccagccatcatatggtatgccgatgaactcatatccagggcaaataccaccatcgtcgtccctgcttggcaaatcggtgcccctggacacgatcggaccgtccgagcctttgcccagaccgtctgggccttaa

SEQ ID NO: 32128 - DNA, 918 bp, Zea mays
  Peptide Sequence Number=SeqID_75503
atggcgcagaggatcgtcttcttcttagcagacctaaatctcgccttccgggagagaccccgtcggagaggagagatcctagggctccgggctggtggcgtcgccggcaagcgcaagaaggccgccacgagcggcaagcccaagcgaccgccctccgccttcttcgtcttcatatccccgcaatcgcctcccaaatcttcgttcggccatggaggcgccgcaatggaggggagtgtcgtgtgggtccagttcctcagagggttcaaccgctactgcgcgcgcatgacgacctcccgctccctcgcaagctggagcgggctgccactggcaactctacgagagaagctgcccaggttcctgcagaagtgcgcttcgagtctgaccccctccgcccatggttctgtcgcctccagatctcttgagatggcaggggaggaggagaggaagcaggtgctcctctcgtacgttgtccccacagtctcctcgtggaacactacaacctccagtactacgggttctggttccagaatgggacacaagcgaagtagaagcgtgtgggctagatcagcggaggaagaagattgccgccccaaccgcgtctatctttggtttgttgttgtttttacttcaagagtctacacaacaatactccaagatctaggtactgattttctaattaatggtcaaatggcaaagagggaggcaaccgtggtggaccggacacgatctccatggaggaatcatctttcgaacggtgagtggaagaggatggatccggtgtgtccacggaagcctgaaaaaggtccaggcacagtgaagaaaaaagttctggtgcgtccatgcccacctagaatcttgcaaacaaagaagccagttgatgtcagaaatgtggatatgaggattgccggcaacaactaa

SEQ ID NO: 32129 - DNA, 243 bp, Zea mays
  Peptide Sequence Number=SeqID_75504
atggtggcggcggcggccgcacatagagccagcttcccgttgcgtctgcagcagatccttgctggaagctgcaccgtctcacctgtggtcaaggtcgagtctgagccgatccagacgtcggtcgacaggtcgctggcgtcggtggaccacgttgcccgtcgcggttgtggagcggagctgcgagcagatcccaagtccaacgacgaagagggagtctcggtagggcgcgataaggcgcgatga

SEQ ID NO: 32130 - DNA, 726 bp, Zea mays
  Peptide Sequence Number=SeqID_75505
atgaagcctatgcgtcccttcttaaatagcaagggattgttggcgatttgtttagttaatttgttgcgtctccggactatatcaaatgtttattatcaatgctggtccgggcttccgactactatgaaacatcgtgaagtccttgatcctaaaactaccgccaagatacattgtataagacctcattattatgtttgtaggctcttgggagcaaatattaaagttatcgcaccccaaaatcttgtgttaaccgttagatttgcttcttttcttcgccaaatgtctcgaggaaagatgcttgaaagaggaagacggagcttcttattgatgaggtgctgcccttaccccttgttccttgtcgtcctcggcatctcccttacttttatcgttttttacgacaactttggaagtcgaactggaggagctacgctgctgcttgggtcgggccttggacttcgtcggggctcgcggttcctctctggtggagcgcttggacaatgtcccgtgccgcgtccgggtgttgtaggtttcggcgtccaccagggcgccaccgcggcgctgcttgttggggagcttcggtctgactgcagcctacgggaggtcatcggccctccctcagccctctcagacgaggggttggaggagatgctggagtgttatgatgaggtgacaagtcgtgtcgtacatagtttgtctatggacgacatcgttcatagtgttcactga

SEQ ID NO: 32131 - DNA, 219 bp, Zea mays
  Peptide Sequence Number=SeqID_75506
atggccacatgtgctaatcgtagtcctctggagcttaagaacgactcgaaccgctcaactggatacacgccgtactttatggcctatggagccgaagcagtcctcccccatcgacctcaagtacggtgccctgaggggtcattcatgggcggagaggtactttggccaggcacctacaagctgaaggataagaagggaaggacgctcgccaacgtgtga

SEQ ID NO: 32132 - DNA, 399 bp, Zea mays
  Peptide Sequence Number=SeqID_75507
atggcccatttcctaaaagggctaaggccagaactcaagactatccttgccagccaagactttcgcagtttctcccacctgtcaaacaaagccattcaagtgatcccacccaaggggcagaacttcaacaagccagcagggtctgctccatcatgttacaaccagccaagccagaattctttccacactcagtcagtagcaagcaaccatcctccggccaatgcttgttggcactgtggtgatcccagccacttcaagaacaactacccacagctgaagcccgcggcatcagccttctccaactcggtgaatggcctcaagaacgttccagcgccagcatccaaggcaccttccaccaacagccaggtgagcaagcagcagttccacaacagggcctga

SEQ ID NO: 32133 - DNA, 426 bp, Zea mays
  Peptide Sequence Number=SeqID_75508
atgcctggaacctcgccggcgaccacacacccgctgcagagctccgccaccccgccgtgggcagaccattccaagccgccaccgaccaaattgacctcaccgctatactcacctgcccctacttgtgctagcctacccctccgacccacgagaaccggagccacggcggagaactgccgtagaacctcgtcgacggccggtttctcccccgaccccgaccggttcaccccctcccgcggcgccatcaccgctcgcccgcgccgtctcccccttccctctctagcacgtgggcccgtgcccacggcgccgtcaccgctcgcccgcgccgtctccccttccatgggccgtttgggccggctcggccgcgtgtctgcgcgcccgcgctcgccctcggctgggccgaaatccctcccccggcccgcttaa

SEQ ID NO: 32134 - DNA, 219 bp, Zea mays
  Peptide Sequence Number=SeqID_75509
atggcggggtgggaggacaaggttgacgtcggcaacaccgacggaggagcttccacgggggaaatccggcttcacccttgcatgcagggccccgagggggagccattgggcggcgtcggggcgtccctggccaccctcgagcaggcagggagagggggccaggaaaccgttggaggcagcctgagagttaagacatttgataattttagcgacgagtga

SEQ ID NO: 32135 - DNA, 849 bp, Zea mays
  Peptide Sequence Number=SeqID_75510
atgaggatgatcctcaagattaatctaatgggtgtgcccctgcaggtagaggatcttctctttaacattgacaggaaaaagcaaagaaagagattatgcttcacatgcggggagaagggccactttagggacaactatccaactatggccaaacccaaaaaggtgaggagcaaaggcaaggcgctaacaagtgtcaaaacttgggatgattcttcaatcgaacatgaacctccaaggacgcacaaccaccgatcctcatcacgctcatcacgatcatcatgcaaatgccttatggcaagagatgcttctacttcctgctttgatttaattgatgattctaactcctgcaaccaagttcttgctgagaatattattgtagaaacatgttcagatgaggttgcaaaggaaaatgagcaattaaggcaagaagtggctcgcattggcaaggctctatatgacaagaaaggcaaagccaaacaaatccggcctccacaggataacacaactacgggagtgagcaagcctatggagggagaaaccatgatttgtaggttatgccacaaggaaggccctaagtcttttcaaggcaaggcgatgaccggggataagcaaaggcaaaagctcaagcaaaagccaacaagcaaaatctccaacacctacatcaaaaaggtggataaaaaggatactacactatatttgatcaagaagaaaaagaatggaaaggtgatagcaatcaaggccaacaagcaagccaacaaaggaaagggagccaaacgcatctgggtgtcaaaggaaataatttcaactatgaaaagcaccaagaaggtttggatcccgaaagggaagtga

SEQ ID NO: 32136 - DNA, 303 bp, Zea mays
  Peptide Sequence Number=SeqID_75511
atggctacggggccggccggcccagtcattgtttatgctcccctcgtcacacggaacggccgcggcggggcccagccaggcgcaggcagtagacgagggcggcgtagcccgcgtagggatggtgccaagcaggcggtgttcctgaaaaggaaagggagtgaggggtggccggcctcaggctcctgcgcgacgtgggaaatcaaggagaaagccggcggtggtggaggtgtgaaggaagagaaagaagatgctgctgctgcgcctgcgcgcggccgcagattgggggtgaccttcgattggtga

SEQ ID NO: 32137 - DNA, 297 bp, Zea mays
  Peptide Sequence Number=SeqID_75512
atgcacgagaaagtggtggcggagaaaactcctaatggaggggagactttgaaagttaccatcaccacctccaacgatgggggacaggcgcaagcaaggaaccagggtgacacctccagtacaagaccgattaggcaccactccatccagtcatcaggcccaggcccaacgagattgtcggaccactcggccgcaaaaggccgaccaatccggcagggggcatatgttggagggcaaattgaccgtgcagacggtccggtcctgaggccggacggtctgcggtccggacggaattag

SEQ ID NO: 32138 - DNA, 120 bp, Zea mays
  Peptide Sequence Number=SeqID_75513
atggaggctttgaatgtgtcttggaatgagttgctagctcttgtattgaatgttgaagatattccatgcattatatctgatttccccattccgcgggtgaagaaaaaggagatcgggtaa

SEQ ID NO: 32139 - DNA, 378 bp, Zea mays
  Peptide Sequence Number=SeqID_75514
atgggcgggtatggtgctgtctccggcctcaggacgctcggcatcagcgcgttcttgaagtctggtaccgtcggcggcgacgagaagcccaacgacgagactaatgtattgtgtctaagtgctgaaaacaggaaaaatcgaattggaattgtcttggctcgagcagtcaagactctgctcagtctaggagcaccggactgtccggtgcgccaggctggctcgagcgaactggccgctctcgggaattcaccggcgacgtacagctataattcaccggactgtcaagtgtgcaccggactgtccggtaagccaacggtcggccgggccaacggtcggccgcgcgatctgcgcgggacacgtggccgagccaacggctag

SEQ ID NO: 32140 - DNA, 1350 bp, Zea mays
  Peptide Sequence Number=SeqID_75515
atgatgtcaagtaagatcaacgagctcccacctcgtcatcgatctaaattcacagacaaacttgctgcatatgacttggaggttgacaaggcatgcatagccataaaagacaacattgacaaaattattgagaagcaatatgacatagcagacaagtttatagagcttatcgacgaggtactacgtgccgagtccgataatttagaaaacgagacagatgagccacaacattcgaggaattcggccgattcagcaggacacactgtgcataccacccaacccacaccggatctgtcatcccaagcatcgcagcttgagacccagttgggtggtactcagtttgaagaaattcatgaaagacaacagcatattcgtagagtactggagacttgtcctgacgaagtggatattgatacaggcaatcaggttgcatctcaggatgatacattgaaagggacaacagtttctggaactgatccactccttacagagcttgattgcgttcattctctgtgggatttactctgttccaaggacattgaccaaagcagggttgtcatagattacgatgaatacagtggaaactgtatcgatatttatgaatctttcgcagaggggaagtgtcttgagaatgtcttcatgcagtgcttcattgagtgtgttcgtgacgattccaaaaatcatcgtcgaactatgacttctaacagattagtacttgatgtcaatgttggggctctgctaaattttgaagagcaggaacgtcatagtaagaatcctcagccgtttgatcaaaatgtgttacagaattgcttgcataacacattgcctcctttggtaaatctggataaatgcaagtcgatattggtacctatgcttagtaggggacattggacactgtatgtaatcaacctacagcatcggtgtatacacattttagatttgaatctgtatggtatagaactcggtggcaccacatggaaggactaccattatgacccaatatatttaggtggaaggaaattcccatgggctagggttataatgagtaggttgagcaaagcgttacaacatgtttgccccaatgcatccttccccaaatttggtaattttccaatggatatgccatctaattgcccaacaatgagaacagggtcaaacgactgtggcttttatgtaatgagttacatgaagtattatgatcacaatgcaggtgtcatcacttcttacactcaaccagacaattctcgagacctacgtgctcatgccctatatcaactcacattccatcgcatgaacaaggcgctgccacttccaatagatatccagagatttatgtttgcgcgcaagtag

SEQ ID NO: 32141 - DNA, 939 bp, Zea mays
  Peptide Sequence Number=SeqID_75516
atggcgctccccctgcaaccgtcactgccgccgccactgctgctggtcagtgccaacaataggcacaaggccgtggtggtgatgggcgccacggggaccggtaagtcgcgcctcgcggtggacctcgcgctccagttcggcggagaggttatcaattccgacaagatccagctacacgcaggcctggaggtgaccacgaacaaggtgacggaggaggagcgcgccggcgtgccgcaccatctgctcggggtggcgcaccccgacgtcgagttcacggccgccgacttccggcgcgaggcgtcccgcgccgcgggtgcgatcaccgcgcgcggccgcctcccgatcatcgccggcgggtcgaactcgtacgtcgaggagctcgtggacggcgacggccgcgcgctccgggagggctacgactgctgcttcctctgggtggacgtgcagcccgccgtgctgcatggctacgtcgcccggcgcgtcgatgagatgtgcgctcgcggcctggtggacgaggtcgcggcggccttcgacccgcgccgcaccgactactcgcgcggcatctggcgcgccattggcgcgccggagctcgacgcgtacctgcggtggtcgggagacgagggcgagcgcgcccggctgctggcagccgccatcgaggacatcaagtcgaacacccgccggctgtcgtgccggcagcgcgccaagatccagcggctggccaagctgtggggcgtccggcgcgtggacgccacagaggtcttccggaggcgcggcgatgcggccgatgaggcctggcagcggctcgttgccacgccgtgcatcgacgcggtgcgctccttcctgcgcgacgccgccgtcgtcgctgcggccaatgatccgccggcagccgaagtagtgcccgtgtttgctcccgcgtcggcagctgtcgtcgcaggataa

SEQ ID NO: 32142 - DNA, 3795 bp, Zea mays
  Peptide Sequence Number=SeqID_75517
atggccacgtcggcgccgccaccgtcctccgcgccgtggctggagtgggccgcggagtataccaaggcggcgcaggccgaggcccgcccgccgccggagtgggcggcgcgggtggcggcggccgctgcggcggcgggcgagagtgaggacgtgccctggtccgcggggctcgcggaggtgctggcgcgagcgctgttccccggcggcggcggcggcggtggcggggctgccccggcggccgccgcttggaagtacgcggaggccgcgctcgcggcgcggcttgcgtccccggcgctcctcctcgcgctcctctccaccagggtaattcctcaccggctttccaggccaatggagtatagactctaccttgagctcttgaaaagacatgggttcaacttccatcatcagatgaaagcagcaaatttcagaaagatcatggatataatagagcggaatcttagactttccaagatatttggcatctctacatgtgaaccaggggtttttgttgtgcatttcattctttgtattatatggcagttgattgatgttgttctggatgatgagggcctactagagttaactccagagaagaatgctcaatggccaacaaggcctgaagatgtgagcacatttgaaggaacttttactgaacaaagaactgagaagatcaaaaagttacagaagatgaacactgtaacaactatggagctcattgagcatcttcttcgcgataaagtaattactcgtatcctatcattggcacgcgaaaacatgcaatctcactggggggcatttactaaccggttgcacttgcttgcaacaaactcatctaccttgcaaaattcagcaatatccttggaaccatttcagcatttgattctaggtttggtcaaggctcttcaagcagtcaataggtcgacttggcatgatgctttcttggccctctgggtagcttcacttcgccttgtacaaagagaaagagaaccaattgaaggtcctgtacctcacctagacacccggctgtgcatgttgttgtctatcacaacacttgcgattgctgacataattatggaagcagattcactttgcaatgaaacagaactcaacagtcatgtgaatgagaagaaagcaattggtaatctacgcaatgaattgatgctaagcttacagatacttggtgattatgaaagcttgctggttcctccttcatgtgtcatcccagcagctaatcaagctgctactaaagctgcaatgttcatttctggaatcagtataaacaatggctacatggataatgtcaatgggatgaactatactggaaatatgcgacatttgattgtggagtcatgtatctcaaggcagttgctggatacatcagcttactattggcctggttatatcatgaatcatgccaactctacatctcatacactccctagtcaacttgctggttggtcatccttcatgaagggtgcaccactgactcaaccactggttaatatgttggtatcaactcctgcttccagcttggcagaggtcgacaagttatttgaagttgcagttgatgggtcagatgacgacagcatttcagctgccactgttttatgtggagccacccttttacgaggttggaattttcaggagcatacagttcggttagttgttaaactgctctcaccatctgatccaattgataattctggaagagagagccaattgataaagcttggtccaatgctcaatgttattctttcaggaatatcggccgtggactatgctccaatcttctcgttccatggcctgattccagagctggctgcttctcttatggcaatctgtgaagtatttgggtgtctttctccaagtgtttcctggacactgagaactggagaggaaatatctgctcacacagtcttctcgaatgcatttattcttctgttgagactttggaagtttaaccatccaccacttgagtattgcataatgggagatggtgctccagttggctcgcagctaactcctgagtatcttctgctgttacggaattcccaggtcctatcttccagcagtttgtcaaaacaacgaaacggacaaaggcaatcacaagtatcaacttcacacccatcatctggaaatcctatttttatggactcgtttccaaagttgaagttatggtaccagcagcaccaagcttgtctggcctcaactctctctggacttgctcatgggacacctgtacgtaacaatgtggatagccttcttaatcagatgttcagaaaagctaataaaggaggcacatcaataggttctttatctggaagtagcagcataagtaattcttccagtcctggtggggatgattcacatctttggcctcagttgccagcttgggagatactggaggctgttccttttgtggttgatgctgctcttactgcttgttcccatggaagactatttccacgtgaactggccacaggcctgaaggatctggctgatttcctccctgcatctcttgctacaatagtaagctacttttccgctgaggtgacgcggggtgtctggaagcctgcatccatgaatggatcagattggcctagcccctctgtgaacctatccatggttgatgagcacatcaagaaaatcgtagctgctaccggtgttgatgttccaaagctagttacaggaggaagctcttcaggtacacttccgttaccattggctgctttcgtgagcctcacaatcacatacaagcttgacaaggcatcagagtgtttcctcaaccttgctggtccagctctagagaacctggctgcaagctgcccttggccaagcatggcaatcgttgcagcactgtggacccagaaggtgaagcgatggagcgatttcctaatattttcagcttcgcgcactgtgttccaccacaacaacgatgcagtcgtccagctcctccgaagttgcttcgccgctacccttggcatgtcttcgacatcagtatgcagctgtggaggtgtcgccagccttctgggccacgggtactgccctggtggtttctcgccagttgcgccaggaatcctctacctccggatattccggtgcatcaaggactgctccatactcgccgaggacatactctcccttctgatgctctcagtgaaggatatcgcagaaacaactgtgcccagacaaaggccagacaagctaaagaagaccaagtacgggatgaggcatggccaggtatctctttccgctgcaatgacgcaggtgaaggtggcggcatctctgggggcgacactcgtctggctatccggcggcacggctctcgtccagtccctgatccaggagatgctgccgtcttggttcctgtccgcgcagaacctggatcagggcggggctagcggaggcgtggtgtacaagctaggcgggcacgcgttggcctacttcgcggtgtactcggggatgttggcctggggcatcgaccagacgcccgtgtcccggcgccgcgagagggtcatgcggtcgcacctggggttcctggcgagcgcgctggccgggaagatcttcctcggctgcgacctctccctgtggcgagcctacgtctctgggttcctaggactggtggttgaatgcaccccgtgctgggtgcaggaggtggacctgagggtgctcaagcgcctgagcagcggcctccggcactggggcgaggatgagctcgcggtggcgctcctccgccgcgccggtcccgaggctatgggcacagccgcggagatgatcttgggcagggagttgtga

SEQ ID NO: 32143 - DNA, 1249 bp, Zea mays
  Peptide Sequence Number=SeqID_75518
atggccgcccctcctctggtgtttgtcgccgctgccatagccgcgctcgccatcttcgtcctcgtcctcgtcgtcttcgccttccggcgatggtggtggtggcggcggcagcgccgcccgctccaggccgcggcggaggcctcgaccccggtcgctgtccaggaggaggatatagataggcctcttctttccgaaaatcgggacgatcactctagacaaaggaggacttatccagatgaatgttgtgctacacaaggagaaactcatgtaatcaatattgaaaatgatacttctgaagagtttcgattaggaagcacgttaagacggacatcaccagcaaaattgacaacacctgctcagaagcacagaagggtttctggagatgactatcataatggaagtgttcctctgaaggatagtacatatcatagtagcctagatttagaggtcatagctggtccatctcatggaataagctgttctcggcagtcaagtaggccttctatgctcccaataactcttggaagggttcccccaagtgatttagtgttaaaggactctgaagtatctgggaaacatgctcagataaactggaatgcaaagacattaaaatgggaacttgtggacatgggcagcttgaatggaactttcttgaactcccaggcagttcatcatccagatgctgagtctaggcattggggtgaacctgctgaacttgcacatggcacagcacttcttatttggtttgatcaaaataaagattgttttgcccagtgtgctaatcttggtgattctgcttgcgtaatgagtgtcaatggaaagacgatcgatatgactgaagatcaccgggtagctagcgcaactgaaagagctaggatagcaagaactgggcagcccctgaaagatggggaagtccgtcttaatggactgaatcttgcgaggatgtttggagacaagtttcttaaggagcaagactcacgcttcagctcagaaccatatctgagccaagctgttcgtatcaccaaagcgtgcacagcttttgccgttattgctagtgacgggctttgggatgtcatcagcacgaaaagggcggtacagcttgttgttgagggaacggagaggtactctggtgacagcgcctcagcggctaaagtagccaaccgcgtgttggacgaagctaggagcttgcgaaccaaggacaacacatccttaatatttgtagattttgacattctgagaacagatcctt

SEQ ID NO: 32144 - DNA, 297 bp, Zea mays
  Peptide Sequence Number=SeqID_75519
atgcaggcggcatgcaaccacgccaagtgggcgcacttctccgacttccagcacgcccagcatggaggcccaggcccacgcgtcatgcaaccgacgcgccggatgcttcgtgcaagcaactgcaccgtcacttgcgccactaccgcgcctcctcgactgcggaaccgataccgcgactcgaggcgacccagcgcacgacccagcagcgccagcctggcgcgacgggaccgggaaagggggataccccgaaaaggatccttccccgtgaaggaaccaggctccgagcctccctactga

SEQ ID NO: 32145 - DNA, 129 bp, Zea mays
  Peptide Sequence Number=SeqID_75520
atgcggcttcatacccttagagagggaagtgttatacaacctattgtggttgttcgaggaaatgagatggtgcttgttgctcatcaaggggagtgggaagtagcagcacatccaacttcactctcataa

SEQ ID NO: 32146 - DNA, 1077 bp, Zea mays
  Peptide Sequence Number=SeqID_75521
atggccccctttgccccacccttggatccgcctctgcactcgggagtgcaacaggatcgtcagagcacccaccacccagcagagcccgcccagaggccgagccattgccacacagatcgtggtctcgtggcactagctagtaccaaagtgcgcgcgatgcttggtgtggtgggcacgctgccgcggcgccaccggcaggccatcgccagggtctccgtctccgcgctggtggcctcgctgccgctgctgtacgtgtcgctgctgcggccgccgccggccgccctggcgggggacaccgccttctggttcctcatgtccaactgcgtcatcgctgccatcgtcgccaccgccgacgacgccggcacgctcttcttcggctcctccaacgacgacgatgacgatcctcctcgtgacgaggagcgcgacgacgggcacgtctcttctccggttcctttcgcggcggtcaacgatgaagcagccgtggtggtgacgactatgaaaggccgaagcgtccaagaagaggtggtggccgacagcaaccccgtggaccttcttgacctgcagccgaaccatcatatgcttgtttcggcgcttgtgcggcagcgaggtgagcgacacgaggcggcgatggagcgaaacaccgacgacaagaacaacaccgccgtgatgatggtggtggaaggccaaggagaagaagaagtagtagaagtaggaggaggagaaatagctagcccggtcctgcaggcttccgacgacagagtgttagctgaaccgccagagacagagacagaaccatgggcgccaaagctcgtgacaagcaagagcctccccgaccaggaggaagcagccaatcaggagtggccgcgtgcaccggacgagctgccacgacacggcaagggcggcggcgggagactccggcggtcagccacggatgcgagcaagtcggcggcagaggagagggagagcgactactactggcaactgagcgacgaggagctgaacaggagggtggaggatttcatcgcgcggttcaacaggcagatgaggctgcagatcgagcaggaggcggcaatctga

SEQ ID NO: 32147 - DNA, 870 bp, Zea mays
  Peptide Sequence Number=SeqID_75522
atggacgggtcactggaccgattacgcagagataatgtttttggatgcgaaaccgtcggtgcaccatacctcacatacacccaatggttgaatgagtttgcccaacggtcgtatggtgtagcgccgacacagcaggtgtggcagaggtccggtgcaccattcggtggtgcaccgaaccatcctgatgtgtctggcaagctggcatcttgtttggaattgttaatgaaactacaggtgtggcagaggaccggtgcaccgttcggtggtgcaccggaccattctggtgtgtctggcaagttggcatctggtttggaattgttaatgaaaatgcgggtgtggcaaagggctggtgcaccgttcggtggtgcaccgggctattccggtgtgcctggcgagctggcatctggtttggaattgttaatgaaactgcatgtgtccgatgcaccgttcggtggtgcaccgaaccattccggtgtgcctggcaaactggcatctggtttggaattgttaatgaaactgcaggtgtggcagaggaccggtgcaccgttcggtggtgcaccgaaccattccggtgtatctggcaagttggcatctggtttggaattgttaatgaaactgcgggtgtggcagagggtcggtgcaccggactattccggtgtgcctggcaagctggcatctggtttggaattgttgatgaaactgcatgtgtccgatgcaccgttcggtggtgcaccaaaccattccggtgtgcgtggcaagctggcatctggtttggaattgttaatgaaattgcagtgtgctggcatcgagggcatcgcatgcgtaagcctgagactggctacaacggttcacttcacgctaatactgtag

SEQ ID NO: 32148 - DNA, 750 bp, Zea mays
  Peptide Sequence Number=SeqID_75523
atgaagctcctggagaagctggtgcaacaagctcgcctcagccatcccattagcagtagtctggtactcagcttcagcactggaacaggagactacaagttgacgcttgaaggaccaagagataaggttggtctcaagaaacaccgcatagccggacgtagaccgacaggtgtccgagcacctggtccagtcagcgtcgttgtagacaatcagctcatgggtggaggagtgccgaaagtggaggccgtagtcgacaataccctaaaggtaccgaaggatttgcttgaccgcgttgaagtgtggctcacgaggatcatgcatgtagagatagacctattggacaacatacgtgatgtcgagcatgatgaaggtgagatactgaagagcatcagcgagactgtagcaagcaataaggtcactaacaggggcactgtcgccagagagcttggcctgtactacccgattaatgcactttcggatacgggtcgaatacggaaatacaagtacccggtaaattcccgaatcactcgggtaggatacgggtacccgaccggctcagccaatccgagggcaatgcctataccacatgactgcaagatgttgcgcgtgagccactttataaggccgacccacccactcgcgcctccctacatcgccaaggtgggactaatcctcgtgagcgtgcgggctcaaggtgcggacaggcgggcgactgagtctgagcagcttcgcgtggagtgctccagctag

SEQ ID NO: 32149 - DNA, 1311 bp, Zea mays
  Peptide Sequence Number=SeqID_75524
atggacctgggaggcgccagggcccacctgcagtcacaaaggctctgggcagtgacctctgcggccgcctcctctcctctcccagtccgcccctcccgcctcgttctctccgccatcgtcgccgccgcctccattcctccaccagtccaccatcgccacctacgcccaaccaaacccaactccatctcttccgactataaacgcaacccaccaccgctgccgcgaacctctgcgctccgaataccccagacccccgatcctcccaatggccaccgcattttcgctgcgcgctgcggccccggccaccgctccccgcgccgtctcccgatccacctccgcggcgagggtcgtgcccatggcatcggcactggcgggacgcggaaggctggcaaaggcggatgtgccatcgagcacgtccgacggatgttggccattacggtggttcttacaaaggtgacaaaaggtttggctgatacgtttggtgaccttcgagttctggacacccctattgcggagaactcgtttactggcatgggagttggagcgggaatgaaagggctgaggcccgtcgttgaaggcatgaacatgggattcctgctccttgcttacaaccagatctcaaataactgtggcatgcttcattacacttccggcggccagttcaaaatcccacttgtgatccgtggccccggtggtgtgggtcgtcagcttggagcagagcactcgcagcgcctggaatcgtatttccagtccatcccaggcctgcagatggtcgcctgctcgactccttacaacgctaagggcctgatgaaagctgccatcaggagcgagaaccctgtggtgctgtttgagcacgtccttctgtacaacctgaaggagaaaatcccggacgaggagtacgtgctctgcttggaggaggccgagatggtgcggcctggggagcacgtgactatactcacatactcgcgcatgaggtaccacgtgatgcaggcagcgaagacgctggtgaacaaagggtacgatcccgaggtcatcgacatcaggtcgttgaagccgtttgatctgcacactattggcaactccatcaagaagacccaccgcgtgctgatcgtggaggagtgcatgcgcacgggtgggatcggcgccagccttaggtcggccatcgtcgacaatttctgggactaccttgacgcccccatcatgtgcctgtcatctcaggatgtgcctacgccatatgctgcgactctggaggatgcaaccgttgtgcagcctgcccagatcgtggctgcggtggaacaactatgtgcatag

SEQ ID NO: 32150 - DNA, 207 bp, Zea mays
  Peptide Sequence Number=SeqID_75525
atggcgaaggatgagttacggagtggaagcctttgtcttcgccgaagactccaatttcctttcaatacacctatgacttggtttgagatacacttgaaaaacatattagtcatagcatatgaaagagatatgatcaaagggtttgcctcatccaaagtaattgcgcgcaacaatggcctgcggcaatatactcggcttcggcggtag

SEQ ID NO: 32151 - DNA, 1203 bp, Zea mays
  Peptide Sequence Number=SeqID_75526
atggagcataccgtttccatgcgcatacgtcgtatgcgcgaagttcttcatattgttgatgatgcgatgttggaagcgttcaccgttgggcaagccactgcactaccaccggtgcatgagatccctgaacgccgtgtgcaagtgcaaaatgtgcacttctgcgttctccatggatggacagcggtggttccgctgccggtggtggagtgcggactcgccattgcatccccttcaccaccggtgccggtggttgacgtgggatcgtctgcatccgctcccatggacgtcgatttggaggcaccgccgcatcctccgcccactgcaacagcagttactcgtcgttcaccatctccgtcggcacccgtggtcgtcgggaccattgctgctcgtcgtggacagcccccgcgcgccgtcgatgctccgcgcggacgcatcatcctcactggccatcgccccaaatggggtggccccatcttcctcctccaatgggagggcctaatggccctcgatccggccgccacgacagccgtttggggggagggggtggggaagaggctcggcccctgcgcgggcagtggaggagcgcgctcagcgcggcgctgctcctcgacgtggagcagtggtcgggcggcggctcagcaaggcccgaggtcgggcctggcgcgacgtgtccggccgagcgcaggcgacggcaccggccggcggtgcgtggccgcggtggcctggccgagtcggccacaacctccccagcgcggatgggggagggcggctccactggcacgcgcgccatggcggccctcgacgctggctaggaccggcacggcgggcccgcgggcctcttcttccaaggcgcgacaggctccctggtggagccacgggcgcgcaggaaaggagccccggcggcggctggagctggccgctcccttctggcgcctcctcctggagggtgcgctgcacccaggagcgcgctcggctccgtggctcgacgaggcgcgcaagccaggcggcctcaggccaggcggcagctgggagctcctccccctggcgacggccaggaaagccctggtggtggtggcggctacaggggtggccagcctggctgggccggcgtgcaggccgccaggccgctgcctgttcggcatggcaggccgcctgggctgcttttcagagcccaaaatggtctacatttacccatttttttaa

SEQ ID NO: 32152 - DNA, 162 bp, Zea mays
  Peptide Sequence Number=SeqID_75527
atgcccttggtttccatgctgcactgcagagccctgcacctgatgcctggagccgcatgcatgactgtactgtctgcccgtgatccccacaatgatattgcgcgcattgctaggaatttcatcatcaagatgaacctcttcgtgaggcaaatcaccatcagg

SEQ ID NO: 32153 - DNA, 1416 bp, Zea mays
  Peptide Sequence Number=SeqID_75528
atggccgctccggcctcctcgtccaccgccgcacccgcgtcatcgccaccgcacaagcctccaaacaacgccggcagcaccatgctagagccacagtcaccgtcgccctaccccgacgccgcggcgcccgtggcttccagcgtcagctccgcgagctgctgcagcagcagcagcagcgggggcagcagccaagcggaccggtcgtcgacgttctccgtggactcgtcttcggccgcgacgccgtcgtcctcccccccgcgcccgcaccgcgcgagcgacgtggcgtgggcgcccatccggggccgggcgctcggcccgcgggacttcacgctcctccgccgcgtcggggccggggacatcggcaccgtctacctgtgccgtctcgagagccagagccaggcccccgaggggtccgcgtgcgagtacgccatgaaggtggtggaccggcgcgcgctcgccaagaaggggaagctggcgcgcgccgcggccgagaagcgcgtcctgcggcggctggaccacccgttcctgcccaccatgttcgcggacttcgacgccggcacggacctgtcgtgcatcgtgatggagttctgccggggcggcgacctccactccctccgccaccgcatgccgggccgccgcttcccgctcgcgtccgcgcggttctacggcgccgaggtgctcctggcgctggagtacctgcacatgatgggcatcgtgtaccgcgacctcaagccagagaacgtgctcatacgcggcgacggccacatcatgctcacggacttcgacctgtcgctggagtcgacggcgtcgccggctctggaggacgcgaggagcgtcgtgggcgacaaggacgacgacgtgccggagccggcaccgacctgcctcccgatcccggagctgcagctccttcggctgcggcggtggaagcgccgggccgcgccgcggccgcggttcgtggcggagcccgtggacgcgcggtccagctcgttcgtgggcacgcacgagtacgtggcgcccgaggtggcccgcgggggcgggcacggcgcggccgtggactggtgggcctacggcgtgttcctgtacgagctcatctacgggcgcaccccgttcgtcggggagagcaacgaggccacgctccgcaacatcgtgcggcggccgctggagttcccggccgccgcgaccgcgcacggggactccgccgcggcgcgggacctgatcgcgcggctcctggacaaggacccgcgcaccaggctcgggtcgaagcgcggcgccgccgacgtgaaggcgcacggcttcttcaagggcctgaacttcgcgctgctgcggtcgacgccgccgcccgtggtgccgccccccgccgccccgcaccggtgcgacaaggccgccgacgtgcagcagctgttcgatcacttctga

SEQ ID NO: 32154 - DNA, 315 bp, Zea mays
  Peptide Sequence Number=SeqID_75529
atggaagagcccgcgaacgccaaaggagcttttcgacatagcgaccagccatgcgtcggagaggacgcggtgggagccatcttcgatcgccacaagcgaaaggttgggcacaacgaaaagtcgaacgagggtgtcgaccgtcagtccagcgcaaaagggagaagaggccgacgacagcgagtacgacgtgtcgatggcagtggcaagccagatgggaagaaggcctcgaaccgagaaaaccatcgaccagttcgaaaaagctcctcgaagcccccatgtccgaaccatctgtgccaggtctcgacatgcttataa

SEQ ID NO: 32155 - DNA, 618 bp, Zea mays
  Peptide Sequence Number=SeqID_75530
atggcgcggaggaccaccagagagcccgccgccgccgtcgtcttgatgctgctcctggcggcggccacggcggcagcggcggcggaggaggaagcgttgccgatggaggcgtacttctcggcggcggagctcgcgcgcattgccgggtacggcgaggagccggtgtcgtcggtgtccgtgtccgggcaactcacctgcgagctctgcctccgccccggctcccccctcctcgccttggagatggcaggtgctaaggtagcagtgacctgcgactgcgagagccagcatcccattcccagcgacgaaccggacagcctcgcgctggtggccgcgacgacggacgagtccggcaacttcaccatcgacctccccgcgcggctccacgccacgccggacctggagaaggcctgcgccgtcaaggtgctccggctgccggcgggctccggctcctgccgcctccgccaccgcgccggcgacgcctaccgcctcaggctggcgtccgcggaggacggcgcccgggcctacactgccggggtgatacggcttcgggacggcgacacgccgtccgaccgttgcgtgggtgcgcgcggaggaccacgtgtctctgggagaaggtga

SEQ ID NO: 32156 - DNA, 870 bp, Zea mays
  Peptide Sequence Number=SeqID_75531
atggcttccacgctccagctgttgttttccattgccatcacagctttggcctttttcctccacccatgcgcatcgactgatgagttccaccgtgagctctacggttggtccaatggcatcgctacatggtatggcgcagctgatggcgctggaactgacggtggtgcgtgtggataccagaatgctgtggaccagccacctttctcatccatgattgccgctggctgctcttccatctacgactctggcaagggctgtggctcttgctatcaggctgtatgcaccggcaatgacgcttgctccggtaacccggtgactgtcgtcatcaccgacgagtgccccgattgcccgtgtcctgatgagcaggtccacttcgacatgagcgggacagcgttcggtgccttggcgaagcccgggcaggagagccagctgcgtggcgccggcgccatccaaatccagtatacccgggtgcagtgcgagtggcctggcgtggacgtgaccttctcggtggagccgggctcccaacccgaactacctggccgtgctgatcgaacgcagggcgggacgacggggcagtgggtgccgatgcagcagtcgtggggcgccgtgtggaagatcaactccggctccgtcctccagggccccttcaacatccgcctcaccttcagctctggcagggcgctcgtcgccagcaacgccatacctgcggggtggaacgccggcgtcgcgtaccggtctggcggcgtggctgtgacgagggccaggcccaggagcggtgcctgccggggctacgaggctgccgggacactggatggtttggtgcatcgtcacctcgtcgtgttgttgttactggtgttattgacgctgtga

SEQ ID NO: 32157 - DNA, 2457 bp, Zea mays
  Peptide Sequence Number=SeqID_75532
atgtcgtcctcttcttcttcctccgacaccacgccgccggccgccgcctcgtctgaggagacgttgagtagcgtgatggtggaggagttgcgcgccggcgactctgttgattttggtgtgtcacggatgacgtcagcccgcgttgaagatatgcagcggttgggctactttggcggcggatttgctcgtgctccggggacggaggaagtccccgagccggaggtggcagaggaagatgcagacgaaggggcccttcggtgcgccgccggtcagagcagtgggcgagatttggttgaagagtttgtggcgtatggggtgtggcccttggcgcacgtttgggtgctgggcgaagtgtgccctcgccagatgccttttcacggaggaagggttgtgcgaagccctgccttcgcactgaatctgcggaaccgcgacccggctgcttttgtgcgcgacgcggaggacggggccgtgcggctcgtggggcgttacgtgccgaggacggaaggccagcgcagctttgatatccgcgggtcaaatgaccgtctgaacagggtcttcgaattaaatcaattgccgtacgatggatatcctggtcaagacgaagccgaccgccgcgggaagaaaccggcggtggagacaggagacgaccctgcgccggcggccgcccctccctcgaaaaagagaaaattaggtactgcgatgggagggattggggtgtctgatagtttcgctagagatttaatgaggacgtgtgcggccccgggggaaaggatgtcttcgcccgagctccgggagtcttcggctcggatgctgagggttaccgggggttgctggcctagaaatgttcctatcccctgcgcggctgaggaggactgttttacatctcgcatggttcatcagtggagagtttttccttacgggcgaaatatcggtgctgttgtgtgggcagtgatggacaaggatcgccaaggggtggcgcagaagcgccaggcgactgtcaggattcacgaagctcggccgaaaaggcagcggggaaatgcgaaggctgcggcctccggcggaggcaagccgccgctggcggcaaaggcgggcgcctctgcgcctagcaaggcgccggaggcaacggcgggcgccggaggctccagaccgacgaaggtggtgccggcggccagcggagtggcggaggcttcgaaggcgacccgaacgtcgctgccgccgggcaaacgcgttgccgacttcggcaccgatattaatgtggacgattatcttggggggtcggacgagggccagcttgctatagttgcgcctgcagcggcgatcgcgacggctgcgcaagcgccgaaggcgaggggcgagatccttggcgccagaggcgaggtgccagccctcgcgttggtcagggacgaggagggcgcggcgacccgccggctgaagggagtgacggaggcgctgagtcaggcgacggaggcgctgagtcaggtggctgatttcaccagccgtactgcgtcgggggcccttacggcggctttgtctgccgaagtcgagagacttcggacgcaacacgctgacgctgtccgtgagaaatcagcctccgacagcaagtgccgcaatctgacagacaaggtggccgccctggagagggagaaagttgacctccggcgccaactggcggcggagaggagggaagccaacgaagccatcgccaaggaacaggctgcgcaggcggatgccaagctggcgcgggcggagggcaatcttgccaaggagctcgccgaacaactgcaagggcggctcaccgccctggagatccgcgcgaaggaggccgaggccgcgatgcgtgcggaggccgaacggacgcgcacgcagcttatggatacatatcgtgagcttgtgggcgcaggaggagctgctggaacttccaaccgttgtggggggtggatgtcgtacgcctccctggtcacctgcgagggggcgatgaacacgctctcccgcgaagggtgccggcacttcgaggccttcgaccaggtggatgaagattttgggcgagacatctataaggtcgaagaccccgtagtgaaggagtccgccggggccctttacgaccagatgtggggtctgtacggtcgtgaggtggtcagggagcgcgccgaggctgcgagggctcaggcggagcgcggcgagcgggtggacgacttcggggctctggacagcgcgctgccagacctggggtcgaccctcgcggaggctgtgactggggtcgccctggagccaaccccggagaccgcagcgatcgcgacggctgcccccccgcccgctgcgactggcgaaggcggcgctgacgcccccgcaaccgctgcgccgagtgctgaaggttccgcggcggaggccacggcggagcctacggcggagccaacggcagaggcttccgcagcgccagggccttcgcaggtggcgtag

SEQ ID NO: 32158 - DNA, 648 bp, Zea mays
  Peptide Sequence Number=SeqID_75533
atgcccgtgtcccctgctcgcgcccgcgcctataaagcctccttaggcgtcgaccgtactcctccacgcacgctcgacctcaccggagccagagatcaccggcggttgccctgcaaacagcgtgcccgcggccacccgatcccccgccaccgtagaccggcctgcagagcccttcccagccacgcccgaccctcagaagagaccgtgcatgcctcggtgaagctccccgagcaaggaatcggactttgcctcgccggagaagccggtccagggtcgccggacttcacccgaccgccagtgaacgtggactggattgtcgtggttaagccagaacacccgccgccgacgagatcacccgcctgcgcacgtggaccggtcgattccggccaccactgccgtcgagccgtaccccgctgtgaccgccaagacctctcgaagccaaccccgcccctcgtcggacctctctcaccgccgcatacatattcttattcattgcattcgatagattgcaacctcgctgacggagagtacgtcctcgtgccggagcaaggagttgctcaggaggtagccccggatccagcaccagagcctgcccctgaggatctgcctgccccagctttggaaggcaagccctggttttatgcataa

SEQ ID NO: 32159 - DNA, 774 bp, Zea mays
  Peptide Sequence Number=SeqID_75534
atggggagaagcaagccgggctgcgatcttggtcccaccctcagcttcaaggatgttcatcatcctcgctggggtggaggccgggctgagccggagctctacctcccgcgcgggttcgtgggtcaccctctcctgcggcgttcgagggagagggcgcttgctggccctgcgggcgggtcggacttcgacaacgcggagctggtcgacggcgggcgtcgtcagccccagcgtgtcgagatcgtcggcttggctcccggtggcccctcctgccggaaggcggctgccgcgccgtgtgcacgggaggaccgcccaagatgtcgagcgctgctagggcggcgttcgtgttctggggcggtcctgcctttgcaccggaccgacgccggagttgaccagctgaagcctcgggtcgggctgacgtccttagaggacggctggccgaggccccgggaacctcggaccgcgtcgccgtccgaggctaggtcggacctcgccgaaggtgtcgttgatgccgagggtgctgctgccccttccagcgtcaagacccgagcctgcaggatcggattgtcttgtagcgtggatgtttgtgcgagcgagagctgcttctcgcggaaggtgatgagtgagaaggtgatgagtgagccgaagcaccgggtcgcccacctggaggtctcgggaccggacccctcgggtgtggtagcgtcgcagggactgctggccctcgtcctcggggagccgtattccaggtctgtgggcaagacggcctcggccccgtag

SEQ ID NO: 32160 - DNA, 162 bp, Zea mays
  Peptide Sequence Number=SeqID_75535
atggcgcccaagaggaagaccgcgaactcgtctgctgcagtgatccctgccatcgaccccaacagccagttacccttcgcagaacattcagccgctgaaggacagggcctatccggcatatctttaccgagggctggccgactcaacccgagttaccaatag

SEQ ID NO: 32161 - DNA, 438 bp, Zea mays
  Peptide Sequence Number=SeqID_75536
atgggcaagaacaacaagcgcaagcgtgagccgactcctccatcggaggagtttggtgactcggaatactcggaggaggagttctccttcgagcccgaggggtctccggctcccgcctctcccccggcgtcgtccgatgattcggacgactcccaggggatagccgcggaggtctggacatacatccgggccgtcgagcgcgccgggctcgagggctcggatgagtcggagtactcctcggatgaggaggactcggacggcggcgacgagggtgaagacgacgacgacgacgacgacgacggcgacggcagcggcaggggcggcggcgacggcagcagggacagcatcaagggcgacagcagcaggggcagcaccaagggcagcagcaggggcagcaccaagggcggcggcggcggcaggggcagggccagtggctag

SEQ ID NO: 32162 - DNA, 266 bp, Zea mays
  Peptide Sequence Number=SeqID_75537
atggagtacagaaagagggtggatgctctagtgtttttctcgttacttctcctcggatactttgctgctcatgcacatgggaagtccgtccgaacaactacagctcctgtggttacagggcagccgaacaagtcgttggtgcaaggtcggagcagtggcacactgatgctcaaggtggttccagagggtgctccaagccaagaaacatcccagaaagggaaggaggtggctccgaacgagggtggatcaagcgaggatcgcaagag

SEQ ID NO: 32163 - DNA, 180 bp, Zea mays
  Peptide Sequence Number=SeqID_75538
atggagtcggtggcacacccgaaagcctgcttgagtcggcgcgccaggttgaaccaggttgcaggggtgaacattaagaaggctccaattgccaatttgggtgaaactgttagggccaaactccaacaattgtctatgatgaacaagttcaaaaagcatgggctccacaagggagtttga

SEQ ID NO: 32164 - DNA, 405 bp, Zea mays
  Peptide Sequence Number=SeqID_75539
atggggtcgtgctcctccaacagcagcaagaagaaggcaacacaggtgcaccccatctgggggctcggaaggtggaagagcgcgatgaatgcgaagaggaccgggaaaggggatattccgaaagggatccttcccagcgaaggaaacgggccccgagccctcctactgatcaggggttcgaaggttgcgccctccggggttcggcaaccgccccagagcactcgggctctgtgccctttactgatcaggggtttgaaggctggcccctcggaagggttcgacaggcgccccagagcacgcagagtcagggatgaccctgggtacgttcgttacatggctgaggctcgggctacgctctcgaggtaccctaggacattttcgagaccagcgggaacgattttgtaa

SEQ ID NO: 32165 - DNA, 1872 bp, Zea mays
  Peptide Sequence Number=SeqID_75540
atggatttttctttatgtggacaaaaggggactacaagattgattttgatggattatgacaagtctagaagaagtaactccaaaaagaggagacattccaattctgatgacggaaagaggaaacggttgagctctaggcatgatgacacatctatgtcctctgagccaattgaaaccatctacaggatattgtgcccggcaaaaaagataggcagtgtcttgggaagaggtggtgacattgttaaggcccttagagaggaaactaaagccaagataagggttgccgattccattcctggtgcagatgagagagtaattatcatcttcaattaccaaaatcaacctgaacttactgatgaagcagctgaaaaacaaattagtgatggcttagggaacatgaaaccccattgctttgcccaagatgccttattgaagatacatgataagattgtggctgatgaaatttatgatgaagtcgctcatgatgaaagttctgatgatgtcactgctcgaattttggttcaaggcaatcaagttggctgccttctaggaaaaggtggctccattatacaacaactacgaagtgatactggtgctgggatccgtgtcttgtcatctgaaaaccttccccagtgtgcacttcaaagtgatgaactggtgcagttattgggaaaagtgggggctaatgttaggcgggtagagcagcagactggtgctcgcattaaagttcaagagattgacaaagatgcttctggagaaaggctgatcattgtttcatctaacgagataccaactgaaccaatatccccaacaattgaggcactcattttgctccacgataaagttgcagggcctccagctattgcaagaggagccctcacagagattgcttcgaggcttagaactaggactttgagagatacaagtactgccaataatcctccaccttttgccccttccgatgatcctactgtcgatatgcctagcagaaaattaacactatatggagggcctaccaatgatacaccgtatggaaggcctgccaatgatccactgtatggaaggcctgccattgatccaccatttggaagacctaccaacgatcgaccatacggaaggcctgccatcgttccaccatttggaagacctaccaatgatccaccatatggaaggcctgccaatgatccaccatatgaaaggcctaccaatgatccaccatatggacgaccttccagtactatagcatatggaagaccaaacagaagtgcacctcgtgatccttcagatgcatatcctgtagactacttctctaaaagagaacatcctagtggaggccctatgtttactagtaatgccccatcagctgcttatgagagatatgcagcacccacacactttcctactagagaacctccctcaactttcagtcatcgttcctatcgtgaccacatgcctactgatagctactctagtaggggtacacagaaattagacatcacgagagatggaaattcagatgcttatgattatacagaggctgctggacaaattcatggactggaggactatagaggactgccaagtgcttctggaaggttctcgagcactattgaactaaggattccaaatagttctttggagtctattgttggtgttggcggggtcaatttagcagagatacgtcagatttctggtgcaagactgaggctacatgaggctcatgctggttcttctgagtctgtggtggagatccagggcacactggaccaagcaaaagctgcgcagagcctcctggagggctttatcagcgcgaacagcaggcagcagcaatcccattcttctcgcatgccactttacccaagatggggatag

SEQ ID NO: 32166 - DNA, 459 bp, Zea mays
  Peptide Sequence Number=SeqID_75541
atggcgcaccggacagtccgcggagcggacatccaaagctggcgagttcagagtcgctctcccctggggcaccggacactgtccggtggtataccggacagtccggtgaattatagcgaagcgtctctgagaattcccgaaggtgaagagttgggcgtcgagttccctggtgcaccggacagtccgcccaaggtcgggcgaggcggtgactcctccgaggtcgaggctaagtccgagccctggggtcgggcgaggcagagaccgtctttcgaggtcgaggttgagtccgagccctggggtcaggcgaggcggagtctgtcgtccgaggtcgaggctgagtccgagccctggggtcgggcgaggcggagaccgtcttccgaggtcgaggctgagtccgagccctggggtcgggcgaggcggagaccgtctttcgaggtcgagattgagtccgagccctag

SEQ ID NO: 32167 - DNA, 2427 bp, Zea mays
  Peptide Sequence Number=SeqID_75542
atggcgtcggcggcggggtcctcgaacgtgatgctcgcgatcaacgagaagaaaacgatcaccactgacctctaccgcccgctgcgcctctacatcgcctccacctactcggaacgcgaggccgctgcggccgacgacgaccttagcgtggtgtgcgacctccgcgctgctgtcgagaagccctccctcccggacccgtcctccctcgagcagcgccgcgacgcgctcctcgcctacgcgcgggctctggcactcgtggagccccgcttccccatctcccccgatcgcgcccacgtccactccctcaccttcacctggcacgacgcattcaaggggaacaagaagtgcgccctcgcctccatccacctcgagaaggcatccgtgctctttaacctcggcgccgtctactcccagatcgcgctcgccgcggaccgctcgactgacgtcgggatcaggatcgcgtgcggcgccttccagagtgcggcgggggcgttcgcgtggctcagggagagcggggccgcggcgaaggctgtcgctgcggggaccaccaccgtggacatcacgcccgagtgcgccggcatgctggagaaactcatgctcgcgcaggcgcaagaatgcttcttcgagaaggttataggtggagggaagccacccgcgctgtgctccaaggtggcgcggcaggttggcatactctatgaagaagcatacacagctctcagtgcatctcctctaagtcagcactttgataagacatgggtgtcccatgtccagcttaaagctgctcaattctacgccgatgcttgctacaggtattcactggatcttcatgagaaagaagaaattgctgaggaaattgcacgtttaaagattggtatgagtgccttggcagatgctaagaagactacgaagggagttgctgcccaacttctggattccgtcaacaagctggaaagtaacatgaaaaccaacttggaaagggctatgaaggagaatgatcgtgtttacttgatgcgggttccagctgctggttccttgggtgccctccctgcagcgtcccttgtaaaacctacctctttggctgaagttttagatgccagcaaggaaaggcttttttcatcacttgtgcctgatggcagcatgaaagcactttctaagtacacagagatggtagataatagtatccggacccaggctgagaaattgcagcaagctagtgagatcactagagtcaggctgaaggaaatggacttaccagattctattctttcattggaaggaaatataaccttgcccatggatctgaaggaagacgtagaggctgtgcagataagcggtggccctgctggcttagaatctgagttgcagcaacttagggatttgagcagggtcaatcaggaactacttgtccagactgaagagcttctacagaaggaggcgaatgaagacgctcaaatttcgcctatcatgtccttggatggaaatgaagatgccattgttggagccctgaaacaaagcttgagacaactggagtctcttggcgcacaaagggcaggtcttgaagacatgctcaaagaaatgaaaagaaagtgcattgagaagatccattttggccaggatgatatattgcctaagttgatggttggcgtgggatcacatgatgatcttttcaagaaggagattgctaagtatgatcctatatgtgctgatattgctgataacattgtggcacaggaacaattgttgctacaaatacaggcacaaaacgagcaatttgctgctgtattcaacctagaggattacaaagctgcccgtgagagatgttacaagcaaatcgctgctgctgttgtgaaataccaggagtttaaaaagaacatcaacgagggcctaaacttttatgtgactttacaggaagcaattggcaaaataaaacagcagtgcagcgacttcataatgacccgaaacattcagtgccgtgaaatgatggaagatgtgcagaggaagctacccggcttcagattctcgtcgtccagccgctcctctatgcagaggaatgctgcttctgtgccacctgacgagagcagcccatcaccgccaccgccgcatgcccaggctccctatgcctctccaccaggggtagactcgaggcatggatattctcaaccggaggcaagacctgcatactcgcagccataccccccatcctatggggcgacaccgcaacagccgacgtatggtgcacaacaccccgggcagtaccagccgcctcctggccatgactgcggtcagccggcatatcctggatggcgcgggccatacccatactacaatgccccccagccgcagcaatctgtgccttgtccacaggcgccgtacaatgccactggggcttaccctccgcaccagagcaactattaccgacctcaataa

SEQ ID NO: 32168 - DNA, 324 bp, Zea mays
  Peptide Sequence Number=SeqID_75543
atggtcgttgtaagtgtcgtcgctaaaggctttagcgaccgacatctttttagcgaccgaccgtccgttgctaatattgtatatttagcgaccaaccgtgggttcctgtactatagatttagcaaccaaccctgctctagagctgatcattcacaaaagcaccaaagctacactaatgcttcaagcagttcaaaagccttaagacaaccactccagcttcttgtatcctcctatcttaaggaagttgctatatcctacttgtcatggggaaaagaatgcacttacatttccaattctgacagaaccttggagccaagggagtga

SEQ ID NO: 32169 - DNA, 576 bp, Zea mays
  Peptide Sequence Number=SeqID_75544
atgtcgttcctcgtcccggacaagaacggtgcgggttctctttggtacctaccttctgtttgcttgtgctctacaacggttctgactcttccgtttcaccatgctcggctcgtcttcctcctaggggttctcgctgatgtggtgctcggattcgactcgctggatccgtaccagtcaacttgtgcatcccgattcgagagaaaaggctacaagcttgttgccatcaagctgattgtcccatccaaaggattcgctgagaagcattaccatgatctcaaggaaaggcctttcttcaacgggttgtgtgacttcctcagctctggccttgtacttgcaatggttttggaaggagagggtgtcatcaagtatgggagaaaactaattggtgccacagacccacataaatctgaaccaggaaccatcaggagcgatcttggcgttgttgtgggaagaaacatcattcatggaagtgatggcccggagacagcaaaggatgagatcgccttgtggtttgaacccaaggagctggtctcttataccagcaatgcggagaagtgggtctatggggtgaattaa

SEQ ID NO: 32170 - DNA, 483 bp, Zea mays
  Peptide Sequence Number=SeqID_75545
atggagatacatggtcatctgagctcgacattctttgtaaagctgagccacgaattatcacaacattcaagagtgcggcaggctaccattggtggtgtaaccatagatgggcttcttgcaccagcagctcgattctcgattgggcttgcatttgtgctgatagaatttttcaccactcaatgtgctcctgatattcacgtagttacaaggcttgagtgcggagctgtggctggaaccattggccagactgttgcataccctcttgatgtcatcagtagaagaatgcatatggttggatggagccatgctgactctattgttattgggcaagtcaaagaagcactccagtacaatggcatgatcgatgcattcaggaagactgttcgccacagagttggtgctctatacaagggtcttgtgccgaactcagtcaaggtggtgcccttaatttccattgcatttgtgacttacgaggttgtgtaa

SEQ ID NO: 32171 - DNA, 327 bp, Zea mays
  Peptide Sequence Number=SeqID_75546
atggttgcaactcatttacatccactgtcatgtgggagtgggaccaagtctaccagcaatatctcacggcatggcgtcgcgcctatgaacaaggcttgcctaccaggtcgctatgggtcattctggaaggagcttgatggtgtcaagcaggtatggaagaacaggaaggacctcacagtgaggaccttgggattgcgactttattcgagggatcagagaggtgcggacttattggttcatcagcgaggtcttgccgaccctacgaacaatgagacacaacaggggtcagtgaggaagcttccccacctgtcggtgacagaagagtag

SEQ ID NO: 32172 - DNA, 870 bp, Zea mays
  Peptide Sequence Number=SeqID_75547
atgagcgtggtcggcttcgacgtcagcaacgacaccctggtggcggtggcggcgtggcagtggggcattgatgtgctcctcaacaccgagtccaagcgcgagtcacctgccgccgtcgccttctcccacaacgcgcgcctcatcggctgccacgccgcgtccgcctcatctgcccacgcccccttctccagcgtcaaacgcctcctcctgggcgccacggggaggaacccagactcctccctcttccgcgacctcccccgcctccctttctccgtttccgatgccgccggtggtggcgccgtcgtccacgttgaccacattggccgcatcgcgctctctccaacccatctcttctccatgctgctcgcctacctcaagcagctcacggatgccaacctcggcagcacccccgtcgccgactgcgtgatctccgtgccctgctacttcactcaagcgcaacgccgcgcctacctcgacgccgccgccatcgtggggctccggctggccaagccctcgctgccggccacatggctgctgctgcacgcgctcttctgcgctacctccatggtcgttggcttccgcttctcccgcctcatcgtcttcctcctcttcctgcccaccccgcccatcaaccccgccgagcacctcgtcttgctcgtgtcctcacccgatctgatccaccacatcgtcttcgtcggccgccacccgatccgcgtccgcgcctggccacacggagaccccagcgagctcctcaaagcgcactgcatcctcgctgccgtccagaacgtgcaacacagcaccaagcgtcgtggcacgagacccgtgaggcacgtcattgccgtcaccccgaccaccacctccgcgctctag

SEQ ID NO: 32173 - DNA, 390 bp, Zea mays
  Peptide Sequence Number=SeqID_75548
atggccagcaggctggagtggtccggcttcgtggtgaacgtgtgggcactgtgggaggacgccaaggagcggccggtgtgggtgtgcaatctcagcgccaccgacgacaccgacccccgcgccgccagccccctcccgctcgtcaccgacgccggccgcgttgagccgctcgccagctgcgcccaggcgactctcatgtggtcctcgctacgttccgacagtgaggtcaaattcccacatgagtataatggcggcacaagctcatgttcgggggagggagggggcacctcgagagcggggcagttgcgcgatggcttcggggcgcaatggtttcggggctggtgggtaggatcgaggagtgggactgttgtgtgggatcagatggtttag

SEQ ID NO: 32174 - DNA, 258 bp, Zea mays
  Peptide Sequence Number=SeqID_75549
atggtggacggcggagcaagatctccggcgagctcataccagccgaataacttagctaccggtgctctggtgcggttgacaccaaatttgatccctcctaactatttcccctccatcaattctagagttcgagctcttaatcatactgcccatggtgacagcgcgaggaatggaccgaccaagatgttcccgatgatccaatggattctagctcaattggatgggtcagagagtatcaagagcacctacgaatactga

SEQ ID NO: 32175 - DNA, 144 bp, Zea mays
  Peptide Sequence Number=SeqID_75550
atggctgaagctatcatggatcaagttgttaatcaactcctgaacgaagctgcggaagttgtacttagggaagacggtattcgcgttgacttttcgcgcttcgccttttacttaggcggtatcagcgtttatttttcgctgtaa

SEQ ID NO: 32176 - DNA, 837 bp, Zea mays
  Peptide Sequence Number=SeqID_75551
atgacttctcacggatcctcggacgaagggaatgcacagtcccacactgacggacttgcacgagagggtttcccccgtattttgtgggaggtacttcagggagctggttacacgacgcctcctcagtacgcggtgcagttgtttgagaagcaccgagtgccccgctgtaggccaggctggcgttcgctggactctgagtcctttggataccgggctgaggatactatcgaggcgattgctcttcacggactgaccaccttctgcggattccaccccttggagctttccactcaccccattggcttgttccccgctgagaaggaggacgacccaatgtggaaggaccgagtggagcatgccaaggatatctgggctatctacccaagtcagactgctcacttaacggtgcggtgcatgaatgccctgtatcgtctgcaattgatgcgtggtgaggcaatgtcccatctgatggcattgttggaggctaccaagatcactttggataacagagaggaacttgtggttgacttgtccactgagatggtggaaaaggacttacaagtggagcaactgtcaaatgagatccaagagcttgaggaactagtgggaacgagggagaacaccatcgaggttctcgagtatcagttgatcaacacccagcaacagcttgtagaggctaaccagcacctggatatgcaccaccaggagatccaagacatggaggccaacgaggatgtcgacatcgagggaggagaggagcctgcctccagtttggacactgctggctcagggagaccaccttcccccgagtcgagtgttgcctcgtttgctcactag

SEQ ID NO: 32177 - DNA, 393 bp, Zea mays
  Peptide Sequence Number=SeqID_75552
atgggggctcacatacaagagatagccctagatgccaggaggaggcctgcgccggatttttgccaagattcgcacgcttgcgatctcggcgagctgttgaacacgggcagaagaacacttccacgtgttcgacgcgctctgagcacgcccgcgcccgaccccgcgtgccccgcgccgcaccgagccgagccgtgcccgtgtcccctgcccgcgcccgtgcctataaagcctcctcaggcgtcgaccacactcctccgcgcatgctcgacctcaccggagccagaaaccaccggcgtttgccctgcagacagcgtgcccgcagccacccgatcccccgccaccgtagaccggcctgcagagcccttcccagccatgcccgaccctcggaagtga

SEQ ID NO: 32178 - DNA, 708 bp, Zea mays
  Peptide Sequence Number=SeqID_75553
atggtcttgggtcctttcacaaatgatcttgggtcctttcacattagaaacaaggaccttgggtacccacacacaagtcttggagcccttgtttttgcccccaacatatttggcaactacttttgcctggtttgttatcggcaaggtcgaagtgaccgcagtcacttcgccctttcactgaccgacctgactggaaaacagcgccgctcgccctactccgactgttgtgccacccaccagggtgaggctgacaacagccaagttcagcctcggtcgcaacaggaagctccacctcgcccgaccttaggcctcggcctcggaaggatgtctccgcctcgctcgaccccagggctcggcctcaacctcggccttggaaggaggtctccgcctcgcccgaccccagggctcggcctcaacctcggcctcgagaggaaatcgcgtcctcgcccgaccccggcctcaggagaagtctccgcctcacccgaccttgggctcggaccaaccgcgccacgggggatacatcattaccctacccctagcttagctcagactacgagggaacaagaccggcgtcccatctggctcgcccgggtaacaagtaatgatggctccccacgtgcgaccatgacgacggtggttctcagccccctacggaagctaggagacatcagcaggatcccagcatcaccgacagctgtgcttctatag

SEQ ID NO: 32179 - DNA, 1128 bp, Zea mays
  Peptide Sequence Number=SeqID_75554
atggggagcacccgtgttgccttcgtcttgctgctgttggaggagcgcgacctcgcgggggtcctccctgcgctgtcggctgcacaacacatcatacgccgtgagggcggtactcgtgttctgggacgatcccgttctcgttcttgtggtgagaacgggagtgaggacctgccagtgcgctttggggcgaccgccgcttgctggtgcggtgttggtgggcaggtggctgatgtcgtcggtgctgaggtggtggtcgccataggtgaggctgcttctgctgaagcggttgcctccgctgatgagaccgtcagtgccacctgcgctccaggcctccagctctttggctttaatggctggttctcgtcccccgtgaggggacgtgaacgagggccttccagcggtagcgtttggcctgggccatcgctgctgctatctagccacctgagacggaggtcgttgccgcgctgctggtgcagcggtcgccggcgagccacctggagtttgttgtcccgcaagccctctggtgtggaggttgttcatacccgcgggagtggaaccgaagtcgggtttgtaatgaaccttcggccgctctgcgatgagctggagccggaggcagcgcagcggcgactggagcttggccaggtcatccgcgagcgggaccaacctcgaagtcacgctgccgaggccatgagctgggctgaggtccccgggggacagctggctgaggctacggaggggccaaccgaggtgtctgctcgggccggggccccggcggagatccgggctatgagggcccaagcacggtgctggcgtcctccttcgaggtggagatccttccgcccgtgtcgccatccgaggccgggccagattccaccgaaggtggaaacgacgtcgagggtgctgctgctccgtctgccgatgtctgaacctgcaggaacagtttgtctgtatcgtgaaggcatgaaagtcgttctggcagaaaagtttttgagcgttaggactcgttcgatagtagaatcgcttatccgagcgaccctgctatcgaagcagtcgaaaagtgcgaaagacgttctggcaaaagacttttccgaggaaaattttgacgcagagggggttccccccttctag

SEQ ID NO: 32180 - DNA, 450 bp, Zea mays
  Peptide Sequence Number=SeqID_75555
atgaccattggtgagggaatgcagccgggctgcatgatgaaaatccttgaagctgagcgatggctgaagggcgccaacccccgcgaggtcgcgctcctccaacagcagcaagacgaaggcaacacgggtgctccccatccgggggctcggaagggcaagcgacacctttggcaggtgaagcgggcgtcatttcacctctgccatgatgaccgcgtcaaaaaagggactgagaaaggggatatttcgaaagggatccttctccgcgaaggaagtgggccccgagccctcctactgatcaggggttcgaaggctggcccctcggaagggttcgacagccaccccagatcactcgggctccaagccctcctactgatcaggggtttgaaggctggcccctcggaagggttcgacaaccgccctagagcgcccgggctccgcgcccactactga

SEQ ID NO: 32181 - DNA, 216 bp, Zea mays
  Peptide Sequence Number=SeqID_75556
atggggatcaaggaatacctcaataaaggtcctcagtgtgcaaggctaagtagacaaaaacgaacaaaagcagctaaaacaaatcagggttcacagcatgagtgtttgctgcagctagctgcagctgccactccaacttctaagctgcaaatactgtataagaagcctgctgcatctgctgcggctgtgcttctagctgcagtgaacatgccttag

SEQ ID NO: 32182 - DNA, 432 bp, Zea mays
  Peptide Sequence Number=SeqID_75557
atgaggtgcatgagcaaaaggagccctcatttggtgacaactggtgctctcatggccattcagtctcaaggtggaaaagggaagatgagcaagaaatggagcaatcaggacttgggtacctcccaacaagaaaaggttaggataaaggatcaggcacaagtgtggagaagctcccgagagattaaaccttcaagatggaaagtacaccacaacagggtaaaggtgctgaatgcaaagttaacagggttcaacacaagtaaacagacaactgatcaaaccaaggatggaagcaagaagagcttcgaggtaccgagtgcacgggagaaagtcaaggagaccaggaacccaaagctaggggtgaagaaggagacttgcggaatcagggttgatcgagttaagaagagttatggtgcatcaaggaacactacataa

SEQ ID NO: 32183 - DNA, 222 bp, Zea mays
  Peptide Sequence Number=SeqID_75558
atggcgagatccagtgttaccgtgcgagaatccgagactgagagggaggaggaggacaggtccacagaggcgtcggagcggagacggagagacgagatcgcgagagcagcggagaggagcggccgagcgggagttgcacggcgccatcccttgccagttgcccagcaggcaccatggattggactggacggcagtggaaacggacaagaaggctttttttag

SEQ ID NO: 32184 - DNA, 1830 bp, Zea mays
  Peptide Sequence Number=SeqID_75559
atggtgttcgacgcgagcggcagcaggtcggcggcggcggcgtcggggaaccctctccgcgtgatcctgacgcgcgggttcgcgcggcaggtgctcgcggggcggtggttgacggtgttcgcgagcctgctcatcatggcgtcgtccggcgcgacgtacatcttcgggagctactccggcacgctcaagtcgtcgctcgggtacgaccagcgcacgctcaacaccgtgtccttcttcaaggacctcggcgccaacctgggcgtcttctcggggctcatcaacgaggtgaccccgccgtgggtggtgctggccatgggcgccgccatgaacctgtccgggtacctcatggtgtacctggccgtgtccgggcgcaccgcgccgccgccgctgtggctcgtgtgcctctacttcttcgtgggcgccaactcgcagtcgttcgccaacaccggcgcgctggtgacctgcgtcaagaacttccccgacagccgcggggtggtgctcggcatcctcaagggcttcgtcggcctcagcggcgccgtgtacacgcagctgtacctggccctgtacggcggcgacgacgccgagtcgctgatcctcctcgtcgcctggctccccgcggcggtgtccgtcgtgttcgtccacaccatccggtacatgccgtacccgcgccgccgtggcggcggcaggcaggagacgagctccgactccgaccccttcttctgcttcctctacctctccatcgcgctggcgtgcttcctcctcgtcatgatcgtggtgcagaagcaggtgcccttctcccgcgccgcgtacggcgtggccgccacgccgctgctcatcctcctcctcatgcccctcggcgtcgtcgtcaagcaggagtacaagatctaccgggagcgccagctcgacgcggccgacccgccgccgccgaccatcatctccgcgtcggcaacggacgccagcaagaaaacagagcagcagccggcgccggcgccgccgccgacgacgtcgtcgttctgtgggtgcgtgaggaccatgttccgtccgccggctcgtggggaggactacacgatcctgcaggcgctggtgagcgtggacatgctggtgctgttcgtggcgacaatctgcggcgtgggcgggacgctgacggcgatcgacaacatggggcagatcggcgagtcgctgggctaccccgccaggagcgtcaacacgttcgtgtccctgatcagcatctggaactacgcggggcgcgtgacggcgggctacgcctcggaggcggcgctggcccggtaccgcgtgccgcggccgctgctgctgacgtgcgtgctggcgctggcgtgcgcggggcacgtgctgatcgcgctgggcgcgccgcggtccctgtacgcggcgtcggtggtcgtcgggttctgcttcggcgcgcagtggccgctggtgttcgccatcatctcggaggtgttcgggctcaagtactactccacgctctacaacttgggcggcatggccagccccgtgggctcctacatcctgaacgtgcgcgtggcggggcggctctacgacgcggcggccgcgcagcagcgcggccgcggcaggatctgcctcggggtggagtgctaccggcggtcgttcctgatcgtcacggcggccacggtggtcggcgcgctggtgtcgctggtgctggtgtggcggacgtggacgttctacaggggcgacatatacgcgaggttccgggacggagacgagggcccggggcgggacgggcgcctgccggtcgaccagaaacgggaggaggaggagagggagaaggcggcggccaacggcaggaaggcgtga

SEQ ID NO: 32185 - DNA, 762 bp, Zea mays
  Peptide Sequence Number=SeqID_75560
atggaacagagagcaaaaggtcttcgtgtctggagggacacgaacagacttgcatctaggctatataattttaagcgtgacactgaaccattggtgtcgttatcagaagaacagtcaaatgacttgacagacggcgataagaaccaagaagccaattgtagtaatgtggatgatatgtatcatggcctcactgtcaactctgagattgattctctgcctgatcctaaagaccagggtctgaacaaagaattcagctataacaagaacctcatcgatctaaagaaggaattctgctgcaatggtactgtagttcaggacccagagctaggcccggccattcagctccaaagtgaccagcgcaagaacggcctcattaagttctccaatttcaagggagaagtctcaaggtttggaccccaatatgcgaggcccaagctgaaaagatcacatctgttcagggaatgcttcaaagattctgaacactatttaacctaccaagtgcaatccgtgggaacattagaaaaggagaatatgatcttgctgtcagagagtaccaaaaagcaaagtcaattgttcttccttctcatgcttctcattcttatccgcatggcctgtaactgctgcacagcgagctatggctggcgtagcggcaacaactgctggtatgaccaggatccgtccaccctcattagcgacgatgaagcgacacccaattctaggcgtggacgtacgatggcgccctcgcgcgggatatcgggctaa

SEQ ID NO: 32186 - DNA, 567 bp, Zea mays
  Peptide Sequence Number=SeqID_75561
atggcaatggcaacggcgaagcaaccggaccaatacatggatatggatgtgccagacactctaaatgtggaggcctccgagagtgcgctatccgcgctactcctccaccagccgccgcgaggaaacttccgcctcctcctaccccgcgctggcaactgcatctcccggggccgacccctcgatccggcgtgcttcgccgctggcatcgaggcaggtgggcgagaagtgggcgtgcggtggcgggtctggcggcgtagacctggcaccatttccaaccgacgacgcgtgacccaccgcaatcgaagttccaagcgaggttcccccagctcgtcgccggagagtcgccatcggcaaacgacttcgtcgtccgccgacttcgtccaaggctaccgacaaaaggaagagaagctcatcgccgccgtcgtcttcctcttcgattcgctccaccgagccagatccgcgaagaccgagcctttcaactcacctttggtggacgaattgagccgagcactagttgagatcgacgacctcgccaaggatcttgaagacgtagcagtgcaaacttag

SEQ ID NO: 32187 - DNA, 1020 bp, Zea mays
  Peptide Sequence Number=SeqID_75562
atggggacgtattcttggctaaggtacctcacccagggggccaccaccatcgtctttagaaaccttagcgggttgcttcgtattaagttggtagtcgaggaagttccggtggatctccctcacatccgagtggagaatggagtcatcctagaggacagcttggaggaacagctgctgaagcccacctcgttggcagagtcactggccttcgcagctaggtcatcgacatcggcaccacctgcatcagccgtccaagcacctgcacccggaggcgacgaccctgacgactctggggatgacgatgacgaggatgacgacgacgacgaaggaggagacgaacacgtcaacgaagaagccgactatgcccagcaggactacttcatggggtttggtcctgttgtcgaacattacacatcaatgttcgagacggggcacttccccaacctgctgcaagaagtgctgcacgcgctaggaacctatgtccgccccctgtacgaaacaaggcgagtgagcgagcctccccgggcttgctactacatcactcgcatccacgccagggcgatggatgcaggggacaggggattcaggactctgtctgctcacgagtccctgacaccactgtccacctacgctgtctcggtcagcgatgctgcctgtcggaccttgtggtcgcgtagccacacctaccggcagcagctgcagaacacgaggttcaggcatcttcctcagcgtttgagtggaggaagtcagaccagcatcatcccaggtgaagctggtgaggatcacctcaacaccctagctggtgtagtggccggtctcaacaccgacctggacagtgtcaccctggatctctctagggtgcacttggagctggaaaatgcccatgccaggattgcagccctggaagcccaacttcaaggactggatctgcccgaagcccaggtccccgccatggcgttgtctcctccccgcaagaggctacgctatggggagcccggatccgtcactaggctgctttaa

SEQ ID NO: 32188 - DNA, 330 bp, Zea mays
  Peptide Sequence Number=SeqID_75563
atgaagggaaaaagcaataacctggaggctggagtcctggacgactgcaactctgcaagcggcaagccagctactcaggacgtcaggtcgcggtcgcggcaagcggtgcgccgtgcgctggtgcgccgtgcgcggaggagaggcggggcgctcaggtcggcgtcaggccgtcgggcggtgcgctcagccgctcaggtcggcgtggagcggtcggcgtggagcactgcagcctgggccctgggcgcctggcggctagggttaggagtccttgctggctgctgctcgctggatgtcgtcggattgaagaggcgctgggagtctgggcgctag

SEQ ID NO: 32189 - DNA, 498 bp, Zea mays
  Peptide Sequence Number=SeqID_75564
atggagattcaagccctgcaaatcaggctgtcaggtcaactgaagaagttgcgccatggtacagtgaacggagaggggatcagtttactccggccaccgtaccgagttgccacggtcgcttcggatgagctcaccggtgacagccgattcatggccttgcgccacgtacctgggcacattcaccgcatcgccgtgactcactttggccgtctgatcatcgccggtcttgaatttggcctcggccaaagaaggacgtcagtccttgagcgatttggccggtacacgagctcaccggagctctgcgtgacaccatccgccgtcagggactcgaacccaaaacttgatggtggatccatcatggccatgatgggttcaacatcggaaaagatgtacctctgccaggtgaggaagcgacaaacttttgttgcttctgttcaaaggtggtacccaaagacgagcaccaagactagagctgcgggagggaaggccctccgttaa

SEQ ID NO: 32190 - DNA, 2604 bp, Zea mays
  Peptide Sequence Number=SeqID_75565
atggccaataagcacgaggcctgtgagactggcacgaagcccgttgtttgggcccgcccgctttttcatgctaaacgagccggcccaacccgtttacgcacgctgcgggtcgggctcgaacagagaatcgagcccgtgggcttagaaggcccggttttaatcaatcctgaaccaaaagcaagaaaaaccaacaggatgctgctctcagagcttgtcaagatacatggcgcgacatctctcgcccacaagacacctgcatatgatggaagcaagagcctgtacactgcaggcgagctgccgttcaaatcaatggagtttgttgtcaagttggggaaggcgggccgagaagttgactacaaggtgacaatccgatacgcggcacggcctaacgtgtaccaacttaagcaattgatcaattctcagctaaggaacacgccatttgacgcaatccaagcactggatgttgtcttgagagagtcgccttctctcaactatgtaactctttctcgatccttcttctccaagaagttcggtgatgacgacattggcggtgggctagagtgctggagaggatattaccagagcttgcgtccaactcaaatgggcctctcattgaacattgatacatgctcgacttcattttaccaacctatcgatgtggtaaaatttgttgccgattgtctccagctgacaaaccctggccaaccttttttggacagggatcgtttaaagcttaagagagccctgcgcggagttcttgttgagactgaacaccagcagggaaagagaagcatctacaggataactgggattacttctgttccattggctcaactgagcttttcttgtaacgaaggccctcagctgactgttgttgagtactttgcacaacggtacaatgtccagctgcgctacactgcttggccctgcctgcagtcgggcaatgattctaagccgatatatttaccaatggaggtgtgcaaaatcattgaagggcagaagtaccctaggaagctcagcgacacacaggtggccaacatactgaaggcaacctgtaaacgtcctcaggatagggaggagaacattattaagatggttcgccacaacaactattctgctgataagatggcacaggtgtttgggatcactgtggccaaccagatggctaatgtgcaagcccgtgttctgcctccacctatgctgaaataccacgaatctggaaaggagaaaaccgttgcaccaagcttggggcaatggaatatgattaacaagaaaatggtcaatggtggaaccattcacagctggacttgtctgagcttttcgcggatcccgcttcgtttggtagacgaaatatgccatgaattggttcaaaagtgcaattccattggcatgagtttcaatccaaggccggtgacagaagttcagaaagactcacacaacaacatagaagctgctttaagggatgttcacaggagggctccgaatctgcagctgcttattgtgattcttccagatgttactggttattatggggaaattaagaggatgtgcgagactgaccttggtatagtatctcagtgcatcaatccgaagaagaatagaaacaagcagtattttgaaaatcttgcccttaaaatcaatgtgaaggctggagggcgcaatacagtgcttgagagagcctctgtgcctaatgggataccttttgtctcagatgtgccaacaatcatttttggtgctgatgttacccatcctacagcaggagaagaatcctcggcttctgttggagctgtcagtttcttgttctctgttacaactgtgtcattcaaatgcagtggtaatttagaagtggttgcatccatggactggccacaggtcacaacatataaagctctggtctcggcacaagcacacagggaagagattatacaaaatctcggcggaatgataagggagttgctgatttcgttctataagaggactggcaaaaagcccaaaaggattatattttacagggatggaataagtgaaggacaattcaaccatgttttgctccttgaaatggacgcgataaggaaggcttgtgcctctctggaagatgggtatctacccccagtgacatttgtcgtaatacagaaaaggcaccacacaaggctcttccctggagttcatggaaggagagatgttactgacagaagtgggaacattcttcctggaactgtggttgataccgagatttgtcatccgcgggagtttgatttctacctttgtagccatgctggaattcagggaaccagcaggccaatacactatcatgtcctctacgatgaaaaccgtttctcggctgatgggctgcagatactcacaaacagcctgtgctacacatacgcacgatgcacgcgcgctgtctcagttgttccaccagcctactacgctcacctggcagcattccgcgggaggtactacgacgaacaaggtagcagccccgcccccgatggaacctcagttgtcggtggcgatgccgctgcagccggtgatgatccacctgcgtgccgcaggctcccccagatcaaggagaatgtgaaggaagtgatgttcttctgctag

SEQ ID NO: 32191 - DNA, 794 bp, Zea mays
  Peptide Sequence Number=SeqID_75566
atgggaggacgaccacaagggtattggggtcgtgctgcaaccctaggatgtgtccctaatggacctaacttgatacacgacccattgggccaaaatagggtgacgcagcaccatgggcagaaaaggcaggaaatgtctcgcaaagctaagcatcaaaaagcttttgtaaaacaggtgatcaaggaaggtaatcaaattcaaggaagcgcacggagaagctccggcgagccactgtaccggccgattggggcagtgaccggtgctcccgagcggtggacaccaaatcggggcttgcccaagcatttcccctcactcaattgcgcaaatggtgagctaccaagctctgtccgcgtgaaccgaatgggtggcggacagttgatcgtgttcccaaagattggtggcggtataattcaattgggtgggccggctggccgcggtgaggatgttcgtgcggtggcgcaaacccgatttggggagaacttggaattggagctcacggtggcaagactgggggtgatactggacgatggggaggcagttctgggtgtaaaggtaccttttaagcagaaagcccaaaaacagcgaccagtgtctgggggaaaatcattaatcatcccatccatagacagcttgaaatttcccaaggcattttcattcggaaagaagatggcgggcgaaggtccgtcaacaaaattcttgggtgacttttgccagcgacaaaggccatcgggattcaaggacgtccagcgaatcgacagtattccgagggaactattttacgagcctcctcatag

SEQ ID NO: 32192 - DNA, 1146 bp, Zea mays
  Peptide Sequence Number=SeqID_75567
atgggaggacttggggtttccgatggctttgctagagagttgatgaggacgtgcgcggccccgggggaaaggatgtcttcgcccgagctccgggagtcttcggctcggatgctgaaggttaccgggggttgctggcctaggaatgttcctatccctcgagcggccagcggggacgtttttacatctcgcatggttcgcaaatggagagtttttccttacgggcggaatattgttgctgttgtgtcggtagtgatggacaaggatcgccagggggctgcacaaaaacgccaggcggctgtcaggcttgttgaagccaggccgaagaggcagcgggggtcggcgaaggctgcggccctcggccgaggcaagccgctgctggcggcgaagtcgggcgtccctgcatctagcaaggcgccagagacagcggcaggcgccggagcctccaaactggcgaaggctgtgccaccgcccagcagggtggcggaggccgcgaaggcggcccgagcgttgccgtcggcaggcaagcgtgtcgccgacttcgccaccgacatttgtgtggaggactatcttggtgggtcggacgaaggccaacttgttgtagttgcgcctgccgcggcgacggcggttgctgccgcagcgccgaaggcgaagggcagggctcttagcgccggaggcgaggtggcggccctcgcgactgtgagggatgaggcgggcgctgcgtcccgccggctgaaggaggtggtggagtcgctaagtcaggtggctgacttcgccaaccgcacggcgtcgggggcctttacggcagttgtgtctgccgaaattgagagacttcggacacaacatgctgacgccgttcgagagaaatcggccgccgacagcaagtgccgcaagctggcggacaaggtggccgcgctggagggagagaaggctgacctccggcgccagttggcgggggagagaagggagaccaacgaggccctcgtcaaggcgcaagcttcgcaggcggaggccaagctggcccgagcagagggaaatattgccacggagtgcgccgagcagctgcaggagcggctcatcgccctggagagccgcgtggagcgggccgaggccgcgatgcgcgcggaggccgaacggacgcgcacatag

SEQ ID NO: 32193 - DNA, 117 bp, Zea mays
  Peptide Sequence Number=SeqID_75568
atgccgagaattatggtaaattggtacttccttggaggatatggcttctgggttgacttggccatccaccctgccaccaggtataaaaattcacaacaaaatttggattcaaattga

SEQ ID NO: 32194 - DNA, 438 bp, Zea mays
  Peptide Sequence Number=SeqID_75569
atggctacgcaatttagagatgaaggcggagcttcggaggtgctttttaccgaaggatggcagcgcaggggcggcgttccacgtgatgtcgcctctccgccacgaaacctgggccacggcgagcaattccgccgcgctggtcccgggttcccgagcagggccgccacggccaccttccttccaaccagatggatcccagggtcactccaccgaggaccgggtcgacggtatgcagatggtcgctcacggcggtgcttctgtcccttcggcgatggcgagctgcgagaaggtgtggcggcggcgcacgcgaaattgaggaggagggaggagagaggtgtatatgcagatgcaattgtggacattactccacaaaccatcacactcaatcaaagatccaaatcagataagtatcataagaacaagcactcaagcgtataa

SEQ ID NO: 32195 - DNA, 294 bp, Zea mays
  Peptide Sequence Number=SeqID_75570
atggccggaatccctcaccggagttcctctggtccacctgaggcctcctccacgccgttcttcccgctctgtccgtggattcgtggccttttccccaccactgagttcaccatggcattctctccctctctgcccaatcctggcgaccccggagccaccctagcacgtgtcggcctcaaccctggcgacctcaccaccgtggagaggagcagcgccgcccgcagctgttcatcccccccggcccctgtattcttgcagattgaaccctggacttttaaatattcacagaattag

SEQ ID NO: 32196 - DNA, 465 bp, Zea mays
  Peptide Sequence Number=SeqID_75571
atggacccgagagctcaacaggggaatgctagaggaggagaagtggcgtgtgggagaagggtaagagaggggtgggctaccatttatagagtaggagctccagagcatgctagccagagtccaacaggaagcttcgactttaagacaaaggtgtgcgatcagaacaaaggacaagctagttccaaagatgtggctgaaggagcttcagctcagcacattaacaatgccgaagcatccgacaacaaggaccaacattggcgcccacctccggtgaactcatccgaccaccttcgacaagcatcgaccttcgtcatgccgctgaagaagacatccagaccaggggctgcactacagccactggatgttaatcaggagacgctacgagaagctaggagccagaagaggaaggctaccatcccaacacctcaggaggagggagctagaccaagagatcagggaccttga

SEQ ID NO: 32197 - DNA, 294 bp, Zea mays
  Peptide Sequence Number=SeqID_75572
atgaaattagcgaaggggtacgctggtgttctaatccaggccgttcgctcgagatccgacgacgatttcgcacacagagcaccggccgcagcaccttccttccaaccagatggatcccagggtcactccaccgaggaccgggtcgacgattgcaacctcgctgacggagtgtacgtgctcatccccgagcaagtagttgcccaagaggaagttcaggagccagctctagagcctgccaccgaggatcttcccgcagcctcatcttttgaaggcaagccccggttttatgcataa

SEQ ID NO: 32198 - DNA, 543 bp, Zea mays
  Peptide Sequence Number=SeqID_75573
atgacctcacccacccccatcaatggaggagaaactcgtttcagttttgaccacctttccaacgaggggtttccctccatcttatgggaggtgctctgctctgccggttaccctacaacccctctgcatatggtgcagctatatgaggagcatcgggtgccacgttgtagggtttggctgaccttggagtctcaccctctgcagctaggttggcgttcccttgacttcgagcctatggggttcagggcgaacgacaccactgaggctgcagcgctaaaagccctgacaaccttttgtaggtatcatctcttggagatggtgatgcacccactaggactctttcccgccgagaagagggatgaccccatgtggtgcaacagagtgagccacgtgaaggacgtgtgggctatgcatcccgaccaggttgggaggatcactgttcagtgtatgagcgcactgtatcgcctacaggccctgcagagcaacgccatagcacacctcacggatgttgctcatactactaagatcactctcgacagttga

SEQ ID NO: 32199 - DNA, 489 bp, Zea mays
  Peptide Sequence Number=SeqID_75574
atgccctggatatgggacagggtaagcttgaacccggctattccatacatgaaaagacaatcacgcactgggagtggagagatggcgagagtggcatgtaccctcctggcaaaggaccgtctaaaaggggtgaaattccactgcaaaatgttggtgtgtgatttgtgtttacttaatcttgcgatcttggttctgtctgaggtatttgagacgaggacaggtgcatgtgggcccaataacttgggaggttctgccacgcttcccacagactttactcgtcacttgacctcaaacgcgttctcccatgctagctatggtgggtacaagtgcggccgtttcacggcggcaaccggggagaattggagcattgtacgccaaggccgtacgctacaggacatggttgatgctgtgacttggccttccaccctgccaccgggttggacggtcgagtgggatgctgcctcgataggagaggacaaggaggagtag

SEQ ID NO: 32200 - DNA, 246 bp, Zea mays
  Peptide Sequence Number=SeqID_75575
atggctacctacgagcaacggtcgactctgacagtgaacagtgcagcacagtacacgcggcagaagtcagagcagcaggtttcgcctattcaccccccctctaggcgaatttcaaccaccacacaattggtgtctcttgccttgattacaattgagttggaaacaagaaagaaggaagaagaaaagcaatccaagcgcaagaactcaaatgaacacaatttttctctctcactagtcactatttga

SEQ ID NO: 32201 - DNA, 180 bp, Zea mays
  Peptide Sequence Number=SeqID_75576
atgtcgaggtgcgggtcgccggcggtggtgaccggaggtgggctggccgcatgcgcaggcggtcgggctcgtcggtggtgcgtgctccagcgtgctcagggcggtagagttaaatcaaagtgctcggggagcttcatgggagcacttgagtggattggatctcgaatttgcgagatatga

SEQ ID NO: 32202 - DNA, 486 bp, Zea mays
  Peptide Sequence Number=SeqID_75577
atggcccgcgcccacgcctataaagcccccagggaccttgaccgtacccctccgcacgcgctcgacctcactagagcccaaacccaccgacgtttgcccgtgcacggtaaagtttgccatttatttgaccttgtgcttaaagttaaagaaaatagaaaagactgtaacctcgctgacggagagtacgtcctcgtgccggagcaaggagctgctcaggaggtagccccgaatccagcaccagagcctgcaccagaggatctgcctgccactgctttggaaggcaagccccgcagattgccctcctcacgcgacctgagacgaggtctcccattccggttatggtgggtacaagtgcggtcactgcacgacaacagtcggggttctttggaggacatggttgctggagtgacttggccgtccatcttgccaccgggttggactgtcgagtgggaccgcgcctcggctgaggaggagcatgaggagtga

SEQ ID NO: 32203 - DNA, 207 bp, Zea mays
  Peptide Sequence Number=SeqID_75578
atggcgcggcttaccggcgacggtagaggtccggcaaagggtcgggtgaggtctggcggtcacgttgaggtgtgggacgccggcagtggtgaccggaggtgggctggcagcgtgcgtaggcggtcgggctcgtccgcgcacttgagtggattggatctcggatttgcgagatacgagggggcgaagttgggtctgtcgctcggatga

SEQ ID NO: 32204 - DNA, 441 bp, Zea mays
  Peptide Sequence Number=SeqID_75579
atgacaacacgggaccacgcaacagcgacacagcgaggcggcaaggacacaggcccacatggcagcgagtgcccgcggtgcggcgtgagtgtgaagccggtgtgggacccacgcgccagggagccacccgtgggcgttgaatcccagatccaaactttaactcaaatattttggacaaacttttatgaaattcccaagttaggattttgggatgttacaaatcctaccccccttaaaaataatctcgtcctcgagattagtaagcagaagggttataccgaggtaagaagagagatggtcagagtgaggttagcttatggtaagaagaacttggtaagggaagactccgtccaaggtgatgtaattgtggacattactccacaacccatcacactcaatcaaagatccaaatcaaacaagtatcataagaacaaacattga

SEQ ID NO: 32205 - DNA, 141 bp, Zea mays
  Peptide Sequence Number=SeqID_75580
atggttcgagattcaaggattatgttatggatttggttcgactatgatgatgatgttcctcgaggaggaaatggtctacgggagaaaggtgaagccgtggaaggagacttccaggagtttcaagactacgatgaattctag

SEQ ID NO: 32206 - DNA, 567 bp, Zea mays
  Peptide Sequence Number=SeqID_75581
atgaacaagacaccggtactcaaggtaccattacaaacggaactccggttccacctccgcaggtacgaaaaaccccacacgatcggggggcctacggagcaacagaaggccgacgggtggctcgccgccgcccgctccaacaacgacgacgatgacttctgctccgaggggccgaacagcagcagcgatgacctcggggcgaatgctgctgccatagggccctcgcccacttcctcactcgagaggcaaggacgagcagaaggccgtagagttggagggaccgggaaagggggataccccgaaagagatccttctccgcgaaggaaatgggccccgagcccccctactgatcagaggttcgaaggctgccccccggaggggttcaacagccgcctcagagcgctcgggctccgcgcccactactggtcagaggttcgaaggccggcccctcgaaagggtacaacggccgccttaggccactcgggctccgcgcccactactgatcaggggttcgtaggctggccctcgaagggttcacagccgcctcagacacagagcgagggatga

SEQ ID NO: 32207 - DNA, 468 bp, Zea mays
  Peptide Sequence Number=SeqID_75582
atgccttcgcactcccctcatgcatcgcgtccttccaccttacgagcccccggatggggagcgcccgcgttgcttccgtcttgctgtcgctggaggaacgcaacttcgtggaagttggtacctttcagccatcgctcggcttcaaggattttcatcacgcagcccggctgcatccccttgccgatggtcacccaagacggtgaccaccagtttgatggtggggggaagcaaagcccgggctgcggcctctgccccaccctcagtttcaaggatctttcatcatccttgctggggcgggagggcgagctgagccgggagctctaccttccccgccacgggttcgtgggcccacccttctccttcagcactccaggggagaggggcgctcacccggccctagcggaaggggcggacttcgacaacgcggggccgagcggccgcaagcgtcgtcagctccaacatgtctga

SEQ ID NO: 32208 - DNA, 1083 bp, Zea mays
  Peptide Sequence Number=SeqID_75583
atgcagcttgtatctgaaatgatgatactttgtggtgaggtagtggttgcttttggttcttacaacaacctccctttgccatatagagaaatggattttcaaaaacctataccacatgatgtacttggtattcctggttacgtgcagttcatctctcctattcgacgatatgttgacttgccagcttattatcagatggtaacccctatcagcacaaagctgcaaaggcctgatgggcgcaattcaggtcaaggctccgtccactcaagggacacgatctcgcctcgcccgagcccagcctcgggcaaagatagccgacccaggaggattcacgtctcgcccgagggtctcctcaagcaacgggcgtaccttcgactcgcccgaggcccagctcgggcgggcttcgcggagaagcaaccttggccagatcgccacgccaaccgaccgtatcgcaggagcattcaatgcaatgatcgtctgacaccttatcctgacgcgcgctcctcagtcgacagggccgaagaaaacagcgccgcctgccctgctccgactgttgtgccacctgacaaggtgagactggcagcagccaagtccagcctcgggcgccataggaaactccgcctcgcccgactccagggctcggactcaacctcgacaccggaatatggtctccgcctcgcccgacccaggggctcggactcaacctcgacctcggacgacggactccgcctcgcccgacccagggctcggactcagcctcgacctcggacgacggactccgcctcgcccgacccagggctcggactcagcctcgaccttggacgacggtctccgcctcgcccgaccccagggctcggactcagcctcgacctcggacgacgatctccacctcgcccgaccccagggctcagacttagcctcgacctcggaggagtcaccgtctcgcccgacctcgggctcggactgaccacgccgcaggggccccctacggaagcaaggagacgtcagcaaggacccgacagctccgacagctgtgctcctatagggctcaagcgctcctccgacggccacgacatcacatga

SEQ ID NO: 32209 - DNA, 468 bp, Zea mays
  Peptide Sequence Number=SeqID_75584
atggtgcggatcatcgagcaccgcgccaaaacttcggaggatttcgtgatggagcaggaggttgtgtcctctgcgccacgagtgctcgaccgccctgactctgggactgctgccgtgcacgccgtgcaacagcacacgccaacgcaggcgtcccggactccgtcgagggcagcgcctacggcgctgtctgcggccagagagttgctacgccactcccctagccctacggcatcaccaggggccatgaagcagtggtgcgacgacatcgaccgactgctcggcatgacacattctacttcgaccaggtcgaggcctcggtcatcctggcgccaacgtgaggcgacgacgtctgtgcgctcgccctccataaggggtgcacagaccgacgacctccaggcggagctcaaccgtaggcgtacgggagaagacgcccgggtctctttggaaagggagcgtgagcgccgatag

SEQ ID NO: 32210 - DNA, 234 bp, Zea mays
  Peptide Sequence Number=SeqID_75585
atgaggtgtcaggccatccttgcattaaatgctcctgcgatacggtcggtcagcgtggcgatttggccaaggttgcttcttggcgaaggctgggcttcgggcgagccgaagctttgtgctgatgggggttacaagctgagattaggagtcttgggggtacccctaattatggtccccgacaatatacttgcaggaactccgatgggttcgttgtcccatcgtatttttcggtag

SEQ ID NO: 32211 - DNA, 78 bp, Zea mays
  Peptide Sequence Number=SeqID_75586
atggcatttaaggtgtcatatgtttttgatttgcgagatcgagatagccatgggaaaaaacaagaaacatccggctag

SEQ ID NO: 32212 - DNA, 522 bp, Zea mays
  Peptide Sequence Number=SeqID_75587
atgggtgtcgtgttacgtgaaacggcgtcagccgcctggcgtgtcttcagacggtttgaattgcatattgaatttttgcgactgttcggtggccgtggtaggagagcaagaaaggtggtggttcttcgcatcattccggcgacaagcgcaagcgcgagccaactccccctcggaggacttcggcgactcggagtactcggaggaggagtttctcctccgagtccgagggctctccggctcctgcctctcccccggcgtcgtctgatgattcagacgactcccaggggatcaccgcgggtcgagcgcgccgggctcgagggctcggatgagtcggagtactcctcggacgaggagaattcctccgacccgtccgaggagggcggcagcggcgacggcggtgacggcgacgacgacggaggcgacggtgacggcggcggcgacagcggcaagggcggtgacggcagcggcaagggtggcagcggcgacggcggcagcaagggcagcaataaggccagtggctag

SEQ ID NO: 32213 - DNA, 1242 bp, Zea mays
  Peptide Sequence Number=SeqID_75588
atgttgccactgcccaccgtgggcgtgggggcggtcgccgcgtcgccggccaccgccgcaggggtagcggcgcccataaggtttcgtccgctccgcctcgtcgcgagtcgagccagcactaccccttcttctccctctacgtccagctcggctatatccagcgcgtcaccagcggggcattcccgcgagcacctgtcgggcagggacggctccccatcgaagaccagcaagccccgggtgttcttcctcgacgtcaaccctctatgcttccgcggctcccaacgtagcctcggcgccttcgcgcgctggctggccctcttcttcgcacacgtcagcatccgtgaccccgtcgtcgctgttttggacggggatggagggaacgagtaccggaggcggctgctgccttcgtacaaggcgcatagggctcgcggcgtcggcactggcgctgacacgcgcgtcgtcgacgttctccgccaatgcaatgtcgcggttgtaagagtcgatggatatgaggctgatgatgtggtggctaccttaacagaacaggttttacagaaaggttacagagttgccattgcctcaccggataaagacttcaagcagctgatatctgatgatgttcagctagtcgtgcccattcctgagatcggccgatggtctttctatacattaaggcattatgttgctcaatacaagtgtgatccaactgcagacttaagccttaggtgcttcatgggcgatgaagcagatggtgttccaggaatccagcacttagttcctggattcggcagaaagaccgcggtgaaactactgcaaaaacatggttcgttagaaaacttgctaaacacggctgcaatcagaactgtcggcagaggttatgcccaggatgctctcactaagcatgcagattacttacggaaaaattaccaagttcttagcctgaagaggtacggaatttctaatctgcaatggctgccagccgcgccgcaagtgtggcaggatttatttgttttggcgcacagaaatagcgccacacttcaggcgagctacgggctacagcacgcaaaatgtgaagtatgggcggcgataagtcttcagtactcagtagccgaggatgaaaccgttgcgctcgcgcgtactgatgtgcgcgtctgcggctcaaaaaatctatcaaactgtgggcatcgcctttgcgaatggaatccaatgcccgacccttcctgccttctcggtccgctgtaa

SEQ ID NO: 32214 - DNA, 450 bp, Zea mays
  Peptide Sequence Number=SeqID_75589
agggcttgtgcagctaaaccatcgaactatcaaagatttacctcaggaggaagagcagatctgcatgggacgacaagacctgagtgtcggtcgcgcggggagcgcagctcggctcggattcgggaccctcccgtctcttccccgctctcgctccgccgatggaggagttgaccttagctcggatgctatggaagcggaggtggggggttgtctgtccacggggatgggaggaggcggggcagggaagctagcgactcgggcaagagagcggaggagccgagagagagaaaggaaatggagcacggtggtggctgactgtgcggtctgcgcccgcttgaagctcagcgacccctcgatgcgcagcttgccggagcccaacgccgccctgaggatggccggctcctcccctgcaccgccggcggacggaggtagcgcctcctcctccaccag

SEQ ID NO: 32215 - DNA, 321 bp, Zea mays
  Peptide Sequence Number=SeqID_75590
atgggctcccgattcgccagcgcggtgctgcagctgctggtgtgcgcaacgctcctgctgggttgctgccatgggaggttcgtggtggataagaacaacctcaaggtgacggcgcccgatgacctcaagggcacctacgagtgcgccattggtaacttcgaggtgccccagtacggcgacaccatggtcggcttcgtcgcctaccccaaggccaataggaaggcctgcaagagcttcgaggactttgacatcaactacaaggccaagccgggggcgttccccaccttcttgctcgtcgacaggggaggaaaagctaagtga

SEQ ID NO: 32216 - DNA, 261 bp, Zea mays
  Peptide Sequence Number=SeqID_75591
atgaggataaggctcaagaagaagaggatgaagatcaagacgatgagccacctcaagaggaggacattgatcaagggagagatgaagatgatcaagacaagtaagatgatcaagaaatacaaagtcaatgatcgccacacccaagagtccaccaagcaattcaaagagatcaccccgtcaactccatacttggtgacattcacaagcactacaggaaacgagttagagaacgtgggtggcaaatcgtcgaacttaacgtaa

SEQ ID NO: 32217 - DNA, 513 bp, Zea mays
  Peptide Sequence Number=SeqID_75592
atggactgtgacttattatgttcatctttcaggaacttggacttggcccttcgatctcatttcatgttgttctcaaagattggatcagacattcagatggacacccaggaagttgagttgccccttgaccaggaggaatccacctaccgtctggacgaaaaacgatcccatccatggggcagcgccagtgccagtattgtggaacgaatttataaggttggaaaggggttgctgaaggacgagaatgctcagaagcttgcgttgcagcactggctggaagcggccgcacttgaagaaatcttatatcagtttgaggaaaaactccaagctgaaagagaggaagctgctaggaagcaggaagagttgcaagcacaactacaagctcaacaggccgcacttgaagaaaaccaaagtttgctgcgccaggcccaagaggaagtgaaggggatgcataccaagtttgaagagaccaatgcactgctacgagctgtcctgaaacttcagaaagattga

SEQ ID NO: 32218 - DNA, 360 bp, Zea mays
  Peptide Sequence Number=SeqID_75593
atgagtttgcggtatgaccgtatttatacgccaagagcgttgaaaattgaaagaccccgcttgtcagtgaatgttgctattctagcaaagggaaggtatctttggactcaagtcggcatcacagtagaccagaataatacgaaggttggtacagcgccgaaggtgaacagtacccccgtactgttcgggctgacttggcattcgctttttgcgtcacgcttgtactatcatctccttccagttgaagcatttgagaacaagtccccaacagagggcaagggtgaggtcgagccgaggccaaggtactggtgcggtggtgcattcgggcggttgaaggcggcgagggcaagggctgactga

SEQ ID NO: 32219 - DNA, 477 bp, Zea mays
  Peptide Sequence Number=SeqID_75594
atggcgacggtgaggctcagttgggtgaacatcaggcacgcgacaccagcggcgaggcgggggcgtagcacgacagcgcgggcatcggcgcacgagacgaacgcgttgcggtcgggactcggtaggacacgaggcatgataaggcgtgagacggtggttgggcgcgcactactaggcttggtcggctggggggcttggcgtgggcttagccaaggcgcagagcagggcggcgccacacggattcgatctactgtttatcgcgatcgaggactagccatgacgcacctgcgcgccgttcgccgatcttcctccgaattaaaaactgttgcgctgcccactgcctgtccgagccggttgggaaacggactgccgaagcccaacatggtgcatgtgaccaccatgctccacgataaggacaacgactttgtccaggccacaacagggatggccctgtcgacctcaccaccggcagtctag

SEQ ID NO: 32220 - DNA, 93 bp, Zea mays
  Peptide Sequence Number=SeqID_75595
atggccgccgctgcggcacaagcacgccaccaccttgtcgagctgagggtagaaggaagatttgtgagtgcgctcgaagttgaaatcaaatag

SEQ ID NO: 32221 - DNA, 774 bp, Zea mays
  Peptide Sequence Number=SeqID_75596
atggccggctctggagagtcgccggcgatggtgggagatggcgttcatcttgatctagagacagagggagtagttgatggtaactcactggtcacaccacctcctgctctactgggtcctgtaatcgacgatatgagcataggggaagaaggagaacaaagggttcgacctcctatgtccaatattagctccagggagatggatacgcctcaaatactgcattcacataaaaaaaacattgatccaactatagtgccaacggtagggatgactttcaaggatgttgatgatgcatataaattctataaaaggggaaaggacggagttactaaatcatacagacagaaaatgttgctaacgaaaacaatgaaagtggttcgccaggcttgtatgtcaaaagcagggtatgacaaggcaatggatgtgttggatgagctcgatggcgttctatgccgattagagccagatattggatgtaatgagtcatgtgatgttagtgatgatgaggaaaaccaggaagaagaattaaataataataatgctggcgatgggatggaagatgacaatacaattacatgccataaaatggatgaggataaaaccatgactggctgtgaacatgcgttaacattaataacagctggtaaccaggtggacaacatgagaattccacctgaggttggtgatacaagttctccgtgtcacgtagcacatgaacaaatggaacatattggtgcatcctcagaagctaaaaaggtgagcattgagaaatga

SEQ ID NO: 32222 - DNA, 283 bp, Zea mays
  Peptide Sequence Number=SeqID_75597
atggccgagcgccgctgttctccctgcgcgcagccgcgctccctgccaagcccctccatggtcgtgcccctcttctcgctcgcgctcgtctccctgagttccgtgcgcgggcaccctgacccagctcggatcctcgtcgtcgcgcccagcccggattccagcgccccttcgtgctctggttttctctctttgcgtcgatgttcaagcgcctccgtgcttgcatccgttgggcccgtttcgcctttgcgcgacatcggctgcgagctgagtttaatttcgccgg

SEQ ID NO: 32223 - DNA, 702 bp, Zea mays
  Peptide Sequence Number=SeqID_75598
atggctggagctcagcagggaggagcaaggacgcgatttggcaagctgggaagcagggaagagaagggtccgcgcggcatggcgagggaggagctcgaccgggcgccatgggggcgagctcggggccgggaggtccaatttattcagtgtttaatcatgagatctgttgattgccctccaactaatccaaaaagactaaccattgagtcaagccaggagaaattgaatatccgctgcattccttatgatgttattgtctcaacttggataatgagcgatcagcagcgcgatgcagtcgctaggttgggattttccagtatatttgatttgcgaactgatgccttagagagcatatctctcatcaggtggttgatggataaattggatccacatgacatgaccatacgcccaggggctggcaaggaactggagataacaaaagagacggttcgtcttattttgggtttgccatgtgctagagggggcagggagtttaccgattggtatggtgaagtggatgctgctgcaaaactgagacgtgatctcaaagttggtaaagaagaatttgatgttgtcaagcttcaggacaagatagtgcttggcaatgatgatgagttatcaatcagatgcttttttctgattctattcaatcgactttttttccatctacttcatggggcattacaaacaatgaggtactaa

SEQ ID NO: 32224 - DNA, 162 bp, Zea mays
  Peptide Sequence Number=SeqID_75599
atggggacggttgatatgtgtggggacggagtgcctcgccatgtcgtgtgtttaggttctctggaggacatggttgctggagtgacttggccgtccatcttgccaccgggttggatagtcgagtgggaccctacctcagctgaggaggagcatgaggagtga

SEQ ID NO: 32225 - DNA, 285 bp, Zea mays
  Peptide Sequence Number=SeqID_75600
atggtgcctttggcagggcctgactgcttgtcagtctcactctgtcaagtggcactgcagtcggagtggagcaggcggcgttgtccttctgtcaggccgggttatgttatgtaccttgtccgtgtgaggcatggtggtaggaagaggcctttgcccaagtgtattgtctatggcaagcccaagcaccagggtatcacccaactcaagttccagaggtacaagaggtatgtcgctgaggagagagctatacgcaagcttgatggactgagggttcttatgtcatga

SEQ ID NO: 32226 - DNA, 489 bp, Zea mays
  Peptide Sequence Number=SeqID_75601
atgggcgctgctgcgaggttgtccttggcgagagggcaggggctgggagatcggttttcgatgggggacccggactgtggggacccggactgtggtcaggcgcatggacacattcagatagacgccctaaccactgcttcaccttcggctccctctatccagccggcacacacagacaccatcggcgaagaagaggtcggagagaggatgatactggccgtgctcttcgccaactccgatggaaacatccttatcgagcgattccatggggttcccgtggaggagaggctccactggcgctccttcctggtgaagctcggatccaagaacctcaaagggtccaagaacgaggagctccatgttgcctcccacaagcaccttccatatgaagtcatgacacctcttcaagtagcagttgccggtgttcaaaaggatctgaggcttactattgccgctgatacacatcctatgctcgctgaattactatag

SEQ ID NO: 32227 - DNA, 273 bp, Zea mays
  Peptide Sequence Number=SeqID_75602
atgtcgtgctcgttcgatgactactatatcatggactgtggcatcatctcggcgccggaggtgacgcagaggaggaccgacagcaatgatcagttcgtcatccttcccactgttaaggcagccttttgtgctggtctgcctttaattctctttgcaaacacacacacttgctttttgtttgagcaagcgcgtatggtggcgtggggcgtgctctccaatgatgagaccatgaaaatggtggcatatatcgaagtctgtatgatactgatgtaa

SEQ ID NO: 32228 - DNA, 498 bp, Zea mays
  Peptide Sequence Number=SeqID_75603
atggagaacttgtgggaggaagggaggaagctcggcgtccaatttataggcgaggagagggagagagagagggggcgcggggtcgcgcagctgggcggcgtccatgtcgcgggcggcctgggcttcgcgtcgggtgcgtggcgttgcttctgggcgcgggcgcggccagtgttgcgggctgatgcggcgcgcagggcgtcgaggcggctcagggtcggctcctggcgctggagcgtcgagcagctgggcgcgggtcgctcgaccacgagggtcctcggtcgggtttggcgcaggcgggtgcgtaggctagagcgctgctcgatcgggtcgcgcggtgcacgggcttggcttgctcggcgcgtccctggtggctggaaagagcaaggggaggagggagaaggaggaatggggttgggtggggcccgcgcggcagggaagaaggggactttccccctggtggcggcggctagcaggggagggaggcataggagcggctag

SEQ ID NO: 32229 - DNA, 285 bp, Zea mays
  Peptide Sequence Number=SeqID_75604
atggccaatctcaaagatcacaacaatgttgccccagacatgaacataaggctgactaactcgccggtcgctgaggatgagaaattagaaaaccacataaaaaggctggacaaggaattccaacgacaacaggctcagttaagcaaggtggcgaaaaaatggtacctctcgcacttcaaggtaaatcaccaccagaaggtcgtcaaggagaaggaaggggcgggatctaggtcctacgaggagaagaagacgaccctatgccatcatggactgtccgtcccatag

SEQ ID NO: 32230 - DNA, 464 bp, Zea mays
  Peptide Sequence Number=SeqID_75605
tatgtcatttagaatttcctggagttgttcttcgaacattcatagctagactaacattgagttgtgttactttgacgagtttgagacttctcagagctcagtgctctatcccttatcccgggcatgtgaaagtgaaaacagtgaatacccgctccattggtggctaccggtgcttgtttgctgtggatggattctcgagagtaaaacttaagccccaagtccccacgctttctctagtatgcggagttcacagactggactcgaagagaagaagtacaccacaccataggatccccccacagactcaactagccactactgatgttgaggctggagcgaaactcggcgaagatcaaggacggaagtcccttggtgaagatgtcggcaaactgggaggtggtcggcacgtggagtacccgaacatcgccgacgacgacgcaatctcggacgtgatagtcgcctag

SEQ ID NO: 32231 - DNA, 141 bp, Zea mays
  Peptide Sequence Number=SeqID_75606
atggccgtgatgggttcaacatcggaaaagatgtacctctgccaggtgaggaagcaacaaatttttgttgcttttgttccaaggtggtatcgaaggaagaaaaccaggattgaaacgtcgggaggaagtgtcctcctttaa

SEQ ID NO: 32232 - DNA, 333 bp, Zea mays
  Peptide Sequence Number=SeqID_75607
atgacgacgctcgcgcgaagcattgatattgctctgcgtgtcgcatcaactattgatgatgtagcacatgtcgtctcctatgtgagcaggcgagaggagacgcctcgtcctgcgacacggctgagtggggtcccgttctccggccacatgacgatgcagggcattacgacactgattccggagaaggcgtgcctcgcgctgtgggggttcctccccttgcattgttggttcattgtcggagacggggacatcttatatccttccgtcgatgaagaggatgtcggggaagtccactcccgggtgggtgaagtggacaacaaagtctgccgctga

SEQ ID NO: 32233 - DNA, 432 bp, Zea mays
  Peptide Sequence Number=SeqID_75608
atgggcgaacgaggatatcttgcaccagagtacaccattcaagggcagctgaacaaaaagcgcgacgtctacaactttggtgtgctgttgttggagattgtcagtggcagatcccacactgatcccagattacccgttgacgagcagttcctcctagaaaagacactccatgagttcgatgatctcgagagcatcattgataggacactaaagcgcgattttgacaccgaggaagcactctggttgcttaagataggtcttgtcatcatgctcgagcactgccgcaccggaccttgttggggatttcctcgattaaaatataagctccttgatatggttatcttctcagacatcaatgcttacgaggtcttggtttaccatgacttgttaaggaagctgcaacactcacatcatgccaaggcaaatgtttaa

SEQ ID NO: 32234 - DNA, 321 bp, Zea mays
  Peptide Sequence Number=SeqID_75609
atgaggaactacatccccgacatggacgaggtggccgtgatcgaggacttcaaccacgagtccaatgactcggcgtcttcgtccgagctatcctctagaaagctccagcaaccttggagcagctcttccgagaagcagacatctgtatcaccgtcgacgagcgtgctcgggacctcatcggtcaaccgaatcccgcacctttggccccaaagaaggaagccagctagcaacaagacaagcgctgggacaagaggccaagagaagaagtacatgtcgtggaaccgcccaaggggctcgagcccacgacgctcctcgtggtga

SEQ ID NO: 32235 - DNA, 1158 bp, Zea mays
  Peptide Sequence Number=SeqID_75610
atgcgcaaatctcaccatttgcctattttctctaaaaattatctagcctatgatagaaaatttgaaaaatttcaaaatcccctctgcctgggctcaccggacagtccggtcaggatggtgcgcacgaagaatgtgtccgcgccagggggaggagatgacgaggatcctcctcgccccttcaggcaggtcaagggcaagactatctacttggagcagcaggaaggccacaagaagcggtgtttggacagagcagcccgagcagctctagcagtagcagcagccgctgagcaggagcgagatgagaccgaggtgcgaccactggctgctgatccccggttgattgatcttcagcgtgctacagcggctcggagagaccctgcagcagcagatcttttcagcaccaggatacatgagtctttctttagagcacagatgtcagcccagattgctctgcgagcacaccgcctattggatctccctgcgtttctgctagccgctggtgcggattttgaggtgcacctttcttatctgcttggtctactcactctactgactaccagcggcaaatatgttgaggagtgggtccgagttttctatgcttctgtatggatcgatcctgatcaccagtggatgaggttccactttgagcgagaggatgttacacttcatgctagccagattcgccagctgtttggattcaacaactcgtcttcacagcttgtgctacgggcgcagcagttcctgatgatgatgatgatgatgatgctgatgctgatgatgattgatgattttgggattctgcctctgcctcctatgcctccatgctcacatgatcatgaggctgggagttctagtgccgcccctgctgcccctcctgccattgaccctactcttactgcgatcctccagacccttactcagcagcaggctcatttggtagccgagcaggctcgtcaggcagcggttcagcagcagatgtccaagataatgctatcgatgtttcagactattcaggacagacaggacactctgcagcagcatcttctagcagactgggctgagaccagggccttcatgactctcatgcttcagcatacaggtgttcagatccatcttgttcagttagcacccctccagctcttcaggcagcgattgtga

SEQ ID NO: 32236 - DNA, 141 bp, Zea mays
  Peptide Sequence Number=SeqID_75611
atggtgaccggcgagaagcccgccacaagccaagggaaggctccatcaaaggagtccggcaacaagaagatggagaaatcacctccaaacgtcaagtcgcaccggagtggtgacaagaagaagcaaaccaccggtttttga

SEQ ID NO: 32237 - DNA, 345 bp, Zea mays
  Peptide Sequence Number=SeqID_75612
atgggcgaacgaggatatcttgcaccagagtacaccattcaagggcagctgaacaaaaagcgcgacgtctacaactttggtgtgctgttgttggagattgtcagtggcagatgccacactgatcccagattacccgttgacgagcagttcctcctagaaaagacactctatgagttcgatgatctcgagagcatcattgataggacgctaaagcgcgattttgacaccgaggaagcactctggttgcttaagataggtcttgtcatcatgctcgagcactgccgcaccggaccttgttggggatttcctcgattaaaatataagctccttgatatggttctataa

SEQ ID NO: 32238 - DNA, 684 bp, Zea mays
  Peptide Sequence Number=SeqID_75613
atggcgcctcctgttgacgtggctggtctgcgccctaggttgggcgatgtggaagctcctccgaagccgaggtcgagtccgagcccctggttcggcttgaggcgaagaccgtcggctgaggccagggcggagtccgagccctggggtcgggcggagcggagttcgtcgtcttctggggctgagcccaagtccgagccctgggtcgggcggagcggagttcgccgtcttctggggcttagcccgagtccgagccctgggtcgggcggagcggagttcatcgtcttctggggcttagccccgagtccgagccctgggtcgggcggagcggagttcgctgtcttccggggcttagcccgagtccgagccctgggtcgggcggagcagagtataacaggttcacacttagccaataaaaaagatcaagtattggattcaacaaaggagcaaatgggcaaccgaaggcacctctggtctgggggcaccggactgtccggtgcggcaccggacagtgtccggtgcaccagaggactccaactcgaactcgccgccttcggaaatttccagaggcgctccgctataattcaccggactgtccggtgcacaccggacagtgtccggtgctccaaggaacagcgacctctggacctcgccagccttgggaattcacttcagccgctccgctaa

SEQ ID NO: 32239 - DNA, 240 bp, Zea mays
  Peptide Sequence Number=SeqID_75614
atggtctcggagttcattatctccaaacgaggcatcgaagccaaccaagagaagaccccggccatcgtgcagcaccccgagcccttgctgggggtacccgggggctgcacgcacctccgggaaaggccgctcgtcaccgccgacattctgaagcccgggacgcacaagccggtcggcggccaaggcgaggtctacggcaacgcttggaacgtccgacagctacattgcttctacccttaa

SEQ ID NO: 32240 - DNA, 663 bp, Zea mays
  Peptide Sequence Number=SeqID_75615
atggggatgatccacaagattaatctaatgggtgtgcctctacaggtcgatgatcttctctttaacattgacaggaaaaagcaaagaaagataggatgcttcgcatgcggggagaagggccacttcagggacagttgtccaactatggtcgaaccgacaaaagggaggagcaagggcaaggcgcttacaagtgtcgaaacttgggatgactcttcaagcgaagatgaaccccaaaggacgcgcagccatcgatcctcatcatggtcatcatgcaagtgccatatggcaaaaggtaaaatgagtattacatcctctagtgatgatagcagtagtgatgctgaaggtgagggaaagccctccatagatgagcttgcggaagacgttaaattttttcaagatgtttgcactaaacaaaaggctcaacttaaaactttgaaaaataagttgattagccctcaaaatgattataaagggaaaatggaaattcttagcatacacaataatgagctaactactaagctagaaaacattggtagcaccccagaagtatttttagttgaaatacctgaaattattaagaaagatgcttctacttcttggtttgatttaattgatgattctaaccccagtaatgaagttcttgttaagaatgttgttatataa

SEQ ID NO: 32241 - DNA, 576 bp, Zea mays
  Peptide Sequence Number=SeqID_75616
atgaacatgagagaggtggaaatcccgcggccttcgtgttcgtcccgcgcccaggtcggctggtgtgatgccgtggccgtcggcggagtgctggagcctggcggagggacagctgtcggagctgttgagtccttgctgacgtcctcttgcttccgtaagggggctgagagccgccgtcgtcacagagtctgcggggcgccatcattgcctatctggcggagcgagccagatgggacgccagtcttgttccccgtggcccgagtcagctcgggtagggtgatgatggcgcctcctgttgacgtggctggtctgcgcactaggttgggcgatgtggaagctcatccgaagtcgaggtcgagtctgagcccctggttcgggcgaggcggagaccgtcggctgaggccagggcggagtccgagccctggggtcgggcggagcggagttcgtcgtcttctggggctgagcccaagtccgagccctgggtcgggcggagcggagttcgtcgtcttctggggcttagcccgagtccgagccctgggtcgggcggagcggagttcgctgtcttccggggcttag

SEQ ID NO: 32242 - DNA, 459 bp, Zea mays
  Peptide Sequence Number=SeqID_75617
atgatggtcatcgcttcagttgtcaccaccttgtttgccgttctacttcttttctctctcccctcatgcctccaccttcgcgccaccccattttcaacagagggcacatcctccccatattcgtccgacaccaaccccgacaccgactcgcacagtggctattgcacgtccacgaggacgtttcacatcatgcgcgcaccatcgttttctccgtcgtcggacgtcccgttcgtcttcccggccttcgccctattcttcctccccaacctacttcctccgcccacggtcgcagctacgagccaatcgacgctcatcgacgtgggtacggggcgagtcggtcatgctcctggcctttctttatgcttgtcgtcgaggaggacatggtggcgcgtgtcacgcttaggttatcttggcgatgaggagtctaggtctgagatattgaacaaccaaggctcgtag

SEQ ID NO: 32243 - DNA, 1008 bp, Zea mays
  Peptide Sequence Number=SeqID_75618
atggaacaagttgtcatgcttcttcaaacagttggccacaaggaaaagaatggggacattattttttatgctctactaaaactgttagtagatgttttagtgaagtttagtgacacagatatggttgggaacagtgtgatgtggcaacacctggaagtggaggatctccttctctaccacaaggagaaaatccttctttactacaaggagaaaatccatgagtcggggagggcctttgttctaagggaggtccatcacgaagagtgtgctcggaggcttaatgagaagtatggtgctaacttcacgtggaaacaaacctacaacaagtaccacaagctgaaaggagaatggaaggtgatcatggaggcgaagtctgctaggggtgctggttttgatgatgttcagaagaagataacctacgacgagatcgaggttgtcaagatgaaagctaaaggcgacaagaaggctaagtactacaatgttccgatccccttgtatgatgagatggagtttgtcttcacggggaaacacgctactggagagttcagtgttattgaagcaccgtttgatcgctcaggaaggcaagaggatgatgccgttgggaatgtcaacctagatcaagagccagcagatctgaatggtgactcttctcaacacgatttcgacaccctcgcagagtctgatagtccgaacccagtaggctcgaagcgcaggcacgaggagaaggagaaggagaaggagaaggaatggaaatgggctaggcaaggcgtccccatcttcatgcaggccctgtcggaagctgtgagctttacccacggtggcacggacccatacgagggtatttacaaagccattgaagacatggatgagtatcctttgccggcacgccttgatctgctgacctatcttgctcagaatcgtcacattgccagcatgttgaagggacggcaggaggaaactttcaagcaatgggtggcacgatgggttgctggtcactaccctttgtga

SEQ ID NO: 32244 - DNA, 459 bp, Zea mays
  Peptide Sequence Number=SeqID_75619
atgggcaagaacaacaaacgcaagcgcgagccgtctcctccgtcagaggactttggcgactcggaatactcagaggaggagttctcctctgagtccgaggggtctccggctcccgtctctcccccagcgtcgtccgatgactcggacgactctcaggggattgccgcggaggtctggacttacatccgggccgtcgagcgctccgggctcgagggctcggatgagtcggagtactcctcggatgaggaggactcggacggcggcggtgaggacgaagacgacgacgacgacggcgacgacgacgacgatggcgacggtgacggcagcggcggcggcaggggcagcggcggcggcaaggacgacgacggcagcggcagcaggggcagcgaccggggcggcagcagcaagggcagcaccaagggcggcagcggcggcggcagcaacagggccagtggctag

SEQ ID NO: 32245 - DNA, 1323 bp, Zea mays
  Peptide Sequence Number=SeqID_75620
atgatcacgggcgaccagctggccatcggcaaggagaccgggcggcgcctcggcatgggcaccaacatgtacccgtccagctccctgctcaaggacggcgacacgggcgggctccccgtggacgagctgatcgagaaggcggacgggttcgcgggcgtgttcccggagcacaagtacgagatcgtgcggcggctgcaggagcggaagcacatctgcgggatgacgggggacggcgtgaacgatgcgccggcgctgaagaaggcggacatcgggatcgccgtggcggacgcgacggacgcggcgcggggcgcgtccgacatcgtgctcacggagcccggcctcagcgtcatcatcagcgccgtgctgacgagccgcgccatcttccagcggatgaagaactacaccatctacgccgtgtccatcaccatccgggtggtgctgggcttcctgctgctggccctcatctggcggttcgacttcgcgcccttcatggtgctcatcatcgccgtgctcaacgacggcaccatcatgaccatctccaaggaccgggtgaagccgtccccggtgccagacgcctggcgcctccaggagatcttcgccaccggcgtcgtcctcggcacctaccaggctctcgccaccgtcctcttcttctgggccgttcgcgacaccgccttcttcacgaatacgttcggggtgcaccacatcggggacagcacggaggagctgatggcggccgtgtaccttcaggtgagcatcatcagccaggcgctcatcttcgtgacccgcgctcggagctggttcttcgtggagcgccctggcctgctgctggtggccgccttcctggccgcgcagctggtggcgacgctgatcgccgtgtacgcgcactggccgttcgccaagatcaagggcatcggctgggggtggggcggcgtcatctggctcttcaccatcgtcaccttcttcccgctggacgtgttcaagttcgccatccgctacttcctgagcggcaagcagtggaacaacgtgttcgacaacaagacggcgttcgccagcgagctggactacggcaggggcaagcgcgaggcgcagtgggcgatcgcgcagcggtccctgcacgggctgcagcagcccgaggcgtcgggcctcttcaacagcgacaacagcaacgatttcatcgagctctccgagatcgccgagcaggccaagcgccgagcggagatcgccaggctaagggagctgcacacactgaaagggcacgtggagtcggtggtgaagctcaaggggctggacatcaacaccatccaacataactacaccgtgtga

SEQ ID NO: 32246 - DNA, 870 bp, Zea mays
  Peptide Sequence Number=SeqID_75621
atggcggcgcgaagggcaggaagggcggttctctcttctctggctagatctctcgggttgcgaaaacctaaggggcaggcaggaagcggagcaaagaaccgtcaccggaccctctccggggtatataaagaccaaggcgaagacggttccaacgttccgcccggaccggacgcgggattcaaaaacgcgaagcgaaacggccgctcctcgaacggctcgcgcacgtgcaacggcaaccccgccaactactcgccccgtcgcattaactccgcgactggacaggcggcacttctggcaggagcaacgggcgacgcttcgccttcgccgaaacaaccgcgccgaaaaaggctgggcccccccgaagggtttcaacagccgcctcagattcgcgtgggccccgacacccactactggtcagagggttcgaaggccgggccccccgaagggtttccacgggccgcctcaggctactcggggccttcgcgcccattactgatcaggggttcgaaaggctgggcccccgaagggttcacagtcgcctcagacgccgagcgagggatgaccaggggggaccgggtccggcagatcacccactggtacttttgggcgtgcctctgggcccctagccgacccccaacgaacggggcacggacgtccactcggattacccgcttgcagctcaccggagacaccatgttcggtgcccatcaaggaggctcgggggctgctctcgcaaacctggctccggccaaaccgttgacagcgtcaacctaccagcccgagaacttgggccccgaccgtgcacccgggctacggcctgctcgcatgagggaacaaccagaccagccgaagcattacgcaaggcattaa

SEQ ID NO: 32247 - DNA, 453 bp, Zea mays
  Peptide Sequence Number=SeqID_75622
atgggcaagaacaacaagcgtaagcgtgagccgactcctccatcagaggagtttggcgactcggagtactcggaggaggagttctcctccgagcccgaggggtctccggctcccgtctctcccccggcgtcgtccgatgactcggacgactcccaggggatagccgcggaggtctggacatacatccgggccgtcgagcgcgccgggctcgaaggctcggatgagtcggagtactcctcggatgaggaggactcggacggcggcgaggagggtgaagacgacgacgacgacgacgacgacgatgacgacgacggcggcagcagtggcgggggcgacggcgacggcagaggcggcaccaagggcggcagcggcggcagcggagacagcaccaggggcagcagcaggggcagcacccggggcggcggcggcggcaggggcagggccagtggctag

SEQ ID NO: 32248 - DNA, 1056 bp, Zea mays
  Peptide Sequence Number=SeqID_75623
atgacggtggcagacgcgcgggagcagcgggcacgtcgacggccaagctcacgtcccatccgggggcagcgagagagctccctctcacggtgtgaagacaacgcgcccgtgatccgttcctcgaacggctcgcacacgcgcaacggctgccccgccaaccactcgccccgttgcattaactccgcggctggacaggtggtgcttctggcaacagcaacgagcgacgcttcgccctcgccgaaacaaccgcaccaaaaaaggctggcccccgaagggttcaacagccgcctcagatcgcgtgggccctacacccactactggtcagaggttcgaaggccggccccccgaagggttccacggccgcctcaggctactcgggctccgtgcccattactgatcaggggttcaaaggctggcccccgaagggttcacagtcgcctcagacgccgagcgagggatgaccaggggtacgttcgatacataaccgaggctcgggctgcgctcccgaggcttgggggctgctctcgcaaacccggctccggccgaaccgttgacagcgtcaacataccagcccgagaacttgggccccgaccgtacacccgggctacggccagctcgcatgagggaacaaccagaccagccgaagcattacgcaaggcattaagacctcgaaggagtgaaatcactcctccgaggcctcgggggctacacccggcgggtgcgctcgcgcgcacccaccggaaccaaatgcaaccgagaaaggctggtccccttgcaaaaaagtgcgacgaaagcctccaagcgagtgctaacactcccttcgaggctcgggggctactgtcggggaccataattaggggtaccctcaagacgcctaattctcagctggtaacccccatcagcataaagctgcagaggcctgatggggctcggactcgggctaagccccggaagacggcgaactccgctccgcccgacccagggctcggactcgggctaagccccggaagacggcgaactccgctccgcccgaccaagggctcggactcgggctaa

SEQ ID NO: 32249 - DNA, 477 bp, Zea mays
  Peptide Sequence Number=SeqID_75624
atggcgcttcctgtcgacgtggctggcctgtgccctaggttgggcgacgtggaggctccaccgaagccggggtcgaatctgtcttccatggccgaggccgagtccgagcccctgggtcgggcgaggcggaggtcgtcagcagaggccgagtccgagcccctggggtcgggcgagggcggaaggtcgtcagcagaagccgagtccgagcccctgggtcgggcgaggcggaggtcgtcagcagaggccgagtccgagcccctgggtcgggcgaggcggaggtcgtcagcagaagccgagttcgagcccctgggatcgggcgaggcggagtttcttcgtcttttcgggggcttagccccgaatccgaaccccttgggcggggtggaagcggaaatttgccgtccttccgggggcttttatccgagcccgaagccctgggttggggggaagcgggagttcgcccgtctttttgggggttaa

SEQ ID NO: 32250 - DNA, 261 bp, Zea mays
  Peptide Sequence Number=SeqID_75625
atggcccctgccgtcggtgccgaggcggaggcggctcgagaagtccccgtcaccgacgggatcaccgccaccatccgcgcttcgggcctccggggtaaccggccgagccgcctgctcgggccggattcccggaaaagtccctggacagcgtcaccgtccgaggctgggtcggacctcgctgaaggtgtcgtcgatgccgagggtgctacagctcccttccagcgtgaagacccgagcctgcaggatcagattgtcttgtag

SEQ ID NO: 32251 - DNA, 243 bp, Zea mays
  Peptide Sequence Number=SeqID_75626
atggaaataccctcactcgacggctggactgtaattctgaaagtggtttttcgcgtgtaccgagtgacaggggtgctcctctatttaacctctcgcagagggaagctgaaggagaaaggtcgccgagtcacgccaagagtcggtgaaccgggtcatattggagaggtccaagtcaacaagagtgactacgacaatgtgacgggtgcacttccctacctcaaagtgaataggaaagcaaactga

SEQ ID NO: 32252 - DNA, 615 bp, Zea mays
  Peptide Sequence Number=SeqID_75627
agacattacggtacaggtggctatgagatcgatggttttggttatgactatggtgctggggaggagccagggcgggcgcgccgggtagggacaggggcaggggccggggtcggggccgaggctgagggcgcgctcagagcgcctcgccgcgccaccacgacggggtcgggcaggcgtcatggccgcgcgccgaggccgcgcgcaccggggcgggggcagggccgggttagccgcgccgggacggggaacgggaccggggcgggggagcgccacggccaagcgccgccgtggccggggctggggacgccgcgacgcgtaggggaggagccggggcaggcgcgtcgggcagggacaggggcaggggtcggggtcagggtcggggtcagggccgaggacgagggcgcgcgcagagcgcctcgccgtgccaccacgccggggtcgggccaccacgccggagcaggggagggggctcaccgcgcggggaggggggagggcggcgccggacgggggcaggggagctgcgcgaggggggaggggatcgtgcgcggggggagagagagaatttgggggagggatgacaggcggggcccacagggggaggcggcggaggcttaa

SEQ ID NO: 32253 - DNA, 297 bp, Zea mays
  Peptide Sequence Number=SeqID_75628
atggcgcctcctgtggccgtggcgggcctgtgccctaggtcgggcgacgtggaggctcctccgaagccgaggtcgagtctatcttccatggccgaggccgagcccgagctcctgggtcgggcgaggcggaggttgttcggcagaggccagggcggagtccgagcccctgggtcgggcgaggcggacccgagtccgagccctgggtcgggggaagcggagttcgccgtcttctggggcttagcccgagtccgagccctgggtcgggcggagcggagttcgccgtcttccggggcttag

SEQ ID NO: 32254 - DNA, 1017 bp, Zea mays
  Peptide Sequence Number=SeqID_75629
atgtcttcttcctcccttaagcgccgggtcttcccgtcttccaagcccccggatgggggatatccgccgcctttccgcctcctcgttggaggaacgcaactccatgggagttggtacctctcagccatcgttcggcttcaaggattttcatcacgcagcccggtcgcaccccttcaccggcggtcacccgagatggcgacctccagcttgatggtgggggaaagcgagccgggctggggcctctgccccttcctcagcctcaaggattttcatcaccaaggctggggaggggagagtgccgagttgggcgtgcctggtcttcagccgcgagtggcttcggggccccttgcggcgtcggcgtctgccacggcagccggaagaggttcttccgccggcgcggcggccgggaccggccacgggctgacctccaacttctacggccttctgcccgtccttgcctcacgagttttggcacgggcgggggcctccctgacagcggcatccaccctgaggtcagcgttgccgctgttcggccccccggagcagaagtcgctgtcgtcgccactgctggagcaggtgacggcgcgccgttcgtcggtctccgttgctccgcaggccttccccctcggagtggggttgggtaaccggttgagccgcctgctcgggccggattcctggaggagcccctggacctcggcgccgcccgaggctgggtcgggctttgctgtagacgtcgtcgatgccgaggcgtgcgctttctgcggccgccgaggccagaagaacacgcccctcgccgcgcttgcgaagctgcgtcttttttcctcctgcttcgagcatctggactctgtcggtaacagggacgtttgtgtgagcaagagttgctttttcgcggaagggacgagtgagaaagggacgagtgaggtatccgtatcccggaggcgtaggagtccctcggctcggtcagccttggctgcttacgtgtacctcgtcgtttccaggatccgctttccgaagtag

SEQ ID NO: 32255 - DNA, 249 bp, Zea mays
  Peptide Sequence Number=SeqID_75630
atgcgttggtggccggaggggaggaagaagcttggcgcgcggttacgtggcctacggcgtggcaaactccttaacgctgatgggatggctcaaacgaattacggtgacacggtagacaagcttggccacgcggcggaggaccgtcgaccggagatggggaagaaatgcgatctgagggtgcgctggcaagcctacggcggtctccgtgcctctgatccaatacacaacttgactgacagaccaacttag

SEQ ID NO: 32256 - DNA, 292 bp, Zea mays
  Peptide Sequence Number=SeqID_75631
atgagccgaggccaggggtatcgatatcagtatgaacagaggcggagttggctcgagaatgggaacctggttggccggagcctagccgtgttgggtaaccggacgagccgcctgctcgggccggattcccggaggaatccctggaccgcgtcgccgtccgaggctgggtcggactttgctgaagacgtcgtcgatgccgaggacgaacgcgtcgagcagtgccgtgcagtcgccggcgtcctttacgtcctcgcacggttcgtccaagtgctccagatgcagcacctccgag

SEQ ID NO: 32257 - DNA, 597 bp, Zea mays
  Peptide Sequence Number=SeqID_75632
atgggggcgacgatacctgtgattaagccacgacgatccccatccacgatgcacagtggcccggcggcggaatacccagacaccatgcggcggaggaccacacccgggcccccgcagcgccaatccggccacggcgtcgaagcccgaccatgccccaacctgcgaagacacggcgaggatcgctacccccgctgcgcctgctctcctgcggctcggctcaagttcaacggtggtggagacatgagctccgcggtggcgctggcttgtaagaaaggtctggttatatactcaggtgaagccctgccttcgtttggttaccgtggaggggatagagctgacgcttcggtcccacccgtcatccagcctgggagcaaatgcgtgtgcagtccccgcgcggttggcgagcgacagggaggaagacgcttctggcacaaggggccacttgcctgtgtcaagcgtgcctgccgcagtggtcagcgccgcatgcaccggagctcggcacccacgcacgcgatcaggagactgaagtgtgggcccacatggccagacgctgggagcggcgcgcgcatgacacggaagcgggtaggagccgcgtag

SEQ ID NO: 32258 - DNA, 663 bp, Zea mays
  Peptide Sequence Number=SeqID_75633
atgacaaaactctgtccgctcaagggacatgatctcacctcacccgagccccagcctcgggcaggaacagtagacccaggcagattcacgcctcgcccaagggcctcctcaagcaacgggcgcaccttcgactcgcccgaggcccagcttgggcaggcttcacggagaagcaaccttggccaagatcgcctcgccagccgaccggatcgcaggagcattcaatgcaaggatcgcctgacaccttattctgacgtgcactctttagtcgacagggccgaagaaaacagcgccgcctgcgctgctccgactgctgtgccacccgccagggtgaggctgacagccgccaagttcggcctcaggcgccataggaagctccgcctcgcccgaccccagggctcggactcaacctcgacctcggacgacggactctgcctcgcccgaccccagggctcggactcaacctcgacctcggacgacggtctccgcctcgcccgaccccagggctcagactcaacctcgacctcggacgacggactccgcctcgcccgaccccagggctcggactcaacctcgacctcggacgacggtcttcgcctcgcccgaccccagggctcggactcaacctcgacctcggacgacggtctccgcctcgcccgaccctag

SEQ ID NO: 32259 - DNA, 684 bp, Zea mays
  Peptide Sequence Number=SeqID_75634
atgcaggcggcatgcagccgcaccacaaggatgcaccccttcgacttcgacgcatccagcatggcggcccaggcccacacgtcatgtaaccgacgcgttggttactacgtgcgaaaaactgcaccgccacttgcgccagtgccgcgccttctcgactgcggaaccggtgccgcgattcgaggcaaccctgcacatggaccaacagtgcaagccaagcacgtcggtcacgggtcagtcagccgcgggagaaggcgcgacggtcgatatggccagaagtgggccgacagtaatggcggcaggaccaggaaaggggatactccgaaagggatccttctctgcgaaggaagcgagccccgagccctcctactgatcagggtttcgaaggctggcccctcagaagggttcgacagccaccccagagcactcgggcttcgcgcccactactggtcagaggttcgaaggctggcccctcggacgggtttgacagccgcctcaggccactcgggctccacgcccactactgatcaggggttcgtaggctggccccccgaagggttcgataaccgctttagaacacgcagagcgagggatgactctgggtacgtccgatacatggccgaggctggggctacgctcccgaggtaccctaggacatttccgataccagcaggaacgattctgtaa

SEQ ID NO: 32260 - DNA, 1257 bp, Zea mays
  Peptide Sequence Number=SeqID_75635
atgcatcgcgcccttccgccttccgagcccccggatggggagcgcccgcgttgccttcgtcttgccgttgttggaggggcgcaacttcgcagaagttggcacctttcagccatcgctcggcttcaaggatttttatcaggcagcccggctgcatcccctcaccaatggtcacccaagacggtgaccatcggttcgatggtggggagaagcaagccgggctgcggcctctgccctgccctcagcttcaaggatcttcatcatccttgctggggtggagggcgagctgagccagagctctacctcccgcacgggtcagtgggccaccttctccttcagcattcaggggagagggcgcccaccggcctagcggagggggtggacttcgacaacgcggggctggtcggccgcgagcgtcgtcagctccagcgcgttgggctcgctggctcagctggctctggctcagcttccggtgccccctcccgccgtcgggcggagtgtggctatctagccggtgtacgggcggttgtcgcgccgcgcgtaccgggggaccgtccaagacgtcgcgcgctgctagggcggcgttcgtgttcttgggttgtcctgcccgtgctccggcacgacgcctccgcgtggaggtcggtgttcgcccgtccgggaggacttgagtggggatctgccggtaggcaggtggctgccatcgtcggtgctgaggtggtggcagctggagaagtcctcgtcgccgacgagatcgtcggcgccatctgcgctccgagcctccgggtctttggctttgatagcttatcctcgcccctcgagtggggacgtgggcgagggccttgtcgcagcagcgtctgccctgaggtcatcgctgctgttgtttggccgcccggagcggaggtcgttgtcgctgctgcaggagtgggcggcggcgagccacctggaaattgtcgtcccgcaggccctccgatgtggggggttgttcgtacctgcgggagtggaacccggagttccgtttgtaatggcaccttgagtgttggtgtgacgagtgaggtatccgtatcccggaggcgtaggagtccctcggctcggtcggccttgccgctcaaggcttctctcgctcagttaaggaaccctcagctgctctgcgatgagccggagccagaggcagcggtgtcagcatggacagaggcggagttggctcgaaaaggaacttcgtcggcccaggagcaggtggcctcccaggccgaagaggcgtag

SEQ ID NO: 32261 - DNA, 333 bp, Zea mays
  Peptide Sequence Number=SeqID_75636
atggccttgcataaaggacgatgttggcttccaaattggagcaaagagaacactgaagctaataagtgcccgaggagcccacacaagcacaagatcaaccatcaaccttcacaagagcatctccgccaactcagtatgatgagcaacctcaagaagatgaggaacaagttcaaaatcaagagcaagctcaagatggttgcatacatcaagagggatatgaagaagaagatcaagagaaggaggatgagtaggagattcaggcaacaaaggcaccacacccaaaagtccatcaagcaattcaaagagaccacccgtcaacatgatcctcggtaa

SEQ ID NO: 32262 - DNA, 420 bp, Zea mays
  Peptide Sequence Number=SeqID_75637
atgggcaagaacaacaagcgcaagcgtgagccgactcctccatcggaggagtttggtgattcagagtactcggaggaggagttctcctccgagcccgaggggtctccggctcccgtctctcccccggcgtcgtccgatgactcggacgactcccaggggatagccgcggaggtctggacatacatccgggccgtcgagcgcgccgggctcgaaggctcggatgaatcggagtactcctcggatgaggaggactcggacggcggcgacgagggtgaagacgacgacaacgacgacgacgatgatgacgacgacggcgacggcagcggcagaggcggcggcgacggcagggacagcaccaagggcagcagcaggggcagcaccaagggcggcggcggcggcaggggcagggccagtggctag

SEQ ID NO: 32263 - DNA, 951 bp, Zea mays
  Peptide Sequence Number=SeqID_75638
atgaccaacgcggcccacacttcgccctcttcactgcaagacgaaggcccacgacgaagtccctccatcccacgtcctcactcgacctggaggcccacgtgggattcgacccattgggataatccaggtgtctcagggcataagcatccttacatcgggacgttgggcgcccggacacctataaatacccccgaaagcaagttccaacatttggcgcccaccgttcgtgctacgagcaaaccacccgtgatggcacccaagagagctagctcaaaggcagccccatccatcgacgaagcagcgaaggcagcgctgctagccaagaaaaagggcaaggccctcgtagacaccacccaccaagaagcctgcgaagacgacgcactcagcaagagacagcgtaacgatcaaccaactcccgaaggcaccctccgcacctgcagctccggaggacagccacaagaaccacccccaggcttcgcttcactagagggcgaggacgccacagaggacgacgaactcatcggcatctcagcagaagaacagctacagctgagggccctgcgcatcaagaaccgcaacctccagaagcaggaagaaatcctcgaggccaagcgccaacgtgtctctgtgcaggccaaggtgcgccagatgatacgagacgaggagcagagggctcaggacctcgagcaagagattgcgctcatgcagcgcgaaggccaacatgatctacagcacggcccgcccctacaacagcgcgcgccagtcggagacctattcattcctcagcgcggaccctcatcccgcacgccacagcattccaaggcatcaactaccttgatgaacggagccccctggcgccgcaactgcaagtgtcaccatggcccgccaacttcagggcagggacctaccccaagtacaacggcagcactgagccagcacagtacatcatga

SEQ ID NO: 32264 - DNA, 324 bp, Zea mays
  Peptide Sequence Number=SeqID_75639
atgagcaggaggcacttgcgttggtgtcactcatcgatgacgagaagaagcttggcgactgtcagtcgacctctagaagcagtcctacgtggtcgcatgcgccgctatgggtactacctcgctgatgagcccggggtgcacttcgtttggcagcccaaccaagagtcatcggtactcgtcatgtcgcgcgcgttcgacgactactatatcgaggattgtggcgtcatcttggcgccagaggtgacgcagaggaggatcgacaacagtgaccagttcgtcatcctcgccaccgtcagggtagcttttgtgccgacctgcctttaa

SEQ ID NO: 32265 - DNA, 2010 bp, Zea mays
  Peptide Sequence Number=SeqID_75640
atgtccgatttcgatgaacaggatgacatattcttggagacatctgatgatacaagaagttcggcatatttttcagctaggtgcagcacaagtgaacaattatcagcatcatggggacctgaggatgagctctggacaagtgaattgctgagtgtcaatgaaaggcggcatagattcctggttcggatgggctttgctaaacctattcctactggaatcaccttttcacagtggcagggagaaattttggctgatcgtgcatttcgcgacctggaggacagaattaacagcatctgttcttcatatcggccgtctttttctcatggcgcatctgcaccagatagtactaggaacagcgtcgtgcttgagcttgatgaaatcgagcaccatgaactgaccggaatacttgatgaggttggaacagacagaaccatgaatacaaaccagtcagatggttttcctagtttccctcaacttgttcatttgtttttgcagaagggcagtggtcgtagtccggcaaggggaatggaaatagaattcagtgagaagcaaaatgatcccaagagcttttgtggaaggttcaaaagaaaggaggaggaagatataatctgtatgcacgacacacgtatgaaaagcctgaagagtggaacattgtttgcaacaaaagttgatcagcaaaacaagaagtggatggacttctctgctctgtacatgtgccaagaaatccatgcccacggcggttcaatcagcgtcatgaagttcagtacatctgggaggtatttagcgagtgtgggcgaagactgcgttgtgcgcatctggaggatacacgaagttgaatcctctcctgatctgtacatcagagagacgcctgtcaaatccatggacagaaatatgggcctgaaaatgaaggtgggaaaaggccggggacgtgccctagccataatacccaggaaagttttcaacatcgctgagacaccactgcatgagtttcatggccacacaagtgatatcttggatatgacatggtcaaaatcaaattttctcttgacttcatctaaagacaagactgtacgcatgtggaaagttggctgtgatgactgtctagcagtattcaagcacagagattatgtaacatgcattcagttcaatcctgttgacgaaggatactttgttagcggctcaatagacggtaaagtccgtgtctgggatgtttcagagaggcgagtagttgactgggccgatgcaaaggatatcataactgccgtgggttaccagccagatggacagggtcttatcgttggcatcgctgcagggaggtgccggttctataaccatgcaggtgaaaacgtggaactggagaaagtactgaaggtaacgaagaagaaatctgctggtagacagatcaccagcctgcagttttcgtgcggcgatcctgctcggatcctgatcgcatcagcaggttctaagatacgagtatctgatggaggagctaagatcaaccgaaagtttgaaggacgtcgaggctccaaggtcctggtgccgccgtctctgacctccgacgggcagtacctcgtgtccgcaggtgccgactccaacgtctacatctgggacttggacagaccagcaaggggcaaaagccgcaccagaggaccaagaagggtgcgttcctgcgagcacttcttctcggagggcgtcacgtccgtggcgacatggccgggtctggcgcaccaacaagaagacctccagtcgccggagaagggggccgcccccacgctctgccgcgaccgcgagctctgctcgttcgggacgtggttctcggcagacggcgcgaggggcgccgcgacgtggcccgaggaaaagctgctgccgtccctcaggtacgtcaactgcgccgggatggacgactgccgcgccaaggtgtcggccgcctggaacaaggtcgtcgtcaccggcggcagcgacggggtcatccggtgcttccacaactatggactgccagtgaagctatag

SEQ ID NO: 32266 - DNA, 1491 bp, Zea mays
  Peptide Sequence Number=SeqID_75641
atggggggtcctcaggttgacttgagttgctcggctttggacttctccgacggtcttcgctttcaggactggatttctagcaaatttaaccgcccgatcaatctcctcccggattggggcattgtgcttgttcaaccattgccggagcatgaggtcaatttccacatttttgttgatatcatccgtgagtatcttgtggaggtccggcgtgttcaaggcagcagcattcagcgctcccatttgggacaggctctggaagtgccacagttcatcgtgttctcagtggctgaaggtttccaggaagtttcatggaccgtccaatgtgacattgtgcagcaatttatgcttggtgctcaacctcaagatgaggatcccgtgccaccctacccacttgatgggcaccagcttcctgtcgagttttttggaataggtcaactagtgcccaattttcagtttgatctcaacattcctcccatggaagggaacaatgttgaggaagatgttgccatcaatgatgatgcaggttgggacccttggccagttcagcaggcacaaccccctgagccagtagtcaatgcaaacaatgcaaacgttgcgatcaatgcagaagagcagttcagttatcagttatcgggtcttgaagaccttccttctgatgatttggtgggctactttaacaatatcattatccctcagggagtccagttccagcaggaagaagccctggtgccagctgaagcagttctcgccttgccagctttccctcccgaaaacatgattttggagggaaacaacgaccagggagaagacgacatgcaaattgaagagagcatcaatgtgggcctcatgctgcatttggagcagtccaaccctgatcctgcttttgatgaatacatggccagaaagcgttcctcttcttgggctgatttattccctgataatgatggctcagtctctgttccaaaagtttgggttgctttcttcatgggccttctaatcaggccggattcttttgactgggccaggaaatttctgttgtcaggagctatctctgccgtcgtcatgcccaacatggacaccatttcaatcaagattccttccaagtgtctgctacctcccagtcaggacacccatgttgagccacagtcccctccccgacaaaggcagctctcaagaaaaggcagcctatcctggttgacacggcagttagaaggagtgctaggcttagggcaaaggccaagggctttaaaaaccgcactgggattgataaaaagaattcatgatatcatcaagaaactgggaactgaattttgtaaggtggacccgtccaagcttaatcttgaggacctaagcagatccaaggccactggtattgccattcagaggctagttgctcctcccagcagcaaggatgatgagcccaggtcttctgaggaccaggcaggggaccctctctttgctgatgatgatgatgcagaatctagtgcctag

SEQ ID NO: 32267 - DNA, 242 bp, Zea mays
  Peptide Sequence Number=SeqID_75642
atgggcgcactcctggctaatgaccaacaaccctttgacgaccttgtgaggcgcaaggaggaagaggtgctacgacaactcgccgagtggcgcgagaagaccaaggaaaaatacctaccatacttcatggccctctcacataccaccctggtagagtcgtacatggcccagtcgtccaagtataacctcgaaccgttaggcccgatcgcgaaccatctggtgtgttacgccggatcatccag

SEQ ID NO: 32268 - DNA, 393 bp, Zea mays
  Peptide Sequence Number=SeqID_75643
atggcggagaacgtggaagcagtcgggtcggcggagagcgaagaagcagaagcgtcggcggagaagccagtggcgcaccggacactgtctgatgccctggctaagcacctagcgaactggccgctctcgggttttctcggcgctcgtccgctaaaattcatcggactgtcccgtgagccaccggactgtccggtgagacaacggagcaacggtcaacttcgcccaatggtcgactgcgctgactacagggcagtctgcagtgtagaagttagtctacaaagtcagaacacatcggactgtccagtgccgcaagaagacagaagacttcaacggtcaacagatccaaaccccaacggtcggctgacgtggcattcaccggacagtgaacagtag

SEQ ID NO: 32269 - DNA, 1521 bp, Zea mays
  Peptide Sequence Number=SeqID_75644
atgaagcaagtggaccgtcctccaaataaccccaagcgtataacaattcagtcaagccaggagtgtttcagtgttgacattccctctgcagaacagcctaatccatgtccagaagttgaaaatcctccaaatgttgacagtcaaaatttgaccaatgaaatagttcagattgattctgatgaagatgacttcatgccagctctgaagaagcgtaatgtttctgaaagccacacaagagtgttaagaaaagtcgtgacaaagatgattaaacatgaggagctaccccgacagacgcttaatgtgaggtgcaaccctcaagatgtcattgcgagcattaacattttgaatgaaagacaacgtgaggctataagaagtaaaggtttctctaccattcttgatatgacagtagatgcgctgtgcagtagatcacaccttcaatggttgatggacaagctagaccccaaggatatgacaatacatcctggtccaggaaaggaactcaagatcacaaaggacattgttcatcttatccttggcgtgccaaatcatggcggtggtaaacctttggggattgacgaagcagttgcagcaagcaacttgagggcaaagcttggtgtggccaaagatgagttcaatgtgacatttctacaggatcgtttaaggaaaggcgaggatgatgacctttcaatcagatgtttcttcctcattctattcaaccgtctgctgtttccaactgctagctggggcataacatatcatgaggtgcttctcacagaagaaatgcaccgtttccatgagatcgactggtgccagttgatttttaatgatctatgtgaagctgccaagaagtggcacaaccgattcaccacaaatgtctccacgactatatatggatgctccatttgttgtccttccgctgccccccaaaataagactggcacacctcgcattaaattttttgataagaatagcataaaagctttgaccaaagctgacaagagaaagccggagtgcaggaccaatatttttgatgcaccgcgccctgcccccatgcctcggccaacttttaacatcaaactttcatctatcaaagagatgatgtcaagtaagatcaacgatctcccacatcgtcatcgatctaaattcacagatattcttgctgcatatgacttggaggttgacaagacatgcgtagccataaaagacagcattgacaaaattattgagaagcaatacgacatagcagacacgtttatagaattgatagacgaggtactacgtgccgagtctgaaaatttagaaaacgagactgatgagccacaacaaccggggaattcggctcattcagcaggacacactgttgatgccacccagcccacacccgatatgccatcccaagcttcgcagctcgagacccagctgggtggtactcagtttgaagaaattcacgaaagacaacagcatatccgtagagtgcttgagacgtgtcccgacgaatcggatgtagtttcagatcaacag

SEQ ID NO: 32270 - DNA, 1446 bp, Zea mays
  Peptide Sequence Number=SeqID_75645
atgtcttcgtgctcccttatgcatcgtgtccttccaccttccaagcccccggatgggggatacccgccgtctttccacctcattgttggaggaacgcaactccgcgggagttggtacctttcagccatcgttcggcttcaaggattttcatcagccagtccggctgtacccctccgccggcggtcacccgagacggtgaccaccagcccctcggtggggagaagcaagccgggctgcgatcttggtcccaccctcagcttcaaggatgttcatcatcctcgctggggtggaggccaagctgagccggagctctacctcccgcgcgggttcgtgggtaggcctctccttcggtgttcgagggagagggcgctcactggccctgtgggcgggccggacttcgacaacgcggggctggttgacggcgggcgtcgtcagcctcagcgtgtcgggctcgtcggcttggctcccggtgcctcctcccgccagaaggcggctgccgcgccggcggcgttcgtgttctggggcggtcctgcctttgcaccggtacggtgcctccgcgcggaggtcggtgccccactcgtccgggaggatctgagtggggatctgccggaggggctgacggcccctgtcgtcggtgccgaggtggaggcggctcgagaagtccccgttgccgacgggatcaccgccaccatccgcgcttcggggccgccggctctttgtacttgtcctcgcccctcgagcgtcggcgtgggcgagggcaagattgcagcagcatccgccctgaggccctcgccgctgcagttcggccacctagggcggtggtcgttgtcgttgctgccggagcgggcgacggcgagccgcccgtcggtcttatgttgctccgcaggcctccccccgcatcgagtggggttgttcgtacctgcggaggtgggaaccagagttccgcttgtaatggcacttcgaatgccggagtccctcggctcggtcagccttgttgcccgaggcttctcttgctcagttaaaggaacccctcggccgctcttcaatgagccgaggccaggggtagcggtgtcagcgcgaacagaggcagagttggctcggaaagaagacctagtcggccggagcctggccgggtcgtccgttagcgggaccgacgccggaattgacttgccgaggcctcgggtcgggctgatgtcctcgggggacagctggccgaggcctcggggtggccagccgagccgcctgcccgagctagattctcagagaaggccctggcggcgacggcccgggcttggtgatgacgttgtccttcagagcggagacccttggactgcgtcgccgtccgaggctaggtcggtcctcgctgaaggtgttgccgacgccgagggcgctgctgctcccttcaagcgtcaagatctgagcctgcaggatcggatcatcttgtag

SEQ ID NO: 32271 - DNA, 111 bp, Zea mays
  Peptide Sequence Number=SeqID_75646
atggcggatgttggggatgccgtggtccacgtcccctcgctttcccttgccgccggcgagcctctggccggctattttgctctccccgtggagatacgtggagcacattaa

SEQ ID NO: 32272 - DNA, 1023 bp, Zea mays
  Peptide Sequence Number=SeqID_75647
atggcgctccctgttgacgtggcgggcccgcgcccgaggccgggcgacgtgggggctcctccgaagctggggtcgagtctgtcttccgttgccgaggccgagcccgagcccctgggtcgggcgaggcggaggctgttcggcagaggccagggcggagtccgagccctggggtcgggcgaagcggagttcgtcgtcttctggctttatgctgatgggggttaccggctgagaattaggcgtcttgagggtacccctaattatggtccccgacactatacagacatcctgaccattctagaccaccagtccgaaccccaccattacttcccaaaccccataacaattctctcctcgcaccaacccggcgaccaccgtaccagagcttgcccaagaaacgcgcgccacggcgctctgcttttgctctgccgtggcatcccccatctggcagtggtagctgacaaccaatcgacgagcggcatgtccgcggtggacgggtcggggtcggggactccaccgccgccgggccaccgcgggtgctgcgcctcgggcgcgacgctggagctggtgggcgcgttcacggcggtgtgcctggtgctgtacggggtgatactgtacatgaactacctgtacgtgcggtggagcggccgcgacggcgtgcaccggacggactccggcctcgcagggctgcccgcgcagaagaggcccgcgggcgggatggacagggcggcgctggcggccatgcctgtgctcaggttcagggctgacgcgcacggcggcgagtctcctgcggagtgcgcggtgtgcctgagcgccttgcaggacggggacgcggtgcgcgcgctgcccggatgccggcacgcgttccacgccgcctgcgtcgacgcctggctctgcgcgcgcgccacctgccccgtctgccgcgcgcgccccgtgctcccgccgccgcagcaggcgcccaaggccggcgccaaggtggtggccgggtcctccggccggcagctggacctggagagccaagtgtag

SEQ ID NO: 32273 - DNA, 483 bp, Zea mays
  Peptide Sequence Number=SeqID_75648
atggcgctccctgttgacgtggcgggcccgcgcccgaggccaggcgacgtgggggctcctctgaagctggggtcgagtctgtcttccgttgccgaggccgagcccgagcccctgggtcgggcgaggcggaggctgttcggcagaggccagggcggagtccgagccctggggtcgggcgaagcggagttcgtcgtcttctgggtcttagcccgagtccgagccctgggtcgggcggagcggagttcgccgtcttccggcccgagtccgagccctgggtcgggcggagcggagttcgccgtcttccgggtcttagcccgagtccgagccctggggtcgggcggagcggagttcgccgtctttcgggtcttagcccgagtccgagccctggggtcgggcggagcggagttcgccgtcttccgggtcttagccccagtccgagccctgggtcgggcggagcggagttcgctgtcttccgggtcttag

SEQ ID NO: 32274 - DNA, 654 bp, Zea mays
  Peptide Sequence Number=SeqID_75649
atggcgacctccgcggcgctctcgaccgccgccaaccccacccagctctgccggtcccgcgctgcgttgggcaagccagtgaaggggcttggcctggggatggggcgggagcgcgcaagccagcggagcatcacgtgccaggcggcgagcagcatccccgccgaccgcgtccccgacatggagaagcggaagctgatgaacctcctcctcctgggcgccatatcgctgcccaccgtcggcatggtcgtcccctacggcgccttcttcgtccccgccggctccgggaacggcggcggcgggacctacgccaaggacaagctgggcaacgacatcacggtggaggagtggctcaacacgcacggtcccaacgaccgcacgctcgcgcaggggctcaaggacaagacgctggccacctacgggatcaacgccgtgtgcacccacctcggctgcgtcgtgccgtggaacggcgccgagaacaagttcatctgcccctgccatggatcccagtacaacaaccagggcaaggtggtccgcggaccggcgcctctgtcgctggccctggttcacgccgacgtcgacgacggcaaggtcctcttcgtcccgtgggtggagaccgacttcaggaccggccaggacccgtggtggagtgcatga

SEQ ID NO: 32275 - DNA, 315 bp, Zea mays
  Peptide Sequence Number=SeqID_75650
atgatggtcatcgcctcagttgctgccacctcgttcgccatcttgcttcttttctctctcctctcatgcctccgcctccgtgccaccccattctcggcagaggacatggggagcatgcacctatccccgtattcatccgacaccagccctgacactgacccacgcagtgactattgcacgtccacgaggacgtttcacagcatgcgcacaccatctttttcgccgtcgttggacgtctcgttcatcttcccagccttcgccctgttcttcctccccaacctgctacccccgtccacggtcgcagccgcgagctga

SEQ ID NO: 32276 - DNA, 132 bp, Zea mays
  Peptide Sequence Number=SeqID_75651
atggagttccttagtgtgatgcaagaaagcaggattccgcaacactgtattatggattttgtttcggaaatgcatggtggaccagagaatgtccaggaagaaagcgcgacaaagagaaagaaatgccaatga

SEQ ID NO: 32277 - DNA, 339 bp, Zea mays
  Peptide Sequence Number=SeqID_75652
atggtgccctccccttcttggtggccgacgccccccctctctctcctcttggcgacgactgggcggcatgtgcctaggtcttcttgggacccttcgccggcgacaagcaccaccagctacgaggacacggacagtgccgcgttggatgctggcaccggcaccagaccggacggacgtaccgcaccgcgtgccagtgccacgccaccgacgcctcggcctcgctcccggcgttgcgtgcgggcgcagaggacggggcggccggctccggagcacaagggccaggtggacggggatggcagcgtgtgcaggggcgacgtcgacgacaatgccagttcatga

SEQ ID NO: 32278 - DNA, 597 bp, Zea mays
  Peptide Sequence Number=SeqID_75653
atgggaaactcgccggcagagacgagagagatgagagggagaggagcgcgcgaactggaggaccgcagggacgtgaggaacaggggcgcgagcaagaacgcggcacaggaactaggcgccggcgttggagaccgcttcggccgggcgcgcgcggccagaagggaggcagagagggagcggcaagggagaccgagcagagaggagggagaaagagaaggacgcgagcacagggagaaacttgggtgcgccatggctgaaactttcaaatccggcgcgcggaagccgaagatgacgccggtagactccgtccaggccatgtgcaccaggaatcgccgcctgcacgcgaccagcagcgaggtgagggagccgggcgagcggcggtggagagcaagcacgaggaagcgcgggtgggatgaagataagggaggcggcagtggcctccacggctgcgcgcagctggatttgtatccagggccggccgaacagataaaggcgagggacagcggcggcctggaaaacaaatcgaaggaaggggcggtggcgataaggaagaagaagatcttttctcccttttttagaaaattacagatattttga

SEQ ID NO: 32279 - DNA, 291 bp, Zea mays
  Peptide Sequence Number=SeqID_75654
atgacgccggtggactccgtccaggccatgtgcaccaggaatcgccgcctgcacgcgaccagcagcgaggtgagggtgccggtcgagcggcggtggagagcaagcacgaggaagcgtgggcgggatgaagataagggaggcggcagtggcctccacggctgcgcgcagctggatttgtatccagggccggccgaacggataaaggcgagggacagcggcggcctgcaaaacaaatcggaggaaggggcggtggcaataaggaagaagaagatcttttctccctttttttag

SEQ ID NO: 32280 - DNA, 786 bp, Zea mays
  Peptide Sequence Number=SeqID_75655
atggctgatgcggatgctagaaagtttgcatgtgaatgcaagcattgggagcatacagagatacacctactctgctatacaagatgtgacttttcaagggatgataagaatttgaagggtaaagacggtgagactaaatcatataggaaaaagatgttgcttaaaaaggcaatgaaagtagtacatcatgcaagtctttcaagggcggggcatgatagagccctagagatgatggatgaactacttttgctactatcgcgtttggagccagatatagaaggtgatgatagtactagtgatggcgaaggcatccatggcgagggggatgatgtaagagacatgccaggagaaattcaattggtgcctagtatacatgaaggtggtgtgtgcgatacccaatgtgctatgccgctacaagtactggaacagaagctagattttaatgtgagtggagtaagcttgagaagaccagataacgcaaagccaaagggcagaacaatcagtgatacagaaaaaagagttattaagttgggcgcaaaaggagtcaagaagaagaacagaaagtgccaaaggtgtggcattgctgatggtcacaacagtcgcacttgtctatctgtggaggagaatatgcttcggttggccagccttactggtcggaagagagggcggcccctaggttctagaacaagggttcatttgatgctccaagttggaatgagacatgcacttcaaaaaaacatcacgggtgtatcacagacaatgattcatctagtggggagtagatga

SEQ ID NO: 32281 - DNA, 800 bp, Zea mays
  Peptide Sequence Number=SeqID_75656
gtgtgggcaatatcaaatcaaactgtgcacttatggaggcttcaattccaagttttgaaagcatgccaatattatgtggcatgaaggagatggaaaccagtcagacgtccaacttggggattcatcaggagctgggaccagagatcagtcaaaatcccatgggaaatcatattaacccagaaaaggaaactaatgaaactccaggatctgaggttaaccaagagcttgtggaaatatgccagggcgcagtggtggaaactgatatgagccaagaaaatcaagctgttccagaggcaggcttagaggttaatgaagagactatggaaacatgtcaggaaacagctgcagaatctgatgttaatccagagaagcaaacttctgatccaggtgttatttaccgctgcagaaaatgccggagaatgcttgcaacacaagaatttgttgttacccatgaatggaagaaggatatgttgcgaacaagctcttttgcatgggatgcaaagctcatctgggacagttcaactgggctgtctgctgctactgattggcacgtgggtttcaccaagctgcaacaactgaaactgggaagcattatgtgggctttcagtttgctgattagtccagttgcaattggatttatgctttttccttttgttcgtggcatcttgtttcctatggtttttatgcagcaaacttatgtgggtaacaacactgagcttgatgatgaatcagatggagaaaatccttgcggcatacagaaaggcttcgaagcaatggtgttccaccccagaacaagctag

SEQ ID NO: 32282 - DNA, 345 bp, Zea mays
  Peptide Sequence Number=SeqID_75657
atggcgacctccggcttgatggtgggggaaagcgagccgggctgcggcctctgcccctccctcaacctcaaggattttcatcaccagggctggggaggggagtgcgccgagttgaggccggcccgggctatcgcgtcggccggactgaactccaactctacggccttctgcccgtccttgcctcacgagttttggcgtgggcgggggcctcctggcagcagcatccgccctgaggtcagtgctgccgctgttcgaccccccggagcagaagtcgtcgtcgtcgccgctgctggagcagggatgtttgtgtgggcgagagttgcttctcgcggaagggacgagtga

SEQ ID NO: 32283 - DNA, 666 bp, Zea mays
  Peptide Sequence Number=SeqID_75658
atgcttaacttgtacccgaggcagcagctccaggcgagaaacgccgacgaggacgacgccgtcgaggctgacggctacaaccccttctacggcattgccgtcgtgtgcctgtccatcttcctcttctgcgcgctcgccgcctcggtcgacgtctggaaggcgctcgccatggccgctctggccgcgctgctgctcggcgtcggcggctgcttcgcgcccaagggatggctccgtcggccaacagggcggcggggcgccagcgcgagcgcggagctggttgtcgtcacggtcagggcaaccggccccgcgcggccggggtacgcgtggcctcgagtggacgcgccgccagcgttcgcgttccagtgcccgctgaaggccgacggcgggtccgttccggcggcggcggctgcaagcagcagcgttgtgtgctcggtatgcctggacgacgtgcgcggcagcgagatggtgcggcaggtgccggcgtgcgggcacatattccacgtggggtgcatcgacatgtggctgcactcgcacaggacgtgcccgatgtgccggtgcatggtctcgctctcgccgccgccgcccaaagcagtggcatcgtcgagggctgcggcagaggcaccgccagagtcatcagctggtgatgcagagttgctgcccgtgtag

SEQ ID NO: 32284 - DNA, 825 bp, Zea mays
  Peptide Sequence Number=SeqID_75659
atgaaggagacggccctctttggccgtgcaggggggctgcatacccagatctcgacttctacaggtggttcaaaaagtatagacgagacctggtggttaggcgcgcatgctgcgagttggtgcagcgatgagctgatcagcaagtgcagcttccgcaccgcccgcctaaacaaggaagccgcgcactgcggctttgcaggcgcaccacggcctgctcatgtgatgacggccatggggtggccctggaggccacagcaaagtgcttctccccacgaagagactgtacctagcggcatgccaggaaccctcgcgctgtcgtctgaagccgcaacgctgcttggaattccttctctatcttctccttgtagcgttggagagggcgggtgggagggcgttgcggcggctgatggcgcggcggctggtggtggtgagggatgggcggctggtggtggtgaggataacctggagctaataccaggtgtcatggaccttcggtccatggggatagctgtcttctccggcgaggttatacctctctgccgcaggcttggttctaggtcgccacaaataacaactgaagagccgttgtggtttttatcaatcttacgacttttgaaagggggaatacttccacaatatctgcccatgatatcattaaatgtttttctaagatacttgttctccacacaaggccctttttatctgatactaatattgtatcatccaatggagatttgtgtaatggatttctgcaacatcaagattgatactggcaactccattgataagactgcatgctcaaataaagcttggaccatgaagtga

SEQ ID NO: 32285 - DNA, 192 bp, Zea mays
  Peptide Sequence Number=SeqID_75660
atgacgaccaacaccaagcacgcctacaagctccaggagtttgtggcgcactcatccaatgttaactgcctcaagatctccagggacgccggctgctacaaggtcatcctcgactgcacccctgagctgcgtgcctactatgccaagtgcggattcgtggagaagggtgtccagatggtcgtctacttctga

SEQ ID NO: 32286 - DNA, 672 bp, Zea mays
  Peptide Sequence Number=SeqID_75661
atgtacaacatgcaaatgaaacagaattgtaatcctagacatggaattacaacatcacctttttatttattagaagaaaacaagcactattcaacttctgttttcacatatgattcaagtcaaaacaacttttcttcttctgaagatgaggacaatctgaatcgaataatcagtggaaatttcccgtatccagttgatcaacatcaccttgacaatccacatgttaaagccaacttactctttcaggattataatgaaacagttgcagtgattggccgttacataagtgagaactacaatggtgttgctctgcatccaattgattttatagataccagttctgggaagcttctggctgaggtgatggaccctgacataataacaatcagcccagtgaacaagctacatccgcaagatgacatcctagctacaggaagctcaaggtctattttcatatggaagccaaaaactgaagatgaacttactgaagaaagagccaaacagaaggccaaggaatacgtatatggatcaagttcccggaagaaaccaaatggcaagcatgacaatagtagtgatgacgactcaggtggtgattctggcggaaagaacaagaaagcaaagaagactcgcttcactcatgcagtaaagggaaagggcaaatccaacgtctga

SEQ ID NO: 32287 - DNA, 810 bp, Zea mays
  Peptide Sequence Number=SeqID_75662
atggaagcttatgcccccgccggcagctaccggccggtgtgcgacacggtggtgttcgtctgcctcgcgtccgcctccgccctcatcgtgttcatggtggccgtctgcttccgcaacgccttcgccgccaacgggtacgcgaccgctgccgtggccacaaacggtgccgccggagccaccgctgccaacggcagaagccggtgcgggctggcgccgtcccgcgctgtcggcgatccccgtgctcgcttaccgccggaggggcgccgggtgggcgcagtgcgcgatctgcctcgccttggtgcgggacggggagacggtgcgattgctgccggcgtgcggccacctattccacgtcgagtgcatcgacctgtggctgcgctctcacgcaacatgcccgctttgccggcgtggcgtcgtcgaggctcccgtcgaaaaggcacacgcatggacccagcccccgccaccgtgcccacggaccgcggatgcacccagcccccgcccacggatctcgcccacaaccgcgcacgcgcgcgcatgaacccagcccccgctgccgtgcctgcggaaatcgcctccctcaaccgcgcatggacccaaccaccgaggcacgccctcgcgctacgcgacgccggttctccgcgcgcgctgtcgaggttctcggcctcctcgctaggtgccggaaggggcggcaggagttgtgcagggccccagcgtcgtatccgtgcgcgtgcaatcgagcgggccgtcctcgtcctcaactggatttgctccgagagcaacgagcaggcaccggaaaaaatcaagctatag

SEQ ID NO: 32288 - DNA, 600 bp, Zea mays
  Peptide Sequence Number=SeqID_75663
atggacaagatttgcaggttcgggccgcttagagatgaacaacacaaggcagttcatgaggttgtggaagttgtgttgcgttcgatgcagcaggatgcaggtgcagaaggagattggtttgacaattggggctatgaagaaccaaaaacaataatactaacctcatccgatgcccaccaatctgagcagccaaggcatgcatacctagccttctcgaggacaattcaggaggtatggtgcataaaaagaatctcagttgttcctcatgtggagaacctccagaggctcacatgttgggctccaaagttgcaatgttccagtattcctcagtcgaaatttacaatgcctacaaaccacagcctactcttgagattcacaatcccgatatgcacaaagatgccccaagggcctggtgcatatggtattacagctgttattattggagctattggctatttattcataagatggaaggggtggaaactttctgatatgatgtttgtgacgaagcgtggattatctgatgcttgcaatgttgtggggaaacaagtggatcaggtttcagaaagtgttaatgttctcagatgcacattgcagtga

SEQ ID NO: 32289 - DNA, 426 bp, Zea mays
  Peptide Sequence Number=SeqID_75664
atgtgcgagcggacctgtgccactatcgtagtcggggccgaggactggcaaggcgccgctgcgaactcggagacaactgatcaagccaaggacggaggcaagaagagcttcgaggtaccaagtgcacgggagaaggtcaaggaggctgaggaacccaaagccaagggtgaagaagaaggcttgcaaagtcaaggccaaggcagctcagtctggcacaccggactgtccggtggtgcaccggacagtgtccggtgcgctaggctgaactctgtcgaactggacgctctcgggaattcaccggcgacgtacggctataattcaccggactgtccggtgtgcaccggactgtccggtgagcaaacggtcggccgggccaacggtcggccgcgcgatctgcgcggaacacgtggccgagccaacggctag

SEQ ID NO: 32290 - DNA, 261 bp, Zea mays
  Peptide Sequence Number=SeqID_75665
atggagtctgactatctctttgaggtaaatccgggcaagggtggctcctccaaaggtggttttcactggaatgaaatgggctaccttgacgtcacatcgggccacatactgagctatttcattcttcatccccttccaccagtatctggtcttgaggtccagacggtgtttgaaccaaaggactccttggttatctgtcctgaggtccgggagctgttccttgcgggctttctccacaagccttgccgtctctgggtctag

SEQ ID NO: 32291 - DNA, 306 bp, Zea mays
  Peptide Sequence Number=SeqID_75666
atgaacgtatgtgagctcactcttgctgtctcacaccccccacaggtcaagaacagcaacaaaaacacccccacctggaggaaaagactccatgctctgtcagggggagatcccacagaagatgaccccactatcgtctacatggccggatacctccacaccctcgacaactactacgatgagctctcctcccactgcacccacctgaagcgtcccgatcctttgggactcaaatgtgatacaattactagtcccaggaggctagtaatcacattcattacttcaaatagtacagagtctgaataa

SEQ ID NO: 32292 - DNA, 2057 bp, Zea mays
  Peptide Sequence Number=SeqID_75667
agaagccgaggaagcacagtgccggcatcaatgaggttgaggaaggtgagctctcaccagttgctgagcccaaggccaggcctgctgccgtggagcatcggaagcaggttgagtcaagtcgtgtaaaggagaagggactggagcaaggtaaggcgaagaaactgaattctggggtccaagcaaatttgggagctcgagctaatggatcctctagtgcatctgatcctaacaatgcagcgagggaggaaggcaagaaaagggatgacatactggtagctgaagcaatggatgaagtgcgtgagaagtcttcaacaatggttacagaggaagtcgtcagtggaggacatcaggtacaagcactacatgcggctaccactgattctagtgagtttgggctaaccacttcacccatgcagcaaggagtgctgcaggaggaagtgaagccacaagaggagactaccaattcggttgacatggttggggagaacacttcctctaccatgctgaaggagggtattcaggaagaagcaacaacaagagataaaactaacaatgataccgatgaagtcagagagagtgcttcatccaattttagtcaagcagtgcaggaagaagtgacggcattacacaagactggcaatgctgctattgaggttggaaagaacatttcacctctcatgcagcaagaagtgctacaggatgcggtggtggagttagacgatactgcacatgcagttgatgaggttgtgaagagtgcttcctctgatatgctgaaggaagttattcaggaagaagtggtgcaacataatggaagtgccgatgttgttgatatggttgacactgacacttctgatctgccatgggaggcaatgcaggaaaaaacagtaatactggatggaaatgaccataattttgatactgtggaacctgtcagttattctggtatgctgaaggaagcgatgcacgaaggagagttgacaagggatgaaactgccattaacactattgtagcaggacaaggtaattcaactgatatggtggatgaagtgatgctcggtaaagcagctgtgcgggaagtaatctccagtgctgtttattctgttggcgagagcaatatgtctaccgggctgcagggagaggtgatggtttctcaaaaccaacaggctcctgaaagtaaagaatttgaaaaaataactgtaatggcagagatggatgagccagcagaagatatcacacctcagcctgtagaagtggaactcgagatacatcattgcaaagaaagaggtacatcagaggaaactcttgtagtagaaaaggatgcatctgctatgcatgaaaatgttgagaaagaagtaaaaggatttgatatcgaggccaaagctgaccgtgcctttatgttccataaaccaatgaaagaacatgctgggggtagtaaggaagaggttgccaatacaaatcttatgacaagggatttgactgaagataaaagaaatggcatagaatttgatgtccttagtaagaaagttaaagtagatcattcatgttcactgggaagaggtcttgactcaacattgcagcgtggtgtagaaccaacacaaacatcaaaatctgcttcaaccactgttgtaaagacagaacatgatacaatcaagctagagaagcttgatctgtcattgagcttatcagtttgtttgcagaattctgaatctaagtcttcgattcctaaaactgcttctctagtccatgcagcattctctcagccgttatcatcatcatctttccacaccaactcagatgggttcccaacttcaataccattgaccaattctgaaacacttgatcacaatcctagttgctcactcacccaacaatcattggacaattatgagcattcagtaggcagcaaacctttctttatgggagttgatcagatgagcaatcacacaagaagacaagctcagttgtctagtgaatctacacagaaggggagtgctaccccactccttcagagagtactccaaatggccatatggcagatactagcacttctgcgataa

SEQ ID NO: 32293 - DNA, 600 bp, Zea mays
  Peptide Sequence Number=SeqID_75668
atggccgagcggccttcttccccaacggcacaggcccggcggcgcagcacaccggcgatcgccgacccagcaactcggtgtaccaaacggacaacggcaaggctatacatgatgctgaggtggaagcaaagcggctggtgaaattcttaccgggatttgaggaaggtagagtccgcgaggaaggcggcaacaccatcacgcgcggatttcggctggttgcaacgaactcagttgagaacgacatcggggagggcgatttccaagccgaggattccgtagcgggcggcgcgcgtcgttgcaacagattcccaaagaagcggaggcggatttggtgcgtggagatcgacccaggcccactggcaagtgaaaccgtgaaaaagaaaaagaaaagggggcgcaagtgggccggcggggtgcttttcagcccagcaggcgcagtgaaggcgcggaaaggggaagatgggccagaaacagatatttcagcccaagtgacggtttacaggggtctcagagatctctcggctatagttttggcacagttgtttgagggcttttcgagcaacgctctggtaagtgtctgggaagcggtgcccgatgaag

SEQ ID NO: 32294 - DNA, 779 bp, Zea mays
  Peptide Sequence Number=SeqID_75669
gagcgtcgacgacaggagcagcagagctcttccttctcgctccacaggagatagagtctgtgaggagctgctcccctgtgcttcctctggagccgccccctgcaccaccactgggcgccccagcttctggagtagctgctggaggagacccagacgacggagatggcgacgacagctcgagccacgacaccgacttctctgctaaccctgagccggaaggatgggttgctcgacccatcactcgcgacgctgctcgcgggtgtcacttccacgatgcgctcgacaccctgctacgtcgggcatttgaccggcatacttggtctgtcgaggtgcggaggcctgttcagagcactattctatctctgagcgggactcagctgaggcagccatgcaagacgctgcacggcgtgcgctttcgcactactgctcggtttttcggtggggcagctgacggtcttgacctgaagtattacccccgccgtccatctggcagcacaggaggcgtgattgtttcacctgtcggtgagggcaatcctaggttgagcagcacagtcaacctagccgccgtgctaaacacggagctggaccatgcattagacgagctgagtagggctcgtgctgagatcgcccagttgcgggctgagcgcgcggaacgtcgtcatctggatggtggttcccccgctcccgttgggattcagcacccgtaccgctcacctcagcgtggacaccagtcttatggcaatcccgactgcaagaccaagataactctagaaccatag

SEQ ID NO: 32295 - DNA, 1641 bp, Zea mays
  Peptide Sequence Number=SeqID_75670
atggctgaacaattctataccgtggcatcggatagtgaaaccaccggggaagacaaatcacaggcttcattccctgatgttgctgttggcattgacattgggacttccaaatgcagtgttgctatttggaatggccaccaagttgagctcttaaagaatacccgtaatcagaaagggatgaggtcatatgtcatgttcaaagatgatactctttcagcaggagttactggaggtgcagccaaggaaaatgcacacgaggaaagagacatcttgtcaggaagtgccatattcaacatgaaacgcctgataggaagaatggacactgatgaagtggttcaagctagtaagactctcccatttcttgtgcagacattgggtatcggtgtgagaccattcattgcagcgctcgtgaacaacatgtggcgatctacaactccggaggaggtccttgccatctttctacttgaactgaaggccttggtggagatgcaccttaagcatcccgttaggaatgctgtgcttacaataccagttgcattcagtcgatttcaacagaccaggattgagagagcctgtgcaatggctgggctgcatgtgttgaagcagcagcagcagcttgtgcatgacaatatgggaagcggcatcgagaaaattgctctgatatttaacatgggtgctgggtactgtgatgtggccgtggctgccacagctggaggtgtttctcagataagagcattatcaggatgcacagctggtggggaggatatacttcagaacataatgcgccatgttcttcccaattttgacggtatatatgctggccagacaatggatagaatcaagtcgatgagcttactgcgaattgctactcaagatgcaattcacaggctcgttagtcaagaatccgtggagatcaatatagatttggggaatggccacatggtgtccaaagttctagaccattcagagtttgaacaagtcaaccgggcaattttcgacaagtgcgaaaagatcatcaaccagtgcttggctgatgcgaagttggtaccagaggacatcaatgatgtcatactggtcggaggttgttcgaagatccccagaatcagaagccttgtcctgggtttgtgcaagaaggaggtctcttacaagaacatagatgctctagaagctgctgtttcaggtgctgcgctggaaggagccatagcttcgggagtgaatgatccttcggggagcttggatcttctcacgatccaggcaactcccatgaacctgggaatccgtgccgacggtgatagcttcgctgcgatcatccctaggaacacgacggttccagcaaggagggacatgctgagaggggaacgtgctgaagataaccatctgttagggtacttcaagattactggaattccggcagcccctaagggagcagttgatatcagtgtatgcatggatatcgatgctgccaatgtcctcagggtgttcgcaggggtcgtcaagcctcaaggcccagccattccaccgttcatcgaggtgaggatgccaacgctggacgatggccatggttggtgtgggcaagctctagcaaagatgtatgggaggattctcgaccttgctgttcttccgaagaagctgcagccatga

SEQ ID NO: 32296 - DNA, 537 bp, Zea mays
  Peptide Sequence Number=SeqID_75671
atgtcattcaagcacaaaaagggaagagggaaaaggaggtgcttcaaatgcaaggagataggccacctcatcgcgtcttgtccatacaaaaacaaggatgaagggacaagaagttgttttggatgcaacaataaggaccacacgatcacttcatgtccggtcatgaagaatcaaggatgtgcatcctccaaggtgaccctcaccaaggaaagtgacacacagcaagcgtcatgtcaggttgagcgacgcttctgctacaagtgtggtaagcagggtcatatatccaaggtatgttataaagtctctaggtggaaaagagaagataagcaagaaatggagcaatcaggacttgggtacctctctttggagacaactgatcaagccaaggacggaggcaagaagagcttcaaggtaccaagtgcacgggagaaagtcaaggaggctgaggaacccaaagccaaggttgaagaagaaggcttgcaagtcaagggtgatcgagttgagaacagctacggcacatcgaggatcactacataa

SEQ ID NO: 32297 - DNA, 1818 bp, Zea mays
  Peptide Sequence Number=SeqID_75672
atgtcggcgcggcgggcggccaagagccagcacgcggcggcgacgccgaggaccatcaacctcaacctggcgaggaggccgggcggcgggaggcccagccggggcgcggggcgcgcgcagacccgcccggcgccgccgcagccggcgaggcaggtgcaggtcaacctcggcgcgctgttcgagatggagcgccgcgtgcgcgggctggagtccgcaccgccatcgccggcgccggcgtcgcagtcgcaggaagacgccgaggaacgggaggagaagtggcagttccaggcggagatactccgcgccgagtgcaacttcctccggatggagcgcgaggtcgcgctgcgcaagctcgaccgcccaccgcggccagatggaggccgcgctcaagggaggaagaaggtcgacgggaagggcgacgtcggcgttgcggcggcgctggacgaggggatcgaggacctcgaggagatgatggaggagctgcgtgtggagaaggagagcgggaggagggcgatgggcggtgcccgtgagctgcagcggagccgcggcaggaacttcgatcggcaggcgtcctcgctccgccggcgcctcgagaagatgccgcctgccaatcccgatcccctcgtcaaggacatccgcgagatcgccctgcccgtccccgcgccaccgccaccgccaccagcggctgagcaaagcggcgacgatgaacgcgtccacggcgccaacacctctgatgtggaaatgctgaggatgaagatggaggggatgtcaaagggcatgcgcgagcggatggcggagtacagccggcgcctggaagccgtcgcctccggcgacaacgctggctgccagtcaaggaaatgcggcaaccggcacagccgaaaggcgagcgcaggcagccagagaagctggagcgggggcagcaccgcgagcaacggcaacgccccgtcggccctcgacgccggcccgcacgcccgcagccgccagaacgtggcggcggagaagcgtcagcagcagcacgtgttcattagcttgttcactactctagcttcgatattcctcgctttctcgggaagcaagattaggagtaccaagggaatgcgaatcgctgacctgggggtacttctgatcgaccgaagttggttgggtctccagttcttaatggcaatccagtactatgcattgacagtaaagctagttggtgaggcaatccattcaaatctgaagcaactgattatgtctggagagtgcaaattggtgggctccgcaagttgcagggactgcagggaaatcatgtggaagataatggagcaagtaaatgcagaatctgatcaatggactgagatgcaagatatgttggagcaggtcaggttggagatgcaagagctgcagtcttccagagatacctggcagcatcgggctatggcttctgacatcagtctccgctccttaaattctcaaaaccgcagaactgacggtgaaatagtggagttactggagtggaaaaatcggggacaggcgtacgaacagcgtgcggaggagctgcacaggaagatttcagagctcgaaagcaagctacacacttccaaagcccatttaccagccccagctgttattcctaaccaaaatcagtggtcagatgcgtgcaagatggagcacccaagaggaaatcctcagcaccagccatccaaggaacccggcaaggaggagatcaagaagcacgtcctcatctgccgcgtgaagcactcgcccagcagcgtgctcccgaagcggtcgccgttccaggagataggcaacatcaggttgccgcggcatcggtga

SEQ ID NO: 32298 - DNA, 236 bp, Zea mays
  Peptide Sequence Number=SeqID_75673
atggggagattcaccaccggtgtgttccgcgcgtacgccaccgcggaacctcgcctgggatgccgttcgggcctcgggaactcgacaagggtggagcgcggtgcgcatggatggtgttgtggtcacccctcaagcatagggagccccagggtcgttccaatttctcatcgtgtccgttttgccgccgtggtcgggtcctgcgtcgtgggcaggctccctccgtacctcaaatcccg

SEQ ID NO: 32299 - DNA, 333 bp, Zea mays
  Peptide Sequence Number=SeqID_75674
atggagctggctaggggcttgggttggatggggcaagggatcgcggcgggttttatgctgcaggaaggtagagtccgcgaggaaggcggcaacaccatcacgtgcgcggatttgcccgaggagtcgcggtcacgccgcaaggtccgcggtttgtttgaaggggacgaaactgacgatccgggcccactggcaagtgacaccgtgaaaaagaaaaagaaaagggggcgcaagtgggccggcggggtgcttttcagcccagcaggcgcagtgaaggcgcggaaaggggaagatgggccagaaacagatatttcagcccaagtgacgttttcataa

SEQ ID NO: 32300 - DNA, 564 bp, Zea mays
  Peptide Sequence Number=SeqID_75675
atgaagaatcaaggatgtgcatcctccaagatgaccctcaccaaagaaaatgacgaacagcaagcgtcatgtcaggttgagcgacgcttctgctacaaatgtggtgagcagggtcatatatcaaagtctctaggtggaaaagagaagataagcaagaaatggagcaatctggacttgggtacctctcaacaagaaaaggttaggataaagaatcaggcacaagtgtggagaagctctcaagagattaactactttcaagatgggaagtacactacatcatgcatcatggttcgattcttgccaaaatgcatactaaaaagtgctaagggatacataatggacatcacaagtaagatgaacattgcaaaagtgagactcgggtgcgtagctcggagacaactgatcaagccaaggacggaggcaagaagagcttcgaggtaccaagtgcacgggagaaggtcaaggaggctgaggaacccaaagccaagggtgaagaagaaggcttgcaaagtcaagggtgatcaagttgagaacagctacggcacatcaaggatcactacataa

SEQ ID NO: 32301 - DNA, 2364 bp, Zea mays
  Peptide Sequence Number=SeqID_75676
atggatcccccgccgcggcggctagccgccccgctcctcctcctgctcctcgcagcggcctcccccgccgcgcgcgcgtggaagaaggacgagttccgcaactgcaaccagacgcccttctgcaagcgcgctcgaacccgcgccccgcactcgctcgaggcgccgctctccctcgccgctggctcgctcgccgtctcccccgacggctctatctctgccgagctctcccacccgtcccgcccgcgacccctcgtgctccgcctctccgtgctgcccccgcacgcgctgcggctccagatcgatgaggactactccaccgccactccgccgcaccgccggttccaagtccccgatgtcctcctcccggacctcgaggcacgcacgctccacctccccgagcccaagaccgccgccggcgtatccaccgtcgccctctcctccgaccttgacgtcgtcgttaagcacgatccgttcgagcttaccctccgtcgcgctgggtcgggcgatcctgtgctctccttcaactcccacggtctcttcgacttcgagccgatgcgggagtccaagccggagaacgagacgtgggaggagcacttccggagccacaccgacaagcgcccccgcggtccgcagtccatcaccttcgacctctccttttatggcgcggacttcgtctacggtctcccggagcacgggtccacctcgctcgccctccgccccacccgcggcccgggggtcgaggagtccgaaccctaccgcctcttcaacctagacgtcttcgagtacctccacgaatcgcccttcggtctgtatggctcgatccccttcatgattgggcatggaagtcggtcgtcgtctggctttttctggctcaacgcagcggagatgcagatcgacgtgcttgcaccaggttgggatggtgccactgcgcaggacaatgggcggatcgacacactgtggatggctgaggctggtgtcgttgatgcattcttctttgttggttctgagcccaaggatgtgatcaagcagtacataagtgtgtcaggcacaccttcaatgccacagcagtttgctatagcgtatcaccaatgccggtggaactaccgggatgaggcagatgttgacagtgtagatgctggttttgatgagcatgatattccatatgatgtgctctggctcgacattgagcacacagatggcaagcggtactttacatgggatcattctgccttccccaatccagaggagatgcagcggaagatagcagataaggggaggaagatggtcaccatcgtggatcctcatatcaagcgggacagttcattccacctccaccaggaggcaacagacaaggggtactatgtgaaagatgcaaatgggaatgactatgatgggtggtgctggcctggatcatcttcctatcctgacatgctgaatcctgagatacgcgagtggtgggctgacaagttctcctatgaaaattacaagggatcaactccaacactctacatttggaacgatatgaatgagccatctgtcttcaatggccctgaggtcaccatgcccagggatgcgatgcattatggagatgttgaacaccgagaattgcacaatgcatatgggtactacttccatatggctactgcagacggacttctcaagcgagacaaggggaaacatagaccctttgttttgtcaagggctttctttgctggaagtcaacggtatggtgcagtctggacaggcgacaactctgctgattgggatcacctgaaatcttctatcccaatggtcttaattcttggtcttactggggtcacgctcaccatgacaccaagagacgtgagccatggttatttggaattccctgaagacaaagaaacatataacaatggtgaggcatttatggtcggaccaagccttttagctcaaggaatatatgaagagggccagaaatcagtgtcggtctaccttcctgggaaggagtcgtggtatgacttgagaaatggatctccatacaagggaagtgtgacacacaagctacaggttttagaagatagtattcccagcttccaaagggctggctgccgagcaggaagtcgttgccacaacgcgctcacctgcaatgctcatgagcgcgaggctaccgaggccacctccactcttgacagcacccatgcaacaggaattcttgacgaaggacatgggcaacctccattacttcctcagaatgtaggttcaatgtccgatctggttgtctactttgacacagactggaccaactatcccgacgcttgcaagttcatctcgggctatgccgtgttccttggggacaacctcgttttctggtcctacaaatgctag

SEQ ID NO: 32302 - DNA, 1350 bp, Zea mays
  Peptide Sequence Number=SeqID_75677
atgcccttattatctccaaagaagttgggtgctaatgcagtaatgctcgtcccttcctctcctctcctctcctcgtctcctcccctccattcgcctgagcctcctccccatctccggatgggtggctccaccaccaccgtcgtcgtcatgctgatcgtcgttcttcactactacatgctactagtagacggcgccagttgggacgaagtttcctcggaggctgacgggccggcgccggcagagggtccagacgacgagctgtggctgcccagggccggaccgccaccgagggtcgtcaacgtcgacgactacggagccgcggatgccggcgtcgacgccgccgaggctttcctcgcggcgtggagcgaggcctgcaactcctccgccgggcggtccgtgttcctcgtgcccgagggcaaggcgtacctcctgatgcccgtgagcttccgcgggccctgcagagctgcctcggtcgctgcaatgataaaggggacgctggaggcgccgtcggaccggtcggtgtggctggagcgcggcctgcaggagtggatcacgttcgagggcgtcgaccgtctccgcgtcctcggcggcgggacgctcgacggcaacgggatgcagtggtggatcaactcgtgcaagctcaacagatcagcggcgctgtacttgaggaggtgcacccggctggtggtggaggagctgcaggtgagggacagcatgcagatgcacgtggcgatcgcctactcgcgggacgtggccgtgtcgaggctgtccatcacggcgccggcgtggagccccaacacggacggcatccacgtgtccaacagcagggaggtgtccataagcaggtgcaccatcgccacaggtgatgactgcgtatccatcgtgactggctcaacgttcgtacgggtgaccagcatattctgcggaccgggccatggaataagcattggtagtctaggagcaaacaactcatgggcccacgtctccgacgtcctcgtggagaaggccacgctgctgggcacgaccaacggcgtcaggatcaagacctggcagggagggtatggctacgccgagagaattagcttccgagacatatcgatgcgcaacgtcactaacccgataattatagaccagaactactgcgactccgccaggacgacgacaccgtcttcttgtcacgaccaggatgtctacctggtcggagaaggaagatacgctacgtgctcttacaggaacgccaccgtcgtacagtctggtacaaacacatgtgtcccacgaatgataatgcagacgactattgctgtcatgcctgaccgccagccaattcaaaaccggctcgccggctggtag

SEQ ID NO: 32303 - DNA, 318 bp, Zea mays
  Peptide Sequence Number=SeqID_75678
atggagacttaccgaaccccgaaaaacagggtgctcgatgacgacatcaatctggccgagaagccgtcgcggggtattcctgttcctaccggcagcaggggaggagaaatccgtgggcgcgcggttggagctcccgggcatcgcgcaatcgccaactcgttgtacccgaaggcgtcgacgacgcagtcgaagtcggtggctggcgcgagcgacgtcgccaggcgatgggaggtcatggcggcgcggtcgtcgttgtcgggggccgtgaggcatctatcgcggcaggggcagggccgcagggggcgagcagcgcggtag

SEQ ID NO: 32304 - DNA, 828 bp, Zea mays
  Peptide Sequence Number=SeqID_75679
atgtcttctcgctcccttatgcatcgcgtctttccaccttccaagcccccggatgggggatacccgccgtctttttgcctcatcgtcggaggaacgcaactccgtgggagttggtacctttcagccatcgttcggcttcaaggattttcatcatgcagcccggctgcacccccccaccagcggtcacccaagatggtgacctccaacttgatggtgggggaaagcgagccgggctgtggcctctgcccctccctcagcctcaaggattttcatcaccagggctggggaggggactgcaccgtgcctggctctcggacgcaagtggcttcggagccgctcgcggcgccggcgtctgccacggcagctggaagaggttcttccgctggcgagatagccaaggccggccacggaccgacctccaactctacggccttctgcccgtccttgcctcacgagtttgggcatgggcgggggcctcctggcagcagcatccgccctgaggtcagtgctgccgctgttcggccccccggagcagaagtcgtcgttgtcgtcgctgctggagcgggtgacggcgcgccgttcgtcggtcttctgttgctccgcaggcccacccctatcgagtggggttactcgcctgttgattatctgaaccgcttcaccaagcatgagtcgccccgtgtcaaggtgacgagtgagagtggggatccccggaccgcgtcgccgtccgaggctaggtcgaaccttgctgaaggtgtcgtcgatgccgagggtgccactgcccccttccagcgtcaagacccgagcctgcaggatcagagtgtcttgtag

SEQ ID NO: 32305 - DNA, 285 bp, Zea mays
  Peptide Sequence Number=SeqID_75680
atgcccaatcttgtcgtgaaacaacctatttggattcaaagttcattggctaaggggagttcattgccagtggaagtgatgatggtagatggtttatatgggagaaaagaacaggaaggcttattaaaatgcttgcaggggatggagctgtctcatcccttcgattgtgctgttgcaacaagcggaattgataacacaataaagctttggacacccgatgcaaatgcctacatctatgggttgctgggaccagaacttgatgtattaagtgccatagagaaataa

SEQ ID NO: 32306 - DNA, 120 bp, Zea mays
  Peptide Sequence Number=SeqID_75681
atggccagcgtactagacgctgttatggaatcttcaaaagtacaaacccctgcttcagcacctgatagaaagggtgaaatcccaaagaaatctagcgaagctgggcttaatcctaagtaa

SEQ ID NO: 32307 - DNA, 291 bp, Zea mays
  Peptide Sequence Number=SeqID_75682
atgaatgttgtggtaacttcacacctactcgtctgtttatatagtgccgcaggtgagaaggtgaatcgtcaaggtcttccgcaccagacaaacagtcacccacactcactgaacggtgggccacaagcatttgagaacaagtccccaacacatagcattcgagaacaaggaccaacattggcgcccaccgtgggtgaactcaatcgaccaccttcggcaagcatcgactttcgcaatgctgccgaagaagacaacggtgccagggaatgccctacagccactggacactaa

SEQ ID NO: 32308 - DNA, 1299 bp, Zea mays
  Peptide Sequence Number=SeqID_75683
atgtcttggttatggtttaagccaaagtataacgacattaagaaaaaagcacagtttcattcttctctagtgcaaaagcttgctttggaaaaggagatggagggtcatgttggttgcgtgaatgctatcgcgtggaactcaagtggttcgcttcttgtatcaggatcagatgacactagaattaacctctggaattataataatcgagagctggtgcatgatattgacactggccattctgcaaatatcttttgcaccaagtttgtccctgaaacatgtgatgaagtagtagtttctggagcaggagatgcagaggttcgtgttttcaatatgtctcgattaagtggcagaaggcctagagaaatttctatggaaccaacaatggtttaccagtgtcactcaaaaagggtcaagaaactagctgttgaacttggcaatcctaacgtagtgtggagtgcaagcgaggatggtactctgagacaacatgattttcgggagtgtagttcctgtcctcgtgcaggatccgctaatcaggaatgtcacaatgtgcttttttttgagaacttccttgagcttgatctacggtgcggagcaaagaagtctttagccgatttacccaaacatccattggcactgaagtcttgtgacattagctctgtttgtccccatcaaatcattgtcggtgggagtgatgcatttgctaggctgtatgataggagaatgcttccaccattgagctcgtgccaaaccaaaacgaagccgccaccttgtagctgcctagctggactgcaggactgcatgaactgtaccagtgccactgccatcgttctggggctaggacaagtggacaacacaaattttaggaagatgacttcaacattattacgtcgcctcctattctcatctgcagtggcacaacaatcaagtgaagcacaactcaagaggaggccaaggcaggcacaatactgctcattaagtgagcagagaactgaacaaccaaaatatcagagcaattgccgtctgaagaggtcctcatctcggtctctgaattctaaacagaggagtggtcgcctactcacctattcagccgctgaacagacaacagaggaggatgggagcacgctggagggggcctctgcagactacagtcggcgcgcgatggaggggcgcagctgctgctcgagcagggggccgccaaagcacaacatggaggcaagtgaggagggcggcgatgatggagaaggggtggctgcgctggggaagagcgcacacgcaacattgcatattgtattggtatag

SEQ ID NO: 32309 - DNA, 972 bp, Zea mays
  Peptide Sequence Number=SeqID_75684
atggcccaagggcacatttccctttcaaagctccgctccgcccgacccagggctcggactcgggctaggtcccggaagacggcgaactccgctccgcccgacccagggctcggactcgggctaggtcccggaagacggcgaactccgctccgcccgaccccagggctcggactcgggctaagtcccggaagacggcgaactccgctccgcccgaccctagggctcggactcgggctcagccccagaagacgacgaactccgctccgcccgacccagggctcggactcgggctcagccccagaagacgacaaactccgcttcgcccgaccccagggctcggactccgccctggcctctgccaaaagacctccgcctcgcccgacccaggggctcggactcggcctcggccatggaagacagactcgacctcggcttcggaggagcctccacgacgcccaacctagggcgcaggccagccacggcgtgcttggtcctttaaatgtggcggacgcggctggcttctgtaaaggccgctttactctcccaagtgctgctggcactctaaatgtggagggctccgggagtgcgctatccgcgctcttcgtccaccagccgccgccaggaaagttccccgcattcgtaccccgcgctggcgactgcttcttccgagcccgagccctcgatccggcgcgcttcgccgccggcatcgaggcaggagggggagaagcggccgtgcggaggcgggtctgtcggcgtagagctcgcaccccttgcaaccgaggccgcgcgaccccccgtaaccgcagatccaagccaggttccacctgttcgtcgccggagagtcgccatcggcaaaaggcttcgtcgtccgccgacttcgtcgaaggcagccggcaaaaggaagagaacctcctcgccgccgtcgtcttcgtcttcgattcggtccaccgaggcagatccacgaacagctag

SEQ ID NO: 32310 - DNA, 480 bp, Zea mays
  Peptide Sequence Number=SeqID_75685
atgccgcctaaagcgctaggagaaatcccaggggtttgctgctccacggggccttacgggggagccgtggaggctgcgggcgtccaggagatcggtgacgctgccgtccgaaaagggccaccgcatcttctccgccgtgtccatctccagctagccctcgccgcttctcccgcgtccccagccgccaggttccgcacgatcgccgggggctggatgggggatgcttctggaaatctggacaccgccaggtccttcgggggtcgatggtcggggacggaagggttgaggtctgggttccaggagcgagaaggctggaagggttccggagacagagagagggcgcccccgggtcgaagtgggggagtggggggcagccggtcggagacgcgtggagccactgctgaccaaggcgtgggctcccagaacactctaaaagattctgtcctctatatattctccgtctccagcagcgtcctctaa

SEQ ID NO: 32311 - DNA, 345 bp, Zea mays
  Peptide Sequence Number=SeqID_75686
atggccaagccaacctccgcgagccgcatccctgacctcgaacccccaatccccaccgtgaccaccgaaagaggagaagaaaggtgccgccgcgggggaattctcagcagagccgccgtccgcgcctcgtgtggtgtccgtgaccttcaccaggaccaggggaaggatctctgcagcatcgcggtctggattagcccctgcagccacgggaattcctcgccggagttcccatcgacgtccgcaccgccccataccgtggtgcgggttatcatcaccgtgagccttggtaaaacaacatccatgtggttcactgtcaccgtcgctttaatcgggactggtttctag

SEQ ID NO: 32312 - DNA, 432 bp, Zea mays
  Peptide Sequence Number=SeqID_75687
atgggcaagaacaacaagcgcaagcgtgagccgactcctccatcagaggattttggtgactcggagtactcagaggaggagttctcctctgagtccgaggggtctccggctcccatccccctgcgtgagtcatctgacgactcagacgactcccaggggctcgcggcggaggtctggacttatattcgggccgtcgagcgctccgggctcgctggctcggatgagtcggagtactcctcggacgaggaggactcgtccggggaggacggtggcggcgatggcgatgacgacgacgacgacgacggcgacgacgacgacgaaggcggtggcggcgacgatggtgacggcggcggtaggggcagcagcggcagcggcaagggcgacgacggcggcaggggcagcagcaagggcagcaacaagaccagtggctaa

SEQ ID NO: 32313 - DNA, 234 bp, Zea mays
  Peptide Sequence Number=SeqID_75688
atggacggcctcgcttccgcggtcaccgcgctccagacctgcaccgatgtcgcgcacctcacgcacgtgctcctgcagttctgcctcgcctggtgcggcaagctcgtccgggacgctcgcgtcgtcaccgcgcactatgcctgctccgtcaagggcctctgcttcaacctcttcatcattaggggtggaatcagagctttccatgcatgttggaggatcacaaatggattctaa

SEQ ID NO: 32314 - DNA, 296 bp, Zea mays
  Peptide Sequence Number=SeqID_75689
atgtacgacaagctccggcgcagcccccgcttggacacggtgcagagcggctgctccgcgttgtccatcgtcaagcaggggacctcatggtcgtcgccaacccaagagtcatcagtactcggtatgtcgcgcgcgttcgacgactactatatcgaggactgtggcgtcatcttggcgccagaggtgacacaggggaggaccgacaacaatgaccagttcgtcatcctcaccaccgttgggcctcggggcttgcgcgggtgggcggacctgggcccgccgccgacgggggaaggcag

SEQ ID NO: 32315 - DNA, 234 bp, Zea mays
  Peptide Sequence Number=SeqID_75690
atgcagatccagtcatgcgtggtctcctttcatgagctgctcttcgggcccctgatggtggcgggctcgaggaggggaacctcttcgctgaggagcgcctgcggcgagagcgcagcttcgggcataaatttgttcctcgagcagctcaaccctggtgattgtacaatcaaagggaacctcgatgccttctcatggaagcacactatgacgaccttcggctttcaacaaacctaa

SEQ ID NO: 32316 - DNA, 327 bp, Zea mays
  Peptide Sequence Number=SeqID_75691
atggcgcggctaggagcgagcagaggcgcacatcgtaggcgcccatggacggagaggtgggcgagccttctcgtcggcgtggaggaggcgaccgtggacggagaggtgggtgaatcgggtggtaaacccataacaatgcaatcttataacttgagtatttacaacagcgatcagcaacttaaacctgcagttaagttggccgtaagcaagaatgcggctgttatagctaactatgcagttctccaccatgggcaccgcgacaaccttgaacatgtcatcctaatggttatccttgctcagaattcagatactaaactgctcacataa

SEQ ID NO: 32317 - DNA, 840 bp, Zea mays
  Peptide Sequence Number=SeqID_75692
atgtggagacttggagacgtgcgctatccgggcgagtcgtcggcctcgcgcgggggtgaaaaatccgagcgcgctgtagtcccgtcgctggcgacttcgattcatctcggcgagggggcctcgcggcgcggctcgtcggcggagccgggcaagctgggctcgaagcggccgtgctcgagcgggtccggcggcggaccgctctcggtggttggaggcaaggaggtggcccgcgaggagacagagatccaagggtccggtgcaaccgtcggtgttcgtcgccgtcgaaccgccatcgcgaagaagctcagaagatccactcagccgacgaaggaaggtgcgcagaaacgcaagcgcatctcgtcgccgccatcttcatcgtcttccactagctccggtgctccacatccgaagagaaaaagatctagggtttatggttacgccaacacacattccatgcttgtagggttcattgagcagttgaccatggattcggagaacgcaaagctccgaagagcactcgctcatttaatcagagtagtggaggagcgttgtgccgacatcgtcgatgtcgtccacggtgccttccaaccagttagcggaccagtcttgaatgaaatgaatcgtgcattagttcagatcgaggacctcgccaacgaccttgatcagcttgcactggaaaaagactgggagatggagcacatgacccctacaccaattgctgaatcatcacaaacagaggatgagcttctgattgattatgattcagagttaaacaatgacgatatcgtcggctacgacgacggccgtgactactccaccgacgacacctatccctactag

SEQ ID NO: 32318 - DNA, 882 bp, Zea mays
  Peptide Sequence Number=SeqID_75693
atggatgaagtgtggtgcggcctggacctgcagctgcaggcggacggcatccacgctggccctgacctccatggccatgaccatgaccccttctggtcagctctggcagagtgcgctgccagcttcctcgccagcgacgccgacgacaccggcggcctggtggcctccgctggcgacgtcgttcacgccaaggcggacggcatggacacgagcagcttcttcgccgacaacgaccaccacggcctgacccagcgccgagacgagcagcagcagcagcagcctgtgcactcgtcgtcctcgctgtcctccaaacgctcgctctccatcgacagcgggggctcctcgtcctccaccctcatcccgccgctcgacggcgccgccgctgccgccttctcgccggcgcccccgcagccgcaggacccgttcgccggggacgacgaggccatcatgctggccatgatggccgtcatctcctccgcgtcgccttcgtcctccgagtcctcgtcgccgccgcaccgagccgccggcgccggcgccgtgcagccgcgcgtacacctgcacggcggggacgacagcgccggccacgtgacggtcaggaccagcagcctcgccgtggcgcccaccagcgccgctgcacggcagcaggacgacgcctgcatggcggcggggagcaacaacagcagccaggtgtaccacatgatttccgagaggaagaggcgggagaagctcaatgacagcttccacacgctccggtcgctccttccaccctgttccaaggatccatatatacacaccattaaaatactagcatataacacctatgctgacattacaatcccgcggaggagaggagaggggtcgacggcggtggcgactacatga

SEQ ID NO: 32319 - DNA, 228 bp, Zea mays
  Peptide Sequence Number=SeqID_75694
atggcgtggcggcgcgtcctcacccaggtacggtggtggcctcaaatcttcgatcttggggtgtctgggcgggatcgggggctgcgttgttgggctctgcggatacgaacaacgcctgcttatatcttgtcggtacacatggctatcttgggagctgcctgtgaggatgtctcggctactgattttggccaaacaatgatccagtttgcgttttgtcaccgttattaa

SEQ ID NO: 32320 - DNA, 528 bp, Zea mays
  Peptide Sequence Number=SeqID_75695
atgtaccggccgaaacccgcgcaggcgcggccaccggcgccgcggcggcaccttccccggcggagcggccgcgggtggtgctgcgcctgctgcctgtggctggcgctggcgctggcgggcctggcgctcctgggcggcgtggcggcgggggcgttctacgtggcgtaccgcccgcggccgccgcgcttcgcggtgacgtcgctgcgcctggccgcgctgaacgtgtccgactcggacgcgctcacctcccgcgtcgacttcaccgtcacggcgcgcaaccccaacgacaacctcgccttccgctacggcgacatcgcggcgtccttcgcctcggacggcgccgacctgggccacgccgtcgtcccgggcttcctccacccggccgggcaacaccacggtcgtccgcgccgccgcggccgccgacgccaacacctacaccgtcgaccccgtcaggcggcggcgctcagatcaggagggtcccacgtcgtgtcggcgcagatggacgcagggttcgctcagatcgactga

SEQ ID NO: 32321 - DNA, 1977 bp, Zea mays
  Peptide Sequence Number=SeqID_75696
gtcatgatgaggttgttcagtcctcgtaaaacaacattgttgtttgtcattcgtgacaaatcaaggacacccctagaaaatcttgaaccaattttaagggaagacattcagaagatatgggatgctgttccaaaaccccatgcccataaagaaactccacttagcgaatttttcgatgtacaagttgtggcactgtccagttatgaagaaaaagaagagttgttcaaacagcaggtttctgatttaagagataggtttcagtattctatcgctcctggtggacttgctggggatcgtcgtggtgtcgtcccagcttcaggattctcgtttagttcccagcaattttggaaagtcattaaggagaacaaagaccttgatctgcctgctcataaagttatggttgctactgtacgttgtgaggaaattggtaatgagaaagtcggcagttttacatctgatgaggaatggcaacaattagaggaggctgttcaacatgactttgttcctggatttgggaagaagatcagcagccttcttgatagatgtttatcagagtatgacatggaggctatttattttgatgaaggtgtcagaagctctaaacggcaacagcttgagtctaaactcctacagcttgtcaatcctgcctatcaatctcttctaggtcacttgcgtactagaactttagaagcatttaatgagtcctttgacaaggctctagaaaaggagggatttgctgcagccgctcgcaattgtactcaaactttcttggagaagtttgataaaggatctgaagatgctgctattcaacaagtgaattgggacacctcaaaagtgaaggataagcttagacgtgacattgaggctcatgtagcttcagttcgagctgctaaattatctgaactttgtgccaaatatgaggcacaacttaccaaagctctggcggaaccagttgaatctcttctagattcagccagtgaagatacgtggccagctattagaaagcttcttcaacgcgagacaaaaactgccgtttcaggtcttcaatctgctgtgtcagcttttgaacttgatgaagcaactgagaaagaactgcttgtgaagctggagaagcatggaaggagtgttgttgagtcaaaggcaaaagaagaagctggaagggttttgattcgcatgaaggacaggttttcaatgctgttcagccgagatgctgactctatgcccagggtgtggacaggaaaggaggacataaaagctataactaaaaccgctcgctcagcttccatgaagttgctttctacaatggctgcaattcggttggaggaggatggtgataacattgagaacactctttccgttgctcttgttgacacctcaaaacctgggactactgataggagtatccaattgaccgatccacttgcctccagttcatgggaaagggttggcgaggagaagactttaattacccctgtgcagtgcaaaaatttgtggaggcaattcaaggctgaaactgaatatacagtgactcaagccttagctgctcaggaagcaaataagaggaacaacaactggctaccacctccatgggcacttgctgcaatggctattcttggattcaacgagttcatgacattactgaggaacccgctttacctgtttgccatatttgtgatttatctcgttggaaaagccatttgggtgcaatcagaaatcggcagggaattccaacacggatttcttcctgccatcctttcactgtcgacgaagtttgtgcccactgtaatgaacatcctgaagagattagccgacgagggtcaagcacctgcagccgccccagagaggcagagagagatggagctccaaccaaaacccaccaggaacggttcttcatacaccaacgcgacgtcggcggggtcatccagcgtaaccacttcggagatcggacctgagtattcgagcccggtggcgcaatga

SEQ ID NO: 32322 - DNA, 588 bp, Zea mays
  Peptide Sequence Number=SeqID_75697
atggcatggtcatggaagcttcaattaattccaagagaaagtacaaaagtgctggtgtatacatgcaccgatcgcaattcgcagaaggacaagacgacggtgctgacgaacgcggcgagctacctcaaggcgctggaggcgcaggtgtcggagctggaggagaagaacgccaagctggagaggcacgtcccccgcgacgacggcggcggcggcacggccgccacggcggcggcggtggcgcaccggagagccagagtgcatgtcgccagggcggcgccgggcgagccgcaggtgagcgtgacggtgatggtgatggtggagtgcgacatcgtcgacctggtgctgcgcgtcctggagtgcctccggtggatgggcggggtggtgagcgtgctgtccgtcgacgccgacacctactcgccgcaggcgatgctcaaggcgctcgccaacatcaagctgcacatcgtggacggcgactgctggaacgaggcgctgttccacgaggccatgacgaaggccgtgcacgacgcgacctcgccttcctcctcgccctcctgcgccgccgtggcccccctcgtggccgcagcctaa

SEQ ID NO: 32323 - DNA, 429 bp, Zea mays
  Peptide Sequence Number=SeqID_75698
atgcccgcggcggccttcttctccgccgcgctgccccctccctcgcgtacgctgtcccgccgcctcgtcgtgtcccgcgcggctgcggccgcggcctcagcatcagcatcctcgtcctccgggtggcaaggtggcgggggagtggagttccagggcaaggtgggggttcctggggctcgggatcatgggcgcgcccatggcatccaacctcatcaaggcagggtaatcactccattcccttcactctgctttcccagctgcagccatggcaggccgctctgcgacgtcacggtttggaacaggaccaagagcaagtgcgatcccctcctcagtctcggtgccaagtacgagcctacaccggcccaagtcgcttcatcttgtgacgtgacattcgcgatgctcgctgatccacaaagcgcggtaaactaa

SEQ ID NO: 32324 - DNA, 351 bp, Zea mays
  Peptide Sequence Number=SeqID_75699
atgaagctgtggaaggagacttccaggagttccaagactacgacgagttctaggtgtgggttagcggcaacccccagtcggctgcctgtgaaggccgcagttatctacgtttcttttccgcactttgatttatttgccagtggtgctggacctgctagtggtggtggtcgacgcgattctagagctccaactccatcatctacgccacgagatcctactcctacaccatctgatgtaatagcgcctactcctactgatggtcaaggtactggtaccaccaacactgatgctgttgaaatagatgaggatgttagggttggtagtaaaaggaagcttaaatctgatgtatga

SEQ ID NO: 32325 - DNA, 100 bp, Zea mays
  Peptide Sequence Number=SeqID_75700
atggagttcagcatcatatcttcatctgcaacttctgatcaattaagcaaggtggagctcacttatggtcgggctcagcagtgggggaaaactaatgcag

SEQ ID NO: 32326 - DNA, 1032 bp, Zea mays
  Peptide Sequence Number=SeqID_75701
atggctgccttacttcggacggccgcggccctcgcgcccccgccctcgtctcccccgtccgcacgggagccgcgtgggcggtgcctgcggctggcctgctcccggcgcgcgccggtccgaccgctccgggcgtggccgctgccgactccgcacgtcttctgtctcgccggggggcggctccggcgcctgggcgccaccgaggccgacgaggccgcgcagacggcgacgcaggtggtcctcaagaggatcgagattccgcaatgtaggacagttctggaggatttagaaaccgaagttactggagactctgctgcagatgacagtgctggaagcacagatgaaactccatctattattgtgacaaccctgcagtcgtacagagaagctcttattaatgatgatgaagcaaaagctgctgagatagagtcctttttactttctatcgaggatgagaaaaactctcttttgaacaaaatcactgctctagatgccgaactagcaactcaacgagaacgtatcttgaggatcagtgctgattttgacaatttcaggaaaaggacagaaaatgagaagcttaacatgatggaaaatgtgcaaggggaacttatagagagctttttgcctgttctcgacaactttgaaagagcgaaagtgcaaataaaggtggaaacagagggagaggagaaaataaataatagctaccagagcatttataagcaattcatcgagattttgaattcattgggcgttgaagatgttgaaacggtcggcaaaccatttgatcccatgcttcatgaggctattatgagagaagaatcatcagagtttgaagaggggattattctccaggaattccgaaaaggtttcaaactcggggaaagactgcttcgcccagcaatggtcaaagtgtctgcaggaccaggccctgaaaagtttggagatgatgacccaacagctgtcgaaggtagtgtggcacctcaaaaggttgacgaagtcgaagacgacggttttggtgccggcgatgcagaatag

SEQ ID NO: 32327 - DNA, 372 bp, Zea mays
  Peptide Sequence Number=SeqID_75702
atgaacggacgcattgaagctcaacgcaggggaaacggatgccgcgaggtcgcgcggtttgggcgctgcgcgcggtcggtgtcgcggtgctcggcgcctgggctgcgcaaggtggggtcgggcgcttggtgtcgcggtttggtgggcgcgggcggctcaggtgcgcgcgacctacgcgggctccggggcggctcgagcacaggggctcggccggcgttgcggctcgggcagggtggccgcggggtgctcggtgcagtgcgtcggagagaggagcgagggtcctggcggctgggggaagaggaagcaggagcggcggcggctttagctgggagaggagggaggcgcctgtgggtggggcccgcgcgcgagtga

SEQ ID NO: 32328 - DNA, 477 bp, Zea mays
  Peptide Sequence Number=SeqID_75703
atgatcctgggggccagcgacggcgaggctcccccgagacgggcgagcagtggcgccctgaggcgggcaagtggcgacggcgctcccctaggaccaagcgacggtgacgctcccgaggcgggtgggcaagcggcgctagcacacccatacccagtggcgacgatggttgcgcgaggcgcggtatacttcgacaacatcggtggtggccatgggcgacgtgggtggcacctgcggtcgtgcgaggctcggtcgtctccggcgagggcggacacgcgaggagtggtatacttcgacaacatcggtggtggccatgggcgacgtgggtggcaccatcggtcgtgcgaggcgcgggcgtgggtggcttcggcgtccttcgatgaccaactcctccgatctgtggccttggcggcgtcctccagcgacgacatcctccaatcctttatttatgcatgcagctgttggttgagctcatactaa

SEQ ID NO: 32329 - DNA, 555 bp, Zea mays
  Peptide Sequence Number=SeqID_75704
atgccgcgaggtcgcgcggtttgggcgctgcgcgcggtcggtgtcgcggtgctcggcgcctgggatgcgcaaggtggggtcgggcgcttggtgtcgcggtttggtgggcgcgggcggctcaggtgcgcgcgacctgcgcgggctccggggcggctcgagcacaggggctcggccggcgttgcggctcgggcagggtggccgcggggtgctcggtgcagtgcgtcggagagaggagcgagggtcctggcggctgggggaagaggaagcaggagcggcggcggcttcagctgggagaggagggaggcgcctgtgggtggggcccgcgcgcgaggtgttacacaatgcaaggagaagaccggggataagcaagagcaagagctcaagccaacaaacaaaatctccaacacctacatcaacaagacgaacaaaaaggccgctacaccatatttgatcaagaagaaaaagaatggaaaggtggtagcaattaaggctaacaagcaagccgacaaaggaaagcgggccaaattcatctgggtgtcaaaggaaattatctga

SEQ ID NO: 32330 - DNA, 924 bp, Zea mays
  Peptide Sequence Number=SeqID_75705
atgcgggacccagcccccgagtcgcaggggagggccttggagcgtgttggagaagactcagcccgcggcgcctgggggcgcacgaacgcaaccccatgggagttggtacctctcagccatcgttcggcttcaaggattttcatcacgcagcccggtcgcaccccttcaccggcggtcacccgagatggcgacctccggcttgatggtgggggaaagcgagccgggctgcggcctctgcccctccctcagcctcaaggattttcatcaccaaggctggggaggggagagtgccgagttgggggtcggcccctgcgtgggcggtggcccgctccttcactcagtgatgggggggagaagcgggtattgcccgtggcgcccggcagctgcagcgtgcccggtcttcagccgcgagtggcttcggggccgctcgcggcgccggcgtccgccacggcagctggaagaggttcttccgccggcgcggcggccgggaccggccacgggctgacctccaacttctcggccttctgcccgtccttgcctcacaagttttggcatgggcgggggcctcctagcagcggcatcgaccctgaggtcagtgctgccgctgttcggccccccggagcagaagtcgtcgttgtcgccgctgccggagcaggtgacggcgcgccgttcgtcggccttccgttgctccgcaggccttccccctcggagtggggtcgttcgtgcctgcggagggggaaccggagttccgttcgtaatggcacttcgaatgccagtgttttttgttcattgcggctgtcggggcctgaacatgaatccctcggcccgttcggccttgttgtctggggctcctctagcttagttaaagagacccctcggctgcccttcggtggaccgaggccaggggtagcgatatcagtatga

SEQ ID NO: 32331 - DNA, 516 bp, Zea mays
  Peptide Sequence Number=SeqID_75706
atggcggccgccgcggcggccgtgggcgtgctgctgccgttcccgttctactacgtgctgtggacccacccgcagcggtgggtggacttgtgcggccgcagtgccgacccgtgccggcggatggcgcaggtctcgcacgccatcaaggcgcttcagctcctcgcgctcgcctccgtctcttcattctcctggcccccgcctctgtactgcccccatcctcctcgccgtcggccagtatctcaacttcaggtatcgtctagtgtaagggtgtatcagctgcttggtgagccaggtacctactacggcgttcgattcggaaagacgatcccgtgggtgacagagtttccctttggttacatcaaagacccacagtatgttgggagcatgcttagcctcgtggcgcttctgtgctgggttccgcttcagtacgtgttgctgtggtgccttggctatgttttcatgatgtgggtcgaacacaaggaagactcagccagtcgtgccaaggtcatctcctag

SEQ ID NO: 32332 - DNA, 870 bp, Zea mays
  Peptide Sequence Number=SeqID_75707
atggctgctcgctacacctacacctacggcgacggcccgggcgggagctcctgcttaaggatcgggctgaccgcgctgccgtgctccggcgtggcgctccgcctcagcgccgtcatcgactgcaccccgggcaaggaccgcatgccgccggtcaccgtcgacttcctcaagaacctgccgctgcagcagagagaggccgaggccccggcagccgtcgccgcccaggtgacgacgggccgcttcacgtgcagcagcggcgacttcctcctcgtcagccagatccagcgggtggaggcgatggtcgcggccgcggggctgccccgggagtgcgctctcagcgtggaggagttcttccgcctgtccgcctccaacgccgttaacacgttctacaaggcgatggcgatcaccgtggaggcgggcgcgctcgggagcatcgtcgtggacgagcaccagcacgagcacgaggagctgccgcccggcgccgtcgtcggggagtgcgccatatgctacaatgagtatctggtcggcggagccacgtccgtgaagctgctgtgcggccacacgttccaccgcaggtgcatggaccgctggacggccgtgaaccggacgtgcccctactgtcgggcgccggtgccggaggagaagcaggactgctgggacgaggacgattattgcgacgactcggtgtcggagtacgacgaggaggacgacggcgcctcgacggtgcccggcccgaccgcagtagccaggaattcacggcctctccgccttactcgactttggagaagaacatcagtgtcccaacttttgttcatactttggagaagaacatcagtgtctaaggccttttcaggaaaaaaagaaacatga

SEQ ID NO: 32333 - DNA, 708 bp, Zea mays
  Peptide Sequence Number=SeqID_75708
atggagcaggagcttgaggggcctacactaggggtccagaagcctcctaaggggtccgagggccctggcgggaccctaggggcatgtggtgtcgtcggaccccacgggtggcaaggaggccacatggtgcaaccgaagcttgccagcgggctcgcgagagccatttcaggaggcttcccctgctgcctccaggaccccagcaagctctcggcgtacagggaccgccggttcaaggggacgcaggaggagtatgaggcggcgctgcttgcgtcgacaacgctgtacatcggtaatatgtccttctacaccacggaggagcaggcctacgagctcttctcccgcgccggcgagatcaagaagatcatcatggggctcgacaagaactccaagaccccatgcgtggtgtggtacatgcatatctatggaaaagcaatgggtacggacagggcaaccccgcagcagaacgccatgggcgacggcgcttgcctctgctatgagagaagtgagcggaagagaggacatggagattctcataggaatgacagaggagattaccagcggaaacgctaccggaacgatgaccggtcagcaccagaggagtccaagagagcaccggactctgatccagcggagaagaatcctagattccgtgagaaaggtgactctgacgaagaagaggatgactacgacggcaaacgtcgtcgctaa

SEQ ID NO: 32334 - DNA, 477 bp, Zea mays
  Peptide Sequence Number=SeqID_75709
atggctgtgcgcccatgcacagtccggccttggccttgggagaagtctccatcttgcccaagcatggcctcggcccacgacatcaacagtagaacgcccaacgccaccaaccctcccgcaaaaaccgatgacaccgggatggctacagaaaccacagggttggtgtcaggtccgctttacaccattccgcatgacacatgggtcggattaccatgcactttttgccatactgatcgctatttcaaccactatgtctcagtcgtctcgtccacaagatgggctcgggtacacatccgagcccccgaccctggcctcggctctctatttggtcaaaatacgggatataggaggggacatcctcctcctaaacaaaggcaacaaccaggacaggggccatcccagtggccatacttctacatgttagaaatatgccctagagataatcatagagatgagcatatttctttgtatccatga

SEQ ID NO: 32335 - DNA, 135 bp, Zea mays
  Peptide Sequence Number=SeqID_75710
atgtatggtttacaggtggtgatgaggatgatggttttggttatgcctatggtaatggttgtctgcgctgcaaccactactcaggtgaagatgaagctgtggagaggaggacttccaggagttccaagagtatga

SEQ ID NO: 32336 - DNA, 339 bp, Zea mays
  Peptide Sequence Number=SeqID_75711
atgaagcttccagagccaggaatcaaactctacctcgccggagacaccggatcaacgtcgccggacttcaccagatcgtcggcgtacgtagaccgagctccacggaaaaaatactgtaatctcgctgacggggagtacatcctcgttccggagcaaggagttgctcaggaggtagcccaagagccagcaccagagcctgccatcgaggatctgcctgccccagctttggaaggttctttggaggacatggttgctggagtgacttggccgtccatcttgccaccaggttggacagtcgagtgggcccctacctcggcagaggaggagcatgaggagtga

SEQ ID NO: 32337 - DNA, 885 bp, Zea mays
  Peptide Sequence Number=SeqID_75712
atgacttctcacgaatcctcggaaggagggaacacacattctcacacggatggacttgcacgagagggctttccccgcattttgtgggaggtactacagggagccggttatacgacgccttcccagtacgcggtgcagttgttcgaggagcaccgggtaccccggtgtagggtgaggatgaccttggagcctcatcctttgcagccgggctggcattcgttggactccgagtctttcggatactcggctgaagacactatcgaggccattgccctccacgggctgacgaccttttgtggctttcaccccttggagctgtccacccatcccattggcttgttccccgctgaaaaggaggacgacccaatgtggaaggatcgagtggagcatgccaaggatgtgtgggccctttacccagggcagactgctcacctgacggtgcgatgcatgaatgccctgtaccgtctgcaagcggtgcgaggagaggcaatgtctcagctaatgggcttggtggaggctaccaagatcaccctggataacagggaggaccttgtggtagacctgtccactgagctggtggagaaagacctccaggtggaacagatggccacccagatccaagagcttgaggagcaaataggagccagggagaacaccatcgaggttctcgaggaccaactcctaaacactcagcagcaacttggggaagctaaccagcacctggatatgcaccatctggagattcaggacatggaggccgaaggggccgacgaggatgttgacatcgagggaggagaggagccgaagcctgcattcagcttggacactgctggctcagggagaccaccttcccccgagtctagtgttgcctcgtttgcccattag

SEQ ID NO: 32338 - DNA, 726 bp, Zea mays
  Peptide Sequence Number=SeqID_75713
atgggcttttgtaagaaattggctagtgcaggaccagtgattgaactagggatccactttagtaagcatttctgcaaaacagagtctttgattattgaaaagccttaccttgactcccacataaccagcatacccttgagagtcttttccttagtcgggctaacgacacgcaagtctacgggaccaattggggtgcctcggcatcaattggctccccgacatgaaagcagcagtagtggaagtaacgaccccatcggagaccttgaagctcgtgtgagtcgacttcaggcagcactgcaacataggactgatgcttgggtcgctgacggtgatagaatcaacgaactgagaagggacatccgacacttgcaggatcaactcgctgatcgagacttagcacttgactgggccgtacagtcccgtttgctaatgtgtgctaaggaagcaagggctcaggcccgagttaaagaacttagctcgactgttgatgacctgcaggtttactgcaacacgttgcacgaggaagtccatatattatactcacaactacacccaagtgagcctgcacaacctgctgaggcagaagctggaccatctcacgttgcgggacgtgcgctgggtggggagttagacctgtttgagcctcctccttccttgaggttggttgatgtctggactcccacacctgacgatgaagccgccaagactgatggcaagcaggaataa

SEQ ID NO: 32339 - DNA, 450 bp, Zea mays
  Peptide Sequence Number=SeqID_75714
atgaactctggtgaacaggtcgctctcgggagaagtctggcgacgatcggctataattcaccggactgtccggtggtgcaccggactgtccgatctgagcaaacggaggaaggagttgaaatagactccaagcccagttcttacgtttgcacttcactacttacttgtggcgacatccagatcctgttccctggccaaagggaactttcatttatgtctcacgccgccgaagaggtagaggcggcttattacaagaagaagtctaatgaggctgagactgaggatgagctattctcccaagctgcagatgaagcagaagccaattattacaaaagaactgttgacaagtgtgatgcaggacaatgcagcaagtggaatgaggttgtcgttgaggattgcgcgacggatgactccaaagatgagttacttatagattgtgattcagattga

SEQ ID NO: 32340 - DNA, 1049 bp, Zea mays
  Peptide Sequence Number=SeqID_75715
atggagaaggtcaagtcggaagaacacctatatacaaaaaatactattgtcaataaaaaattcggcagcacctcccctataaacgtggggctcgacgtctgccgtggggaggcggcgtggggagcccgcggcggcggaggagcccgcggccaagacggcaagcggcggcggaggagctcgctggcggcggaggagcccgcggcggcggaggacgggcgcggcgagggtcggcggctcggcgccaagatctatggcgccgagctaggggacacgtcagcctccacgtcaactcaaactcccgtcgccacgtcagagctcggcgccataggctatgacgccaagctgtgttacctcggcgccataacctatggcaccaagcaaagggaatgggacgagccgcgcaggagccgcgcgctgctgggccacggtcccgcgccgtcgcacagagctgtcgcacgcccgttcaccaccgaagtcgctgtcggaggcagcgtgccgaggctgcctgcgctcgcgctggggccaacggccgcagtgccacggcgcgccgccggggacgcgcccgcgctgcgagagtgtcgcgcgcccaaaaaactgccacaagccgccgacgccagggcctgcgcgccggccgcgagccgcactgccaggggccgccatggccagatccgcgccagtgggtcgcgccctggccgacggggggcctgcctgcgcgcgctggccagggagccgcgcgcgcgccgatctaggcttgcgccgccgggtcgttgcccgcacagaggacggcatggccgctcccatgctcgcgccgtgccgtggctggcctcacccaggctcgccgcgcaccactggggccgccggtgtcatcatggccggatctgccacaccagagtagccggggtgcgtcatgattgttcgtcgtcatcggggtctgggtcggcgtgcatggccgggactggaaggctgcgctcgctgatgcccggacgcagcttgtaccacgtccgggccgtcactcgcggagaaacagctggtgtcgacttcctcgtcgg

SEQ ID NO: 32341 - DNA, 423 bp, Zea mays
  Peptide Sequence Number=SeqID_75716
atggagagtcatgatctccgggcagaatgggaatcacggcttgtgggtggttatgagatcgatgattctggttatgactatggtgctggtaagtggtattctttccgtttggaaagggtgatcaaggaaggtaatcaaattcaaggaagtgcggagaatcaaaggaacaacctgttcccgacgacccatggcagtctagttcaattggacggttcgcgcagctgccccggccttcaatttatagagggcttaggcgatggcacgcaattcgaccgagcaatgctggcggccggagatagggaagaacactggtgcagcggattcgtgtctaccgtcgtggcaacttcaccggcgacgattagacagctattagagagttacggcgacgcgacggaggtctacaagtttgatgtggtgacctaa

SEQ ID NO: 32342 - DNA, 141 bp, Zea mays
  Peptide Sequence Number=SeqID_75717
atgaattggatgaagaacaagtcaagaaaaagaagctcacttcatgggtttgggagcatttcacaagatttggagtgtgaaataaaaactatagctgaagctatgaatgctatggaggtggacgatgatgtcgcgacttga

SEQ ID NO: 32343 - DNA, 744 bp, Zea mays
  Peptide Sequence Number=SeqID_75718
atgccgatgcttactcttcgccgccttgtgaagaaactccggcgtgccgtcattcgtgagttcatccgggcatgtcacctgggagttctcgacgacgaccgtatcggcttcgccatccagagtgccatcatgcagatgagcgccgacggtttcaacggcgtgtggcttcctacacttcgcagaaccgctcgccgtgaaccgccgcgccgtggatcgatgccacgccgtgcacgcgcgccagcagtggcggttgttcctccatcttcgactccagtcgaggcaacgccgacctccaacccgtacccaccaggctactgcccggtccatggatacggacagtgtgtgctgcgcgacgccggaatcctcgacaccacaatcatctccgccctacgccaagccgcagtcgctgccacctctaccgcccggccaacgccaacccaggcagcagaggagagacctcggtggaggccacctacgcctgcgccgcctggatttggccgacgaccaaccatggcggctcggacgggctgcccgccgttcttctccaacgcagtggtcaattcccccccgccttccgcgctcccgatgccgtcccccacgcttctcccgccacgacgccatgccggagtagcggccgcgcgccgcccaggtctacgccccgtcaaggatgaggccgacctccccaacggcagcgacagcggatggttctcctcggacgaggagaaggcggactccatctcctaa

SEQ ID NO: 32344 - DNA, 1149 bp, Zea mays
  Peptide Sequence Number=SeqID_75719
atgccgagagcttcatcgggccctttgccactcaccgacaagcggcacccaccagcctatcaatatgattttcttctgctctctatctacaggggtatcttcatcgcagggagcagcctcgtcggggtcgccatcaaggcgcctaggatcatgtccaagaacttcattagggcgaggttcaccgtcgtagtggattccttcattaaaacaggttcaaggtttggagaagcatttctagagtcagcttcatttcttgcgataagacccctgtttgagctggtctcagggagtcataggcttcctgttattgtcttgcattggtctgttgggtcagaagtacattctaagaaaggagggcatctttttgtttatggcggcgatgatatgggatctaaagaagttctcacggttcttagccaggaatcaacagctggattagaatcaaagagatgcatgtcacgaactgatctcaaacttgttggatcatttgctgatatgattcttattcctgatactagggttcctgataaaagaagaacttctgcactttttattttgacaaatcctgggcagctgaatttttatgatggtggctctctattttctgtgcaaaactcaaaagagggaaatcctcttcctgaagcacagaaatttccagtcgcaattcctacccttgatcccaacataacggtcactggtctttattcgctaaccgaaagtgaatttccaaatatttcagtgaaggtgcacatctataaactccgagaacacactgagggttcaagcttccattttgtgagtgtgaatttaagcaagaaggctctttcaaatggcaagcccactgttgttgagttttatgcaaactggtgtgggttctaccgatacttgttctacttgggcaaaattaggacaattcagttggagtacactgatgctaaagaaagcctcctgcaagctgctcgtaaggcaccaacaacagcccatggttttcggatccagtgcaacaaatgggttatcatagtgaggctgctgcttggtgagattccagagagggctgttttcatgcagaaaggaataaatgcactgaaccatataatgattaaatatgatctttatggcatatcattctttattgtttctactttatag

SEQ ID NO: 32345 - DNA, 208 bp, Zea mays
  Peptide Sequence Number=SeqID_75720
atgggctgctcgtcgtcgcgtcagcagctgggggcgctgcgttcgtcacgacttgcgtgccggcaggtggcccggcgccaggcaggcctcgtcacgacaaatgccatgctcgatcggtcggtctcgtgccgggcgcaactcgacggcagccccaaggccggcggaactggacaacagcaacccgcggagaccggagctgcagcagccg

SEQ ID NO: 32346 - DNA, 1227 bp, Zea mays
  Peptide Sequence Number=SeqID_75721
atggcgacgtcgtctcgtcgggtgcccttgctgctgctgtgcctgggcgtgctggtgtcctgctccttcgcggcgggcagcttggaccaggagctggacatcacgtggggcgacgggcggggcaaggtccttgacaacgggcggctgctgacgctgtcgctggaccgcacgtccggctccgggttccagtcccggcacgagtacctgttcggcaagatcgacatgcagctgcggctggtgccgggcaactccgccggcaccgtcaccgcctactacctgtcgtcgcagggcggcgcgcacgacgagatcgacttcgagttcctgggcaacgtgtccggcgagccctacacgctgcacaccaacgtgttcacgcgggggcaggggcagcgggagcagcagttccgcctctggttcgaccccaccgccgacttccacacctactccatcctctggaaccccaagcacgtcatcttcatggtggacgacatgcccatcagggacttccgcaacctggagagcaagggggtggcgttccccaagagccagccgatgcggctctactccagcctgtggaacgcggacgactgggcgacgcagggcgggcgcgtcaagacggactggtcccacgcccccttctccgcctcctaccgcgggttcaaggccgacgcttgcgtcgccgtcgcgggcggccggacccgctgcggcgccaccgtcggcaccgagggcaccggcgcccccgcctccgccgccggcgccggggactggtacaaccaggagctggacctcaccctgcagcagcggatgcgctgggtgcagcgcaagtacatgatctacaactactgcaccgaccccaagcgctaccagcagggcctccccgccgacctcctcgtcctcgcccaccctgttggtacgtgtacggtgtacgtagtctgccgccgcgcgctgttcgtgttcgtcgtgtctcgtctctcctccccatcgcatctcccgcaaccgccctcattcgcgacgcccgcggcggcgttcgcgtcccccatcgcatctcccgccgccgcgctcgtcgtcttcgcagaggggtgtgaccgcggctccgcaacctcttcgacaaatcccacaggcagcttcaagccgcgactcgtcccgccatctaatctttcgtcttcccagatttccccatcatctcgggttattcgtctgaggatccaagatcaacttcaagcaaggtaa

SEQ ID NO: 32347 - DNA, 306 bp, Zea mays
  Peptide Sequence Number=SeqID_75722
atgttcaaagagttcgactacaccaacactctacagtttgtctccgattacttcaaagagttcgtggactcttcgtccgatgacgattctgaagacgaggtcgacaccatgttcgttttgcaagcccttaccaactgggcattggaggttcaaggaggcgtcgtcggccctcttctttgcctcgtcaagtttcagatgcagcggcctttgtttctgcgtatccttagaggagtgcagcaaaaagtctctactgctctgcgtgtcctcgcatatgggttgcaggttgcctacggacgcagtcgatga

SEQ ID NO: 32348 - DNA, 591 bp, Zea mays
  Peptide Sequence Number=SeqID_75723
atggccctactagcagcccccctaccccctacccttgtctacgccactgcactcctgtatctgcgaaacattggatcgggtgtgagtgtatctaggggtgaaaacgggtcgggtacccggaccgggtaccggatacggatactaattcgggacgttttttcggatacggatacgggtaattttatattcgggacggatacgggtactacccggatagaatcgtctcggatacgggacgagcagtacccggtaaatacccgacagcctcgggcggatacgggtacccggctaccgggtacccgcgccatggatgtcgatgatatttgtgacaacaatgtgtcccatgaagatgaaatacatggtagtagggaggatgttaatggtaacaacagtgaacacatggtggaggaccatgttcctgcacctagtgaggaagaaaaagaaaagaaaggagttggctgtgtacagccagaaggctgcttcggtctggagcaccggactgtccggtggtgcaccggacagtgtccggtgccccaggctgcctcggccgaagaggccgctctcgggaatttgctgacggcgtacggctaa

SEQ ID NO: 32349 - DNA, 399 bp, Zea mays
  Peptide Sequence Number=SeqID_75724
atgcgggggaaggcgaactgctgctccctagccagggtgcagctttccgtcctccacccgggcgacggtcgtgccgcgcgcgggccggccacgtccaggtcctcctcgcaccgtcagctgcgccgggggtcgtccagcacgtcgtacgccgcgagggcgatactcgtgttctgggacggcctcggcgaggatgggagtgaggacctgccgccgcccgaggtggaggtcgttgtctctgctgctgcagaggtcgtcagcgagccacttggagttcgttatcccacgggccccctggtgttggaggttgttcatacccacaggaatggaaccggagtctcatttgtaaggggatatactaggtttttgcctgagcaaaatgtaaccacttcaaggacttag

SEQ ID NO: 32350 - DNA, 141 bp, Zea mays
  Peptide Sequence Number=SeqID_75725
atggccgtgatgggttcaacatcgaaaaagatgtacctctgccaggtgaggaagcaacaaacttttgttgtttctgttccaaggtggttccaaaagaagaaaagcaagaatgaagctgcgggaggaagagttcctccataa

SEQ ID NO: 32351 - DNA, 192 bp, Zea mays
  Peptide Sequence Number=SeqID_75726
atggaggtcgcggtggctgccagtggtgcgccgaagaaggattttgccgagaaggcgaggctagttgtggctagcttactggctcctgcgcggacgaagatggtgaggagcatggggcgcacgagggagagggacgacacactattggagggtgcgcggggaaggagagttgatattgttgagaacccataa

SEQ ID NO: 32352 - DNA, 1020 bp, Zea mays
  Peptide Sequence Number=SeqID_75727
atggaggttcgctgccaaaccagcttttgccagaatgaagatggtttccccaagttgctgagagcatgcacagttcgcctcggaatcaggagtcagccagagtatgatggtcgtgaattcgtcgagcatggcacagagaagtgtgttgtgactatatacattggatctagtccgtaccatgtggaatggagtgtcactgctggtgggcacagattcaaagacacctgccaagtcgtcgcctgcaaggcattgagggccctgtgtcagatctatgaagaagaagtggccgacaccccactcagattctttccgccctttcagagagaccgtcccgcttggatggccaggatgcgtgcattggaggaggagcagctgcttgaggacgaccccacagtcgtgtacctcactgcatacctgctcaccctggatgcacagtatgatttcttggctcggcaccaccgtcagatgattgcccgagcagaagatgcagagaagctcaaccataagctccatgtggatctcacctcagctcaagcccatgtagctgccttggaaagtcatgaagccattgctgttgaagccctgaagcaagccaaggatgagcacgtccaaaagttgatggaggctacttggagagctgaagaccctcagattcttgaaggtcacccggtctctatcagaggagaaaagaaggcttgggaactcccggaaggagccatagtcttggaaggaattccagtcttctctcaggctatggataagcaagggcaccctgaatcctcccaagatcccctgccggagttgtttgagcccctcaccaggaagaagattccagcaccgtcccgtgagatcaaagaagaagctgaaagcaccccgccagcaccgccgccctctgaggagctgcaagagccagtcctgcttgaagaagagttcaaccctgtcctgccatctcagtcgccgccagaagaagtcatcaacatcagctccctcttgacccatccaggagatgtctcagattga

SEQ ID NO: 32353 - DNA, 546 bp, Zea mays
  Peptide Sequence Number=SeqID_75728
atggccagaggggggcgagtcgccggagatggcggcgagcactggccgccgcccgccgccgtgcgaccgtgccgactgccgagcagcagcgagcaggcactgcgggagtgcgggttgcggcagctgagcccagctgagccgtggctggcactgcggcagctgagctgtgggcctgtggcccgtggcccgtgggcgacgccggtcgccggagctcggagcgccgagctgagcaagaaggcggcgcgctgcacggccgccgagctgaggtacgagggccctgggccgatgcccgggtgtccctgggcgtgcatccgcccctggcggcagctgagcccagctgagccatggctggcactgcggcagctgagctgtgggcctgtggcccgtgggcgacgccggtcgccggagctgagcaagaaggcggcgcgctgcacggccgccgagctgaggccccgagccgatgcccgggtgtccctgggcgtgcatccgcccctgtatttagttgtcttctcttgtgatgtcatggttgcatcatggcagtcctag

SEQ ID NO: 32354 - DNA, 996 bp, Zea mays
  Peptide Sequence Number=SeqID_75729
atgcaggtggcatgcaactgcaccaagggggcgcaccctttcgacttcgacgcgtccagcatggggcccaggcccacacgtcatgatagacgacacctttggcaggcgaagcaggcgacgcttcacctccgccatgatgaccgcgtcaaaaaagccgcctcagagcactcgggctccgcgcccactactagtcagaggctggcccccgaagggttcgacagccgcctcagagcacgcagagcgagggatgactctgggtacgtccgatacatggccgaggctcgggctacactcccgagggtgaggtggacaacagccaagtccagcctcgggtgccataggaagctccgcctcgcccgaccccagagctcggactcaacctcgacgccagacgacggtctccgcctcacccgaccccagagctcggactcaacctcgacgccggacgacggtctctgcctcgcccgaccccagggctcggactcaacctcgaccatggacgacggtctccgcctagcccgaccccagggctcggacacaacctcgacgccggacgacggtctccgcctcgcccaaccccagggctcggactcaacctcgacgccggacgacggtctccgcctcgcccaacccaagggctcggactcaacatcgacctcggacgacggtctccgcctcgcccgaccccagggctcgggctcaacctcgacctcggaggagtcaccgcctcgcccgacctcgggctcggaccgaccacgtcacagggggggcatcattatcctacccctagctagctcaggctacggggaacaagaccggcgtcccatctggctcgccccagtaaaacatgtaatgatggcaccccgcgtgctccatgacggtggcggttctcagccccttacggaagcaaggagacgtcagcaaggacccgacaactccgacagctgtgctcctacatggctcaggcgctcctccgacggccatgacatcacatga

SEQ ID NO: 32355 - DNA, 909 bp, Zea mays
  Peptide Sequence Number=SeqID_75730
atggatcttgacatcgcaacaaatttcaccgatctgggtaaccaggagattctgctcatggctgcagagttcaagataagcatcaacgcttacttgtcgggcctactgtactctccagtccgctctctcgcacaagtcatagcgttcaacgaagcgcatcctgtagaggagaggctcaaagattttgggcagccggatctgatcgccgcggagaagaccaacggcatcggcacaagggagagagctgccatccggcggctgagggagatctccaccaatgggctggagaagctgatgaaggaacgccgcctggatgcgatcgtggcgcccaacagcgacgcctcctctgttctcgccgtcgggggctatccgggcatcgccgtgccggcggggtacgatgagcaaggagtccccttcgcgatctgcttcggtgggctccagggctacgagccgaggttgattgagatcgcttatgcgttcgagcaagctacaaaagatccaagcgaggcagcgcagtccgaaaacgccgtagacgagcggtatcatgattgcaaaggcgcggaaccaataccgtgtgaagcaataacgcgcgcgtcgaaccaaacgatctttcgaccagacgtgctctcgccccgtttacggactcgagtcggctacggagtggagtctgggtcccgggattctgggacagagaatgcccaggccttaatcaaggctaggcggaggtccggagccgacacgtgtccagaccttatcgtttacgcttctgttccccgcccaggcagagccccgatgctgccacataaggcgcgccgcctgtccattccactggtaggcggtgtaccgcctctgtatttattgagccctgtccattccactggcaaagcgatgtgccgcctccgcatttaa

SEQ ID NO: 32356 - DNA, 192 bp, Zea mays
  Peptide Sequence Number=SeqID_75731
atggagtgcgcggcgaaagggactggccgcggagccgtgcgccggcggcgtcgccgatcggcggtgcggcggctgcggagccgtcgcctactgctcccgcgtccaccagagggttttggaggagaggaagttggcaccgacgatctgtggaactggagttgttcttggattcttgaaattcggaggggatag

SEQ ID NO: 32357 - DNA, 186 bp, Zea mays
  Peptide Sequence Number=SeqID_75732
gggtatcatcttcgtgatcgtggcactattgcagctccagaacgttatgggttttcccgtgccagtgttgtcattgctgaaccatcatcttataaagaggcttctggcgatgatccagaccatattactcatgtgaaggcgtatctgagtaaggaatttcaaatgtctgacttggggacactctga

SEQ ID NO: 32358 - DNA, 441 bp, Zea mays
  Peptide Sequence Number=SeqID_75733
atggagcagaggaactgctccttcacagcggcagaggaggaggacgccgggatcgtgaggatcaccggcgagggaggcactcgagcggagagcaaggtggcgggcaggagagacgagatgatgggcgtagaagctgaatggaacttgcaaagctccctctgcccttgtgcagagcctaaaaatcctgtgtcttcggccctggcaagctgggaagcatattatcagtggagatcccttcccctgcattcacctgttgctgttttacttcattggccacttactctatatcattgtgttcaactctctcggacccaaactccaagatatgatggtcaggacaccctatgcattcactatttaggtaacaccatttcatcttctatgttggcactcatgtttgacatcctaactcttctcccttttcttgtggaatgcaattaa

SEQ ID NO: 32359 - DNA, 252 bp, Zea mays
  Peptide Sequence Number=SeqID_75734
atgtcaaaaacccccgcggaaccacttcgagcgagggcagcgtctccgccatctagcgacgtcttcggcaccaggttgctgctcagggaagtctcctgcaacacactcagaaacctcgaactgttcgttgtctatgcaaaacagtcattcattcagcacacatgggaaatgacaaaggaacagtacgccaatcatatgcaacagagtagacacaggttcagtggaaaagtacaaacacacaagagaacttga

SEQ ID NO: 32360 - DNA, 969 bp, Zea mays
  Peptide Sequence Number=SeqID_75735
atggatcttggcacacatatgatggtttgtactctccaaactacccaggtcaacaccaactatgcccctctgccacggcaaattcctgtctacccagtggtagtagaggaagttccagtggatctccctcacattcgagtggagcatggagtcatcctggaggacagctcggaggaacttctgtcgacgcccaccccgttggcagagtcactagccttcgcagctaggtcatcgacctcgacattgcttgcaccagccgttcaagctcctgcacccggaggcgacgacccagacgactctggggacgacgatgatgtggatgacaacgacaacgaggacgaagaagaacaagtcaacgaggaagccaactacgcccagcaggactacttcatggggtttggtcctgtcgtcaaacattacacatcaatgttcgagacggggcacttccccaacctgctgcaggatgtgctgcgtgcgttaggaacctacgtccgccccttgtacaaaacaaggcgagtgagcgagcctctccgggcttgctactacatcactcgcgtccacgtcatggtgatggatgcaggggataggggattcaggactctgtctgctcatgagtccctgacaccgctatccacctacgatgcctcggtcagcaatgctgccaaacggaccctgtggtctctcaaccacacctaccggcagcagctgcatgacacaaggttcaggcatcttcctctgcgtctaagtggaggaagccagaccagcatcgttccaggtggagctgggtgcacttggagctggaggatgcccatgccaggattgcagccctggaagcccaacttcaaggatgggatccgcctgaagctcaggtccctgccatggcgttgtctcctccccgcaagaggcttcgctatagggagcccggatccgtcaccaggatgctctagaaattttaagtttatgttgtaa

SEQ ID NO: 32361 - DNA, 177 bp, Zea mays
  Peptide Sequence Number=SeqID_75736
atggggattggacggttacctcaagtggagactcaggggctcaccaacgaaggctggggtgcggtgaggacgtgggtcgacgacgccggttctccggctgcgcaagaaatgctccgggttttcaatccaaattcaaatcaagtttcaaattcaaaccaaattaaacatgtgcaataa

SEQ ID NO: 32362 - DNA, 399 bp, Zea mays
  Peptide Sequence Number=SeqID_75737
atggataagaggggaaagagagtgagcaaatgtgcaaaacatggatctccctccctaggtcgtatctgccccggcgtctcacagttgagtgacagccctaggtgccaggaagaggtctgcgccggacttttgcaaagattcgcacgtttgcgacctctggcgacatttgaacactggaagaaacaaaccgccacgtgttcgacgccgtctgccgcgccagagcacgcccgcgcgcgcgcccaagccaagccagtgccctggtccacgtccgcgactataaaacgcccaggagccttggccgtacccctccgcacgcgctcaagcctcaccggagctcagttcgccgccgtttgcccatacgcgacgtgcccgcggccacccgagcccctgccaccgtag

SEQ ID NO: 32363 - DNA, 210 bp, Zea mays
  Peptide Sequence Number=SeqID_75738
atggaatggatcggcgaagaagctgaagcctttgacgagatccttagcgaccgtgctgaactttcaccgccacccgagccttatgatcccgaagccgatccagccataaaggcggcactagaaaccataagaattatcgaagaagctgttgacgaagctgccaacaaacttctgaacaaagctgccgagaaaattttaaaggaagactag

SEQ ID NO: 32364 - DNA, 363 bp, Zea mays
  Peptide Sequence Number=SeqID_75739
atggagtgggcgtacatcaggtccgtcgagcgcacagggcttggcaggtcggatgactcggaggagttggacgactcctcggactccgaggagggcggcgacagcgagggcgtcggcgacgacgacgatggcgacaacagtgatggcggcgacgatggcagcaggggcggtgatggcagcagcaggggcggtgttggctgcagcaagggtggtgatggcagcggcaggggtggtgacggtgatagcggcgaaggcagcagcaggtgcggcgacggcgatgtcaagggcggtggcgcagtgacgacaatggcggcggcggcgatggcaacgctggtggcagagtgccaccggcttaagtattaa

SEQ ID NO: 32365 - DNA, 756 bp, Zea mays
  Peptide Sequence Number=SeqID_75740
atgacaccagatctaatcgcaaccgtccctgaagatcctacggccccgattctatccaacgaaaacgcccacggttatccaacccaacccaagggagtccaggcggcggcgccgccgccacccacggcggaggtcccaccggagacatacgacacggtgccctggtgccccattcgcaaccccggatggtccaacacgaagctactgacatgggtagagtattggagcgctatttacctgggtgaagatggagccgtgagctgcccacgagcacaatggtttcggatgcgtcaacaagaacacggacgagcaattgggattgtcacggtggccgaacctccttgtctcggccacgggcgcaaccccagtgactatacgaagcacccagagtctacgctgaggcctcgagcgatagcatgggcgagttccacggcggcggaaccttgtccagcagcaatggcgcccatgcttttgcccatgaccgcgacttcgcgcgggtggttgagccgtggagctcaaaaatcccgggacgccgagcagtttgttgaggagggggataagcatgacgagtggggcccggttgccagcctccagagaatgcccgcgctgaccgtgtgtgaatggcgtgtgggcccggtttgcagtgaggctgatgcacgggcccgttgtgtcagtgactctagacgagagggaggctgtgtacgcggcagctgggccgaggggaatgagggcaagtgggccggttctgtgatttga

SEQ ID NO: 32366 - DNA, 1512 bp, Zea mays
  Peptide Sequence Number=SeqID_75741
atgcccctcataaaagtttacaacattgactcagacctttatggactaaaagcttcagctgaaagccgcttcttcctagaggaccttcggcgacgaagcatagacccaacactggcggacaaggtagccgcactggagggggagaaaactgacctccggcgtctactggcgggggagaggagggagaccaatgaggcccttgccaaggcgcaggctgcgcaggcggaggccaatctggcgagggcggagggcaatcttgccagggagcgcgccgagcagctgcaggagcggctcatcgccctggagagccgtgtggagagggtcgaggccacgacgcgcgcggaggcagagcggacgcgcaaacagcttatggattcataccatgagctgggcgcgtggactggtgactttgaagtgccggaccgagagcccggacttcgctgcctggagtgggtgcaggaggagttgcaggcactccccactatcgtggaggggtttatgtcgtatgcctccctggtcacctacgagggggcgatgaacgcgctctcccgcgaagggtgccggcactttgaggtcttcgaccaagccgatgaagattttgagcgagatatctacaaggttgaggaccccatagtgaaggaatccaccggagccatctacgaccggatgtggggtccgcacggtcgcgaggtggtcagggagcgggccgagacggcgagggctcaggcggcgcgtggcgagagggtggatgacttcggggcgttgaacagcgcgctgcctgacccggagccgaccccggcggaggccgtgtccggggccgccctggagccgcccccggagactgcggaaggcgcaccggatgcccccgcatccgctacggccggcggagacctgcccccagagaccgccgaaggcgcgcctgatgcccccgcagccgctgcgccgagtgctgaagatcctgcgacggtggcggcggaggcgacagcggaggcaacggcggagacaacggcggaggctcccgcaacggcagggtcttcgcaggttcaagattttgggcctgcgcacgcaaccgccactactaaatttttggcggcttcgaccgtggatggtggtaatgaatgtgatgggtctgcatctgagttttctgattttgctgactctgggagctcggttgagtggactgaggagtcgtcggaggaggacttggactactttgcggccttggatgtggctgcggcggaggcttcaccgcacgccgtggacacagaagatgtgcctggtcctagcaccgggcgccggcggcgaagggcggttgcgaagtgtagagttagtggggcagagggaggtcggcttcgtgtgagtagggctggccggcaggaactgttgtctttgccgaccgccgtgagtacaggtgaaggggaattgcgaagtctttttgcgggtgaggagcttaggataatgttatttaattatagggagatgggaattattcctaaggttgagccgatgtag

SEQ ID NO: 32367 - DNA, 909 bp, Zea mays
  Peptide Sequence Number=SeqID_75742
atgggcgtggtcgagggcgcacgaacgaatgctggggtgcggcgaggacctgggtcaacggcggcggttctccggctgcgcaagaaatgctccgggcgagagagggggcaagagagctcggctgagggcgcaagtgagcagggggaggtgggcgagcggggcgcgggttctaaaggggcgagggcgtgcggaggtggccggggaacacgcggacgtgggcgcatccacgacgaggacatggactggaggttaggaacgggcagacgggtgagacccacgggcagcgagaggggatccgcgaatgggcggtcaacacttacggaaagggtccaccgggcagcgggagagagtgggcgcgagcgcaagggaatcggcgccgacaggctgaccccacagagcagcgagagggagagagggagagaaggggtgcgtagactggcaccgacaggcggggttcgcctcagctccgccgtcgtcgacctgaggactcgtcgtgtcctcaccgccgttcaagtgtcccggagccttccctcaagcgcccccggggcccccaacgtgcccgcgccctcgtctccagcgaagttccgccacagactcgggtggcaccactgctgggatgcctttacgaatcaggcctgtaacacgcggcggccacgcagggcccgttacaatgggccggatcacacgtgggcctctgagctggacgaggccgcacggtgggatgacgccgtcgcaggccttcgtctggtgccgaatagagcgaagggtgtccctgcccgttttgtctctgtcagaccaccgacatcagctaaggcctcgagcgaagggtggcgtctttgcattcgccccaacattttccctccgaggggccagttcgacaaagtcacctggtgccgaagacgtcgctag

SEQ ID NO: 32368 - DNA, 960 bp, Zea mays
  Peptide Sequence Number=SeqID_75743
atggccaaaaggtaccaactcccgcggagttgcgttcccccgacgacaaggcagaaagacggcgggtatcccccatccgggggcttggaaggtggaaagacacgatgcataagggagcgcgaagacatggtcgccttccaagggggtcaccctccttttaaaggcgactatccctacttgcgtccccagccgtcacgggctgagtcttctccaacacactccaaggtcctcccctgtggcgcgggggctgggtcccacatgtcatgcaagccggctcagagcagaagaagccagaccgctgtgcgcggcggcgcctctagcaggagaagcaggcgacgtttcgccttcgccataatgaccgcgccaacaaagggaccgggaaagggggataccccgaaaaggatccttccccgggaaggaaccaggctccgagcctccctactgatcagaggttcgaaggctggccccccgaagggttcgacagccgcctcagatcgcgtgggccctacacccactactggtcagaggttcgaaggccggccccccgaagggttccacggccgcctcaggctactcgggctccgcgcccattactggtcaggggttcgaaggctggcccccgaagggttcacagccgcctcagacgccgagcgagggatgaccatggctcaccggagacaccatgttcggcgcccatcgagggcaacatggcactttccccccatcctccttgtgaaaaggcgacgcaggggcgtatgtaaaaaagccgagtctgtccctgatcgccctctcgccctgtgcggaggcttgggggctgctctcgcaaacccggctctggccgaaccgttgacagcgtcaacataccagcccgagaacttgggccccgaccgtacacccgggctacggccagctcgcatgagggaacaactagaccagccgaagcattacgcgaggcattaa

SEQ ID NO: 32369 - DNA, 255 bp, Zea mays
  Peptide Sequence Number=SeqID_75744
atgggcatcgtcgttgcgaggacgatgatgggtgatgcagaaacctactacatgcctgcgcctgtggaagagagaacacgaaaggcaacagtgaagaggacaatccaggctcattgtggtccttaccgttttccaccgcgctcttatattaccgtggatccgaaatctgacggctgggtttcactttacataaataaccttcagtacccgttagaaaacagctacaatatcagattcccaactgatactgaataa

SEQ ID NO: 32370 - DNA, 384 bp, Zea mays
  Peptide Sequence Number=SeqID_75745
atggagtctaccaagatcaccctcgataacagagaggaccttgtcgtagacttgtttactgagctagtggagaaggatctccgggttgagcaaatggctaaccacatccacgagctcgaggatcaagtggaagccagggataacaccattgaggttctagaagaccagctccagaacacccagcagcagctcgaggaggcaaaccaacacttggacctgcaccatcaggagatagaggccatggaggcaaacgaggtcaacgaggatgtggacatcgagggaggggaggagccggagcccgcttctagtttggatactgccggctcaactcaccctggaggaccaccttccctcgagtctagcgttgcctcttttgttcgttag

SEQ ID NO: 32371 - DNA, 576 bp, Zea mays
  Peptide Sequence Number=SeqID_75746
atgcaggagctgatggctcagcagaatgagattccgcggcagctcacacagtgtcagccactgcctcagcactatggggtggtgatcaccaccagcgtgccccggcagcagcaacctaccaggagtttctcagcactcagccaccgttgttcaccagggtggaagatccgctcgatgctgacgtctggctcaggccggccgaccacatggttgagtgggaagaattcaagacgacattcagagggcatcatataccagcagacatcatggaccgcaagctcaacgagtttctggcactcactcagggaagtcataccgtgctgcagctaccatgctgacactgatgagaagaagagggacaggttcaggaggggcctcaacaccaagctctgtgaccatctcaacatagtcagggcccatagctacaacgagttggttaacatggccatctcaaatgaggattgcatcatggctcaccaggcagagaagaagaggaagacgcctatgggaggaccatctgcacagcctcagcgctttaggatcgtgtccaacactcagagcagaggacctcagtag

SEQ ID NO: 32372 - DNA, 225 bp, Zea mays
  Peptide Sequence Number=SeqID_75747
atggcgccgccgtgcttggcagttgcaccgccgtgccaagcgccgggggaaagcgcgatccctctgccatccattcaagattggacgtttggtgtgatgttaatttctgctataccatatttgtttgtattgatgcgagtagacaagcaagcctcagaggatccaggtgttcagcaggtggagactactgagcaggagctcgttgaaggcaagttgtgcccttaa

SEQ ID NO: 32373 - DNA, 855 bp, Zea mays
  Peptide Sequence Number=SeqID_75748
atgcagcccagctgcacccctccgccggtggtcacccaagatggtgacctccagcttgatggtgggggaaagcgagccgggctgcggcctctgcccctccctcagcctcaaggattttcatcaccagggctagggaggggaggaggggcggtcgtcgtccgtggcgccggcagctgcaccgtgcctggctctcggacgcgagtggcttcggagccgctcgcggcgccggcgtctgccacggcagctggaagaggttcttccaccggcgagatagccaggaccggccacggaccgacctccaactctacgaccttctgcccgtccttgcctcacgagtttgggcatgggcgggggcctcttggcagcagcatccgccctgaggtcagtgctgccgctgttcggccccccggagcagaagtcgtcgtcgtcgctgctgctggagcgggcgacggcgcgccgttcgtcggtcttctgttgctccacaggccctcccccatcgagtggggttactcgcctgttggtcgtctgaaccgcttcaccaagcgtgagtcgccccgtgtcaaggtgacgagtgagagcggagatcctcggaccgcgtcaccgtccgaggctaggtcggaccttgccgaaggtgtcgtcgatgccgagggtgctgctgcccccttccagcgtcaagacccgagcctggatgtttgtgtgagcgagagttgcttctcgcggaaggtgatgagtgagaaggtgatgagtgagaagagatcttttttcgaggaaaatttcaacgcagagggggttcccccccttttagcccccgagggagggtcggactttgccgaggcgaggccgacccttccttga

SEQ ID NO: 32374 - DNA, 1350 bp, Zea mays
  Peptide Sequence Number=SeqID_75749
atgtgggccgggctggtgctggtggcgttattggccgtatcggggccggcggtggcggcggggctgccgaggttcgccgaggcgcccgagtacaggaacggggaggggtgccctgcccctgtggcgggcgcgggggtctgcgacccgggcctggtgcacatcgccatgacgctcgacgcccactacctcaggggctccatggcagccatctactcgttgctcaagcacgcctcctgcccggagtcgctcttcttccacttcctcgctgcggcggagggcggcggcgcgccggcggcctccgggctccgggccgtcgtggcggcctccttcccgtccctgagcttcgagatctacccgttccgcgccgacgcggtcgccgggctcatctccgcgtccgtgcgcgccgcgctcgaggcgccgctcaactacgcgcggaaccacctcgccggcctgctcccgcgctgcgtgccgcgcgcgatatacctcgactccgacgtgctcgccgtcgacgacgtgcggtggctctgggagacgcggctgcccgccgccgcggtcgtcgccgcgcccgagtactgccacgccaacttctcgcgctacttcaccgacgccttctgggacgaccccgtcctcggcgccagggtcttcgccggccgccgccgcgcgccctgctacttcaacacgggtgtcatggtcatcgacctccggaggtggcgcgtcggcaactaccgccagcgcatcgagcgctggatggagatgcagaaggagaagaggatctacgagcttggctccttgccccccttcctgctcgtcttcgccggcgagatagaggccgtcgaccaccggtggaaccagcacggcttgggcggcgacaacgtgttcggtagctgccgccctctccataacgggcctgtcagcctcatgcactggtccgggaagggcaagccatgggaccgtctcgacgccggcaagccttgcccactggaccacacctggaaggcgtacgacctctacattggcgagaatgattcatcatcttcagggccgtcacggccctgggttgttggaggttgtgactatcatgagttgggaagaaattacttgattggtggtgtacaattcttggacaggatacagttctacacccttcggttcgtcgacccctcacaaactttagctaatgttcggttcctttgttcacctgctgttgagcttgaaatgcagataaacctctcctttacattaccattcacgggtgatggaagctctggaagcagaccacaggaatgcagtaggaaaggaacctatcatttgaaactgaaacctgagaaaaacataaaagctgttttctga

SEQ ID NO: 32375 - DNA, 240 bp, Zea mays
  Peptide Sequence Number=SeqID_75750
atggctacccctcgtgggagggaagctctcaagttctccggacatgctgttggcggctcctccatagactcccaacgggctggacggcggtgcggccatcacgagcctcctggtcctggacccctacttccgaggaaagaagtcgatggccggagagactataggacgacgagcacagaagacgggctagacggcagcgctgccatcacgggcctcctgctcctgtacccctacttctag

SEQ ID NO: 32376 - DNA, 378 bp, Zea mays
  Peptide Sequence Number=SeqID_75751
atggacatgagatgccagagcctaccatgcctcggcacttcactgacccttagacgaaatgccaacagctctggtattgaacatttagctgctcagaagaaacgcaacaacactgaaaatgagggtgaatataaggtccatcgatctgaatcaactaagagtttgtctgcaaaagcttatagtagcagctatgctgttgtcgcttcagaagatgaggatgtctgccctacttgcctggaagaatacacgccagacaatccaaaaataataaccaagtgctgtcaccattttcatcttggttgtatttatgaatggatggagagaagtgatacatgcccaatttgtggtaaggaaatggagttttgcgagagcccatga

SEQ ID NO: 32377 - DNA, 252 bp, Zea mays
  Peptide Sequence Number=SeqID_75752
atgccgatgcttactcttcgccgacttgtgaagaaactccggcgagccgtcatccgtgcatgccacgagggagtcctcgacgacgaccgtgttggctttgccatccacaacgacatcatgcagatgagggccgacggttccaccgacgaaggccatgaaggacgtaccttcatcatttcaatatttaaatatgattatgaacacaagtatgaatgggagtatgaaagaatacttcagaatgaaagtcaatga

SEQ ID NO: 32378 - DNA, 447 bp, Zea mays
  Peptide Sequence Number=SeqID_75753
atggcctcccccggactccagacgccgaggaatatcggcggctgctcactcgggcaactaaccatcttctgcctctcggtcatcctccgagcaatctatgacacaccatcaatagtcgacgggacgcacgaagctccatcaatgcttcacgcgaacgacgacatgagaacgagattcgatgccaagaagagtatgatcgggatcacgacatccctgcatgaagtcatggcaccagggttgagtcggcaacaacttcaactggcggcacaacccgaggatggtcgaggcagcacatcgacaactcccctccctgagaccgacaccacaaccgtcgacaggaagacacgtgtggagtatcggcgcttactccacatctcagggccattcagtggccccctaacttcaaggtctccaacatcaacaagtacgagcctaagcaggacctag

SEQ ID NO: 32379 - DNA, 1335 bp, Zea mays
  Peptide Sequence Number=SeqID_75754
atgacggcgtccttctcttccgtcgccgaggtagcggttcccgctgctgcggcggtgatggcatcagctttgccgcaggagcagcagcaggcgcggccgcggccgcggccgatgcacgctggtggtggtggtggtggcggcggcggcgccaatggccgccaccacgcgtacagccgcaaggacaagtcactcggcctcctctgctccaacttcgtggttctctacaaccgcgacgacgtggagtccatcgggctggacgaagcggccaaatgcctcggcgtggagaggcgccggatctacgacattgtcaacgtgctcgagagcgttggaattcttgtgaggaaagccaagaatcgctacacctggataggtttcggcggagtctcaatatccttgcgagaactcaaggaaagggcgttaagggagaagtctggcttggctcctctgcaaaccgagcagcaatctgctgccacaatttctgaagacgaagatgatgatacattggccaatccgggtgcttatatcgagactgagagattgagtcaaactgtggacaaaccttctggcaaaccgggcgcatccggttgccgccttagatctgatcataggaaggaaaagtcacttgggctgctcacacagaatttcgtgaagctcttcctcaccatggaggttgacacgatctcactcgatgaagctgcaaaactgctccttggagaaggccacgaggagaccaatatgagaactaaagttcggaggttatatgacattgccaatgtcctgtcttcactgaatctaattgagaagatacatcaaggggactcgagaaagcctgcgtttcgttggttgggtagggcaacgctgaacacagaaaatggtgtcacagttgctgtgcccccaccagggaagatcgcatcaaagaaaagagcgtttggaacagaactcactaacattgacatgcatagaagtaatctagattcaaaaaataagaagaaagcaaaacttgtacagagtagtggtgatgtcttgacgaattgcaaattagctgtgcgtagtcggctggggcagggtaaacaaagtggctttgtttatggtcctttccacccttctggcgcaaggaaacatggacttgatggcggcaataagcctgggcaaagggagagggctgaggactgggagagcctttctgcttcatttcgaccacagtaccagaaccaagcactcagtgatctatttgtccattatgtcgacgcgtggaagacatggtattctgaatttgctcaaggcagcagcatcatgcaacaacactttggtcatcctgttaaccattttttgtag

SEQ ID NO: 32380 - DNA, 459 bp, Zea mays
  Peptide Sequence Number=SeqID_75755
atgggcaagagcaagaagggcgaaagttcgtcgcatcactccggcgacaagtggaaacgcgagccgagtcccccctcggaggactttggtgactccgagtactcggaggaggagttttcctccgagtccgaggggtcaccggcctacgcctctcccccggtgtcgtgcgatgactcggacgattcccaagggattgctgccgaggtgtggacgtacatccgagccgtcgagcgcttcgggctcgagggctcggatgagtcagagatcacctcggacgaggaggactccttcgactcgtccgaggaggggagcggtggtgacggtgacgacgagggcgacggcggtgatggaggcgacgacgacggtggaggcgacagcaacagcggcaagggcaacggcggcagcggcaagggcgacggcggcagcggcagggccagtggcaaagcgcctccggcttaa

SEQ ID NO: 32381 - DNA, 330 bp, Zea mays
  Peptide Sequence Number=SeqID_75756
atggcggtggcaggcaagcggaagcagccgtcaaatcgtcagcaagctcacgccccctcctgggacagcgagagaaccctctcccacgacgtgaagacgacgcgcccgtgtaccgttcctcgaacggctcgcgcacgcacaacagctgccccgcgaaccacccgtcccgtcgcattaactctgcggcaggacaggcggcacctttggcaagcgaagcagacgacgcttcacctccgccataatgaccgcgtcaaaaaagggaccgggaaaggggatactccgaaagggatccttctccgcgaaggaagcgggccccgcgccccctactaa

SEQ ID NO: 32382 - DNA, 150 bp, Zea mays
  Peptide Sequence Number=SeqID_75757
atggccggcgcgctgtgggtcggattcaccgtggcctggttgctggattcaaggattgcgcaccggggcgttgtgtttcagtcatcggccatggcgccgccgtgctgggggaagctgccgccggcgtcagaccggtcagggaaggggtga

SEQ ID NO: 32383 - DNA, 360 bp, Zea mays
  Peptide Sequence Number=SeqID_75758
atgaaggggacaccttggaagggtaaaaggatggataatatttttaaagaaatccttaaatccgcaaaaaatggagaatttgtcaaggcgaaggttactccacccttgatgacaaaggacatcatgcctagttccaagagtgcaaagactggatcatcgaaaaaagtagatgataccatgaaaagcgatcttgctctagaaaaaattactacttcaaaggtttacaacatttttgatgccctcaaggaaaaggaaagggtggaagctaaagaccccaaagagggggccactatggtggccgaagaggaaccaactgaaccgcgtgaatatattatatgtcatgcttctggggaaagctaa

SEQ ID NO: 32384 - DNA, 675 bp, Zea mays
  Peptide Sequence Number=SeqID_75759
atggccctgacaacgctcgcgctggagttggagtcggcggccggcgactacagccacagccacagcaggcgggagcgcatgttcgagaaggtggtgacgccgagcgacgtgggcaagctgaaccggctggtggtgccgaagcagttcgcggagcgccacctgccgctgcgcggcgcggcagccagatcgcggggcacggtgctctgcttccacgacgacgcgcgcggcggcgaggcgtggcgcttccgctactcatactggagcagtagccagagctacgtcatcaccaagggctggagccgctacgtccgcgacaagcggcttgcgacgagggacatcgtcgccttctgccgcgacggcgcccggctcttcatcgactgccaacggcggcgcaggactactactcgtagaagcggatcagagggcgcggtggttcttccggccccggcgattggcgccgccgtgccgccgatgtgccagctgcagatgacggtcgtcttcccggacggccagcaccagcaggcggcggtggccatgaaaaaagaaacagctgcggcacaagaggaggatgacaaggaggcgcagcggcggtgcgggcggtgcctacggctgttcggcgtcaacctgctggacgagcttcgcacggagccgctgctgcttgatctgcagctttga

SEQ ID NO: 32385 - DNA, 318 bp, Zea mays
  Peptide Sequence Number=SeqID_75760
atgatgctgaacgagagatgcctccgtgtagtgatctttcgatttttcagacaaacggcaaagtcgttggtccacccaaggcatatcacctcagtatggaagatgccgccaaaatcaaagaaaatgccgccaaaatcaaagaagtcagtgaaggggctgttcaagggcctgggcctttttcagggcagttcttcgagcagtagcagatgtcgagagctgttgagcgcggatgagcagcacactgatgagcagcacattgaggaggagcagcacaatgaggctgagcagcacaatgaggaggtggagcacgtgacatag

SEQ ID NO: 32386 - DNA, 198 bp, Zea mays
  Peptide Sequence Number=SeqID_75761
atggccgtcgtcgagcttctgccgcgtccgttgcctagatctggccgctcgagtgtgtctgccctcgcccgtgctcctgccatcgggcccgacaatgagcagcccgtggttcctgaatgtgttgccgaaggtcttcctgagcaacaacctggtgaaggcaagtgtcctctgacctactatgtcctacttactttataa

SEQ ID NO: 32387 - DNA, 336 bp, Zea mays
  Peptide Sequence Number=SeqID_75762
atggcgcatggatccacgggttctcgatgcggcaccacacgaggatatgggaggggcaaggatggcggctgggcgtatatagctaaggcacagagtccgcgggtgcagctgttacggccaccgcagaactcacaaagctgttggcacagggttgcgaacgggacgaaggtgttgacccggtgggacccacggaacggcggcttaaggcgcgggtgcttgcgttgtgctgttgagcatctaatgagcgggccccgccaagcagtgagaaggcgtgtagtgcgtgcggctaagtggatgcaaagtgggccccatcagtcagctggcgcgagcgcgtag

SEQ ID NO: 32388 - DNA, 102 bp, Zea mays
  Peptide Sequence Number=SeqID_75763
atggcatggggcactcgcgggcgcgagttgggcgtgctcccgactgccagccgagggcccgaggcatttcatgccataagtaaggagttgcttacctcctaa

SEQ ID NO: 32389 - DNA, 273 bp, Zea mays
  Peptide Sequence Number=SeqID_75764
atggtggcacgcgaatgtaacaccccaggtgttacacagggtgtccaccccagagctaccccttttaacccattattacatgaagatttatatgggcaaagtatctcaaacttggaattcaaggtcctaatcaagtgcaaactatcttggatatcatgccctagcttgtcatgcacatctagggtagctccgaccacctccgacgccgacgtgaccgtcgcgacctcccggacgtcactgaccaccccgccggagctctactgccgccgataa

SEQ ID NO: 32390 - DNA, 324 bp, Zea mays
  Peptide Sequence Number=SeqID_75765
atggaagcccctctcctcggcttcctcctccctctagatctccccccacgcagcaaggatcgagaagatgaggagaacgttgaattgaagagggagataggatcaaggagatgttcttccccatctcttcttgaagattttcttggggaaaaccctaggttgtggatcatgaggattaaaggattagaggaaccattcaatcccttagctgatccaaaaatgaaggaaacgctggacatcataaacatgactgaatccatcgacgacgaagccgtcaacaaattgctgaacgaagttgccgagaaagttcttaaagaggaatag

SEQ ID NO: 32391 - DNA, 384 bp, Zea mays
  Peptide Sequence Number=SeqID_75766
atgtccctcgcccacgcgaccaatggacagatggggccgcgtgtcagtcgacgcatgcgcgctcccctgcgtgaagactcgctgccacaacccacaaccgactgcgcgggatccgcggccatcaggctccacgtcctgctccctctccccctatccaaactgaagcgcgcacgcagggaatcgcaacaacctccgaaccgcgtgctgacaccttggactcgggcgttagccccctgtcagctacctccttggccgtccacccgtgctcggctgttgcaacggctcgccggaatactcgccaccagctcggaaccacctcggccgagtcttcgaggatcggtccacgcttcgacctggggatataggctgcgcccaagctgctag

SEQ ID NO: 32392 - DNA, 147 bp, Zea mays
  Peptide Sequence Number=SeqID_75767
atggcggcattcaccccgggagtgtctaagggccttgcaaaccctggcgacatgggatacacgacttgtgggtacagggtacaacctctgcagagtgtaaaactcgagctcacgggcatgatcagctttggactctcgcatgattaa

SEQ ID NO: 32393 - DNA, 219 bp, Zea mays
  Peptide Sequence Number=SeqID_75768
atggtggtagagctccggctgcacggggagaactccggtgagcatggaccggacagaccagaggggctaggagcgaaccgatgggtgtcccgagttgctgatggcgaggcggaactcaccgaggcaatgggcgcggcgcagctcaacggcggccgtagaacagacgttggactttgggtcttcaattcaaattcaaaccaattttcaaattcaaactaa

SEQ ID NO: 32394 - DNA, 303 bp, Zea mays
  Peptide Sequence Number=SeqID_75769
atggggaaaggtctcgcgagagttaaagcttatgctcgaggcgcactacgggacacagggggggtagacgaaggcacgacgagtcgtgccaaggcatgcgcactacgcgggaacgctcgtgaggccgcacgcacacgccacggactagccgtgcgcacgtcgggaccgaacgttagccgggctcaaagccgcgtgccatatgcacgctgggccaagctcgaggccttgcaggggccgacacgacctgagctatgcacggcggggcgagcgggcatccgcgccggtgctatcgagcataattga

SEQ ID NO: 32395 - DNA, 459 bp, Zea mays
  Peptide Sequence Number=SeqID_75770
atgatgtcgtccacatatgtgaatatatttctgccaacctgccccgtaagcactgtcttggtaagcctggagaaggtggacccagcgttcttgagtccctccggcattctgatgaagcaatatggtggagggggttgctgtcttcgccatggaagaggtagtagaatcagtgcggcggctgcgcacgcccccgacccctaccgcgagttccatttccgcggcactgggggggatattcctagcgacgaggggcgtcagcagcggggtgctggttggcgatgttgtgcacttgctgttgattgcggccgtctcgcccggagtcttgctgcggagtcctcgtccacgtgcggctggactgtggagcatccttgggcttcctttgggactcaaccttgcgctgaggacgtcggcgcgaaggccactgatagcgtagtggatagcgatctggtcatcgactga

SEQ ID NO: 32396 - DNA, 1116 bp, Zea mays
  Peptide Sequence Number=SeqID_75771
atggagagtcatgatctccgggcagaatgggaatcacggcttgtgggtggttatgagatcgatggttctggttatgactatggtgctggtaagtggtattctttccgtttggaaagggttgtcagcattgcaaccactgctcaggcgaagaagaagctgtggaaggagacttccaggagttccaagactacgacgagttctaggcgtgggttagcggcaacccccagtcggctgcctgtgaaggtcgcggttatctacgtttcttttccgcactttgatttattatggctcgacttagacacactgcacgaaagtccgtcatccccttcttaccctcccgccgccctaccatcactgggcgccccagcttctggagtagctgctggaggagacccagacgacggaggtggcgacgacagctcgagccacgacaccgacttctctgctaaccatgagccggaaggatgggttgctcgacctatcactcgcgacgctgctcgcgggtgccacttccatgatgcgctcgacaccctgctacgtcgggcacttaaccggcgtacttggtccatcgagtatcgctgtgtggtctaccagcatagtcgcggggtctacccggaccgctgggaggcaacctgcttggtgcgccgtccggagaacagtctccagggtgcggaggcctgctcagagcactattctatctctgagcgggactcagctgaggcagccatgcaagatgctgcacggcgtgcgctttcgcactactgctcggttctcggtggggtagctgacggtcttgacctgaagtattacccccgccgtccatctggcagcacaggaggcgtgattgtctcacctgtcggtgagggcaatcctaggttgagcagcacagtcaacctagccgacgtgctaaacacggagctggaccatgcgctagacgagctgagtagggctcgtgctgaggtcgccctgctgcgggctgagcgcgcggaacgtcgtcacctggatggtggttcccccgctcccgtcgggactcagcacccgtaccgctcacctcggcgtggacaccagccttatggcaatcccgactgcaagaccaagataaatctggaaccatag

SEQ ID NO: 32397 - DNA, 351 bp, Zea mays
  Peptide Sequence Number=SeqID_75772
atgggcccagtcgccagtgacagcataggagctgaagcgcggcccccgagcgacagtggcacacgacacgcgcggatggctctgggctgcgcagtggacgcggatctcaaattagatattcaaatttttgtttattcaaacttcattgcttacatatttgcgccgggtgtactcgtgactccacttggggcgttaagcataatcgtaagttcagtgttggcgcactttgtgctcaaggagcggcttgagaagctcggggtccttggctgtgtgtcgtgcatagtaggttcagttgttgttgtcatgcatgctcctaaagagcatatgcctaactctgtcaaggaaatctag

SEQ ID NO: 32398 - DNA, 1152 bp, Zea mays
  Peptide Sequence Number=SeqID_75773
atggccgccgccgccggcctcccgcggtggctgctgctcctcgccgtggtcccggccgtcaccgctgcggccaccgccggcggagaggggagggcgccggcgctgttcgtgttcggtgactcgctcatcgacagcggcaataacaacaacctcgcgtcgcttgccaaggccaactacttcccctacggcatcgacttcgccggcggccccaccggtcgcttctgcaacggctacaccatcgtcgacgagctcggtacgtactctcgctcagtcgctcatcccttgtctcttgaccgcattatgcatgcaactgcggcatgcatggaggcagtcgtcattgatgctgtcgtgttcgtagccgagctgcttggactgcccctggtgccaccctactctgaagcctcgtccgtgcagcatgtcctgcagggcgtcaactacgcttctgccgccgccgggatcctcgacgacagtggcggcaactttgtcgggcggatcccattcaaccagcagatccagaacttcgagacgaccgtggcacggatcgccggcgcggcgggcgcggcggcggcggcggacctggtggcgcgctccgtcctgttcgtggggatgggcagcaacgactacctcaacaactacctgatgcccaactacgacacgcggcggcggtacggcccgcagcagttcgcggacctgctcgcgcgccagctggccgcgcagctggccaggctccacggcgccgggggcaggcgagcctcgcggggcggtgctcgcgcgccgtggaacgacctcgtgctccccttcaacgccaacgtgcgggcgctggtcgaccgcctcaacggcaacgctgccgccggccttcccggcgccagcctcacgtacctcgacaacttcgcggtgttcagggccatcctcgccgacccggccgcgttcggcttcgccgtcgtcgaccgcgggtgctgcggcatcggcaggaacgccgggcaggtcacctgccagcccttcatgccgccgtgcgaccacagggagcactacgtgttctgggacgcataccaccccacggcggccgtcaacgtcatcgtcgccaggctggtgctccacggcggcgcggacgtcgtctcgcccgtcaacgtccgtgagcttgccggcatgtga

SEQ ID NO: 32399 - DNA, 342 bp, Zea mays
  Peptide Sequence Number=SeqID_75774
atgaagatgtggaaggagacttccaggagttccaagactacgacgagttctaggcgtgggttagcggcaacccccagtcggctgcctgtgaaggccgcggttatctacgtttcttttccgcactttgatttattctgcagtgttgtctgtttgactgctgaccaccatatgggatcaagatcaatgccctatgctgtttcacatgactacagagacagaggtatggctggggtacaaagtgaagggtccagtgatctcagctctgctggaagtatccaaggtttggactgttgtgtgactatctgcaagggcagacttatctgcttgcccttgcctaaataa

SEQ ID NO: 32400 - DNA, 81 bp, Zea mays
  Peptide Sequence Number=SeqID_75775
atggccagggatcctcgacgggtttttcaactgcgttgtgctcgttccataatcttcagaggattcaagtcaaagaagtaa

SEQ ID NO: 32401 - DNA, 2070 bp, Zea mays
  Peptide Sequence Number=SeqID_75776
atgccgtccaggcgcgcgctacggcggtctccgccgccacgacagagcccgcaggcagcggcggacgcgaaggaggcggcgagcccgtggctaccgtcctcatcctccacctcgtcgtcttcctcctcagcctccgcgctcgtcaggcgctccgccgccttctcggcggctgggccgaggggcggatcggggacgcgcgtgtacccgttgcgggacttcccgggcggggacgcggccgcgctcggcggtgcgttccgggacaacgtgcggtggctcctgaagcagtggagctgcgttccgggttccgtgtcggcgtggcgcgcgctgctgtcagacgagcggacgggcgccttagtccccgtcatcgccgtggaggagctcgcggcatcgtcgcccttgccgctctgcgatctctgtcgctgcgccggttggagccaccactgggtgtcaaagcggaagtaccatttcatcattccggcagtggtcgactgggaccagccattcagggctgatgggttacttgggcacagcgagcacctcctacatggtctgatccatagtaatggctttggtcaccttctcaccctccgtggtcgtgttggtggctccactttcctctctggctgccagatcatggatatatgggatcaactttgcacagctctccgtgtaagagccgtctctgttgtggacttgacccagaagtactctgtggacctccgcctcctgcttggagtggcacaaagcaagacttggttcactcgctgggggtactgccttgccaagggttgtttcagcgtgtctaggtccacttatactgctgcacttgaagcccttgctgccctgcctgttgattgtctccgtagtcgtcatgtccgtcgtgtggtcaccatctaccgccgcctctccagcaaacctctggttacagtccgcgagtttctcctctgcctgcttgattggaagcaccgtgagcccccgctttctcctcctcccgtgaaggcatcctcgcggctgatgttcttgctgccaaagtcatgtatgatgaagaggcccaggcagccatgtcaacgctttgaggacgtagttgacctgcttgagtgtcggtggtcaaagaagcgtctgcttagtgctgcaaatgttgttgttgcaaagctgcgagagcatgcggatggcacaaagataacacggcaagcagtgcgagatgctgcaaggggtggcatcggtgacactggtctcctggacttcgtcatcaagtccctcaataacactgttgttggtaaccacattgtgcgccgcgtgcctgaccctgagaatcgtgtgcttcacttcagccttgaggaatatgctgagcctgagccacagccacaggcagatcatgagcttgaaccagtggaacttgatgcagagaacacccctcctgcagtccgatggccaaacgcagccgaggcggagcgggatctgcgtgctgtgtaccgagcaatggtgggggcacgcagtgaagcagcacaggctgtactggactgcaagcactgggtgaaatggtggggcctcagggacgagtctgatgaccagctaaggttccttgttgagtggcgaccacagccatgggaggctactgaacttacaaggccaatgccgcctggggatattgtggtagtaccactgcatgcatccataggcgagctgcttgttgaggcagagcatgcactgagggatacatactgcttctttgagaatttccaggccgagtcactggatggcattactggggataaatgggatccggtgatgcttggtggagcagagtctggtgacaccattggtgtgcacggccacggagctgacatggagactgggctgcggtgccagggaggtgcagatgcgtgggaggtgcagtgcgtttgtggtgcacaggacgacgatggggagcgcatggtggcatgcgatgcatgcaatgtctggcaccatacacgctgtgtcggcattgcagatggtgctccggtgccaccattgtttctctgcatatcctgcagtggcgcgctaatggccgctggaccaatttctggatga

SEQ ID NO: 32402 - DNA, 279 bp, Zea mays
  Peptide Sequence Number=SeqID_75777
atggctggaggatgctgggaggatgacattggtagctacggctgcacatcttgcccgaccgagcaaggcggcgttggcgaaggtcgcgacaaagatcatgacgacctggcggcgacaacgaccctcacgacgctgtcgtcgaggaccttgccttggccggcgaaaaccagcacagtgaggccggacgtctctggcggggccggggcggtagcaggtgcccgtcacagagaggaagcggacacttcaatagcacgggagagagaaacgatcgacgtgtag

SEQ ID NO: 32403 - DNA, 627 bp, Zea mays
  Peptide Sequence Number=SeqID_75778
atgtccggtgcaccagaggactccaactcgaactcgccaccttcgggaatttctagaggcactcgcgctataattcaccggactgtccggtgtacaccggacaatgtccggtgcgccaaggaggagcggcctcaggaactcgccagcttcgggaaactccaacggctagtccgctataattcaccggacatgtccggcacgcccatactggcgcaccggacaatgaacaggagatgtccggtgtgcaccggacatccaggcgggcctacaagtcagaagctccaacggtcagaatccaacggcagtgatgacgtggcgggggcaccggacatgtccgcaagcgagacaggctccgacccccacacagaactactgcaggtgctcctgcttctctcgtgcggtcgtgtcgtgtcatacggcttctctcttcttgcccccgggagacgcagcccgcattggccaacaactgctgcctttgcaagacagcaagtaatcttggagaatgtgcaggccgagaccgtacacatggccgtgacaatgcatgaacaggtcaacagcacaacagacaaaacagttgctccttctggaggctttgcattggctgccaaagcagaactgcgcaagtaa

SEQ ID NO: 32404 - DNA, 642 bp, Zea mays
  Peptide Sequence Number=SeqID_75779
atggcgcaaatggaggagcgcttgaccgatgtgctgactggccgtggtcgcgagcaacgactgcatcctcatcaacgtcggcaccgactgtaccgcggaagacgacccccctactctgtcaccgccgccgccgaggtcgattctctccccaaccccaacgacgactgcatcgaggagttcagcccaggcttcgatggagagccaattttcgacgaggagcccaacgactccatcgccgagttcgtcgatgtctccttccacggcggcaggatctcaatcggtggtatccaccacccggcctccaccatgccgaggctgcacgtgagcgtggtcgtcgacgactgcatcgaggggttcgacgtgttggacgaggacgccgcgagcgccaacgcggctgacttcgcctccacggtgggggacgccacaccccaggccaccgagacgcggctcaatgtcggatgggtgcgctggctggaagggcggactggcccctacaacgacatcgcagcagcacaaaccctcttctccgatttctccgacgacgacagcgccaggacttgcgatgtcaccgacgtccctgtcgtgcactccgcactcaaggtgttcgttaaaatgctcaacggcgggagtgagcatccatag

SEQ ID NO: 32405 - DNA, 2304 bp, Zea mays
  Peptide Sequence Number=SeqID_75780
atgtcgtggctgcacacacgcgttccttgctccgtgcagacgccgtccttgcggggcgtcgtcggaatcacccagacgagcggcggacccgacgcacgcagcctgatggacagctcacggagctggatcttcaccgacgacattggcaagctcgtcccgtcccgcgacggctccgtccacaccacactcgacatcggatgcggggtgatgagctggggcgcgtacctgctgacatgggacatactagccatggcgttcgcgctgcaggactctcacgaggcgcaggtgcagttcacgctggagcatggcgtgccggccatgatgagcgtgctcgttgggaaggaggtagttgagggcggcgttgtgctgcgcaaggacgaagagcgccccaaggtgccacacgatggcttcggcgacgagggtctcaacaccttgcccaccaggtgtttgacgaattgtgttaacctcatacagaattgtttctcgcactcatgcagttgcagatgggattcggtgctacataagcaaccatggccaccacccgtgcagcccgtgcagtttgtgataccgggagatggtgttcaagtctggcttccgccttggccaccacctgtttgggaattctggctgtcactgaagattactggtccacagatgatgcattcggtaggatactttggattgccagttatgccagcgacatgtattacaatttcagagattgtgtctggttcaagcgagcaaatatttcctgaaacatttctgcaaagcttacacgagtgcagagtttgtcttagtgaaaatactggcagaagtttactccagctcccatgccaccatttgttttgcttgatgtggttgaagtctaattgcagaattcatgtaatagaagggaatttaacccaggtctggttaagagaagatgcagttgcttacttcaaaaatatgtttgatggtggcctgaggccaacctcaaatgcatttaacaaagttatagatggctgggtgaaggttgatatgctcaacgaggcccatgggttctttgatatgatgcctgaaaaggacatagatgatgttacggtggccattttctactttggaggacaacatgtgggctgggaaatgaagacagaatggttgtctaatggttggctatgtttggtatgtggtgcatctgatactcaagagcttcctctacatttcattaaacttgcaaaggatacgtacacatctgactgcatgttcggaaaaatcggatatggcactgtgagtgaggctttggtttacattctgtccttactatttgttcgaagagattattgcaacgaggaaccattttttaggaatgtgcttgagcattatcaatgtggcattgagatgatacggagggatttatttactggccattggaaacattatcttcaaggtgctataccacttcaaccctgctttgatggtctcataaatgttggcaaggtagccgcacgtaccctccaagatactgttgtagggaattcttgcattgtgtctagacagcctccatggccacccccaacgcgtcaccatttcagaactatgcatgctgaaactgtggcaaattggaaccacttattcagttggtgttttgcaaattcagatttgggtgaattactgactctcaactgccctgctgacagagcaatggtgctgctgatgcaccaaattgaattgagactgctcaattgggcctgggcagacgagtgtgttttcaacctgtgtccacttcgattacacagtgttgttcatagcagcctagccaatgcttataaatcctggttgataacagtgattcaccgaacacactcaattggccaagatcatgtttggcataacgtggataggggtgtggtgtgtggaattaaggatagatgctgtgcgagattggcaaagctagttttatctgctacactgacacaagattctggcaagctttctcaacttgaattgcaccatccattgttgttgaatactcagtcaagcggcttgaggacaagccgcatttcaagcggtggggaatgtcagcataccatcttctcctcaagtcaaagatggtaccagaagaatacaaacaatgctgctacgacgacgatgaccatacatggagtatatgaagatagaggcatcgcgggaaaaggcacaggcgcgccaggagagcgggctcggtgtctaatgaaagctagcgtccgtctggcttgggcgggagtgggccttgtaaatgttggcaggctgattggtcgtgtggaccgagtgattgtgtggttataa

SEQ ID NO: 32406 - DNA, 210 bp, Zea mays
  Peptide Sequence Number=SeqID_75781
atggcgcaccggacagtccggtgccccctgccacgtcatcactgccgttggattctgaccgttggagcttctgacttgtgggcccgcctgggtgtccggtgcacaccggacagattctacgtcaagcgcttgccggagaatcagaccaataagttgtgcgtttggtacctaaaaccagcttttggcggcaagaagcgccccagaagctga

SEQ ID NO: 32407 - DNA, 312 bp, Zea mays
  Peptide Sequence Number=SeqID_75782
atggtgagagaacgaagaacacgaataagcacaatgaacaagaacacaagagacacaagatttatcccgaggttcggtcacaccaccaaggtgccctacttcctcgttgaggcgcccacaaagagccgggtctctttcaaccctaatcctccctttgccgaccacaaaggtcaagcccacacaataatctttgctcaaacgagcggcagactggcagaaaaaagtgaacagtgcaaaaaccggttgaaccggtttccaccagacaaaaaccggttgagtgtccggttgagccagtattttgaaaaagggtga

SEQ ID NO: 32408 - DNA, 540 bp, Zea mays
  Peptide Sequence Number=SeqID_75783
atgccccctggaaggatggctggggcaaggacacgcacggacattggtgaagaaccaattactgagtatgaaaaggagagggctttaaaggtaatgaggaacaacaaaatgttgagcagccttggtataactggatttacatcacttattcgatcaagtaatacaaggaagaactctatcgctcaagaagactttgatccattgtatgaacctgatcatagtgaggacaatggtcatcatgtgtctgataaggccatgcaggatgtaccttacaactgtgaaaggaggaacaccaacatgtctactggttctggaggaacaaaaggatccaagagagtgatagcacctaatgcagaagaccaagttggtagagtaactaggcaaaagacaaaggaacaatcctcagtagagaaagatgtacgtggttcgactacaaatacagaagagcaggcattgatatctgccaattgtcctgcacaacatgatgatgagattcagatctgtgatgaaggcaagaaaatggtcaaacagatgccatga

SEQ ID NO: 32409 - DNA, 297 bp, Zea mays
  Peptide Sequence Number=SeqID_75784
atgcaggcggcatgcaaccgcgccaagtggacgcgcttctccgacccccgacacgccagcgtggaggcccagggaccgggaaagggggataccccgaaaaggatccttccccgtgaaggaaccaggctccgagcctccttactgatcagaggttcgaaggctggccccccgaagggttcaacagccgcctcagatcgcgtgggccctacacccactactggtcagaggttcgaaggccggccccccgaagggttccacggccgcctcaggctacccgggctccgcgcccattactga

SEQ ID NO: 32410 - DNA, 873 bp, Zea mays
  Peptide Sequence Number=SeqID_75785
agcgccggaaagagcggcgggaccgggatagaggagaagggggaagcgcccggattagacttcctagagcctcgacaggatgcgaattcctccacccaccgctccacccaaccgaagaagctgtcggccagggcgctgcggacgcacctcttcaccaactaccggatgcgcaaggtgcgggacagctccagctggctcatcccgctctgggtcctcttctgggtgctcctcgcctccgtcatctgcctctggatgagcaaccaggccgtcgccaagcgccgggagtcgctcgccagcatgtgcgacgagcgcgcgcgcatgctccaggaccagttcaacgtcagcgtgaaccacctccaggcgctcgctatcctcgtctccaccttccaccactccaagacaccctccgccatcgaccagaccacgttcgcaaggtacgcggagaggacggcgttcgagcggccgctcacgagcggggtcgcgtacggggtgcgggtcacgcacgccgagcgggagcagttcgagcgccagcagggatggagcatcaagaagatgtactcctccaagaccaagaagcagtcgcagggaccagggaacgctgaggacgccgaggtgcgggagccggcggaggagtatgctcccgtaatcttcgcgcaggacgcatacaagcatgtcatctccttcgacttgctatccggcgccgatgaccgcgacaacgtactccgagctagagaatctgggaagggtgttcttactgctccttttaagctgctcaataatcgccttggagtgatctccacctacgctgtgtacaagtatgagcttcccccaaatgccaggccacaggagcgcattcaggctgctatagggtaa

SEQ ID NO: 32411 - DNA, 873 bp, Zea mays
  Peptide Sequence Number=SeqID_75786
atgtcatcccttaagcatggttcatattccagaaaaactcccaaaatactcttgtcccatattctgcctataactctcctgttcatattaagtcagacgtttcattcatcactattctcaccaacagtgaacttcactgtgctacaccacatacacccagctataaatacacccagctaccctctccctctacacacacactcaacaccctcagccaaggcaaacaccccacccactcagttactccgctctgccggctacgcgcatagtgtcgcttcttctccagtccaccctactgaggacagcgccgcctgcgccgctccgactgctgtgccactcgacagagtgaggctgacagcagccaagtccggcctcaggcgccataggaaactccgcttcacccgaccccagggctcggactcaggctcagccccggaagacgacgaactccgcatcgcccgaccccagggctcggactcgggctcagccccggaagacgacgaactccgcttcgcccgaccccagggctcggactcgggctcggccccggaagacgacgaactccgcttcgcccaaccccagggctcggactcgggctcagcaccggaagacgacgaactccgcttcgcccgaccccagggctcggactcagccctggcctcagccgacggtctctgcctcgcccgacccaggggctcggactcgacctcggcctcggaagatagactcgacctcgacctcggaggagcctccacctcgcccaacccagggctcggaccgaccacgtcacaggaggcgccatcattaccctaccccaagctaactcaggctacggggaacaagaccggcgtcccatctggctcgccccagtaa

SEQ ID NO: 32412 - DNA, 691 bp, Zea mays
  Peptide Sequence Number=SeqID_75787
aactgatgaacctggcggatcggcaaatgtcgctccaaagaaaaggagaagaaaggatgcatcaagtacttatctggagactaatcatcttgctccagttgattattttgatattggctatgtacctggaaaatcctctgcaagaggtactgcgaaggtgggaaaacaattagctagtagcaacataggttcttatggtcaataccacgaagacaatagagtggtgaagaataaaaccagtggtcctggaggagcccctagaagaaaatcttctgaattctcggttggtgatgctgcagcacgcgctaaggttattaaggatgtctcagatgctcctttggagctaagagacttggaaaagcaaaaggctgcaccaccacctgtttcctatgcacataagtcaaaaaccagtgaggcatttgattatgcttatccagctgacagggataaaggcacttcagcacaacttggtttccaacaaagaaagcacccagttgttggtagggcaggttcatgtattaaacccaaaggcaccaggcttgagcgaggtattcgtgacctccagaagattgctgcagaatacagaccaccaacaattgatattaatgaggttgatccaaatggccaggcagcagttaaaagacggttgcctcctgaagtaaagcaaaaggttgcaaggttatcggtatga

SEQ ID NO: 32413 - DNA, 204 bp, Zea mays
  Peptide Sequence Number=SeqID_75788
atggcggctttgaaatacaaaaatgagtattcatattcgggtgaagtactcgcactcgcaggagacggggagccctaccaagtgcatgtaattggagctaagattctttacggagaaagagctttgggtctttatcttgccaagcacaacaataaagaatcaacggagcacttctcttcagaatttctgagcttgaacaactaa

SEQ ID NO: 32414 - DNA, 117 bp, Zea mays
  Peptide Sequence Number=SeqID_75789
agatacttcggtacaggtggatatgagattgatagttttgatcatggttatggtgctggcgaagatgaagccgtggaaggagacttccaggagttccaagactacgacgagttctag

SEQ ID NO: 32415 - DNA, 345 bp, Zea mays
  Peptide Sequence Number=SeqID_75790
atgaaccggtgcgcagtatgcagagcaccacgagtaaacgaccgacctcccgtcgcccctcctgtcttcctcttccctcgtgtattccctctcggtcatgctgctcggctgtacgcgctgctcggactacagcggcgaggcaacttcttctgctccgtgggagggggcagcaacagggacgacggcgaagcagtcgagctcaccatcgttgacagctacggcgaccttgaccagagcataggatgcttggagctcatgtaccgtgaggcgacctcgtgggacttgggcggggaggagcgacggcggaggatctcgatgacggggacgatgaagtcaagcacggga

SEQ ID NO: 32416 - DNA, 369 bp, Zea mays
  Peptide Sequence Number=SeqID_75791
atggcgtcagacctagaatcaaaaggatttagaattaataggaccaaaaccgaatatatgagatgtgactctggtactacaattagtgaggatggagatataagtttgggaggccagagttatggcctcaaggtttcatggatagtgttggaatcaaagatgccatttatagatgaaaggagcgaagaagattatactacagccagcaaaagggctcgtgaaacgagctccagtggaattcctgatgacggcaacagaaatattggcgagatcaagaagaaaagaaaacctgaatacgatgttgtagatacacaagctaacctaccaaaggctcccttaccgcatgggagagaagcaaaagccttctaa

SEQ ID NO: 32417 - DNA, 411 bp, Zea mays
  Peptide Sequence Number=SeqID_75792
atggctggaggacgcctcctccgcagagctggaggatggtttctgccaccagaagctggaagaggtggtggccagccgacccgcgcaggaggcagagccccgccgtcgtgggctgagtcttcaccaacacgctccaaggtcctccccctacgtcgcgggggctgggtcccacacgtcatgcaaaccggttcagagcagaagaagccaaaacgccgcgcgtggtgcgtgcaaccgcccagcggttacaagcggctctccacttttgcccagaccagcgggcgaaagggcgggcagccatgcaggcggcatgcaaccacgccaagtgggagcacctctccgacttccaacgcgcccggcttggaggaccaggcccacgcgtcatgcaaccggtgcgccggttgctacgtgtga

SEQ ID NO: 32418 - DNA, 657 bp, Zea mays
  Peptide Sequence Number=SeqID_75793
atggaggtgtgtgacctgcgcaaggtgtgggagatccatgagctcaaggccaagctcgacgcggccggcgcccaggctaccttcgatcgcgttgccagtcaggttgtgttgtttgatcagaggtatattgggatgacatgggaggaaaacacgctaaatattctactggaatttgttcctggaggctccatccaatcgctacttgggaggcttggatcattcccagaggctgtgttgtctctagagtataaattatttattccattcagatatggtggggctagatcccctgcttggttacatgaaaattcaaatctggcatctgaacaaaggcagcggaagttgttagtacagtcgtgcataatagtcacaagagttagcaacttgtcatggaatccaatgtacttgaggcactgtcgacaaacttcaaatcaggtccaagtacaaatgcacacacaaaagcgttacgagccagttcttttaatttttagagtattttctgttggtcatgctaacaaaacttcgtacaattgttttccagctataatacgtcataaccagcctgaagtttgcgcattttgcttgggaaatggctatgttggattgaaggatgctcttggttcaaatgattctagacttcaaaggttattttcttaa

SEQ ID NO: 32419 - DNA, 2502 bp, Zea mays
  Peptide Sequence Number=SeqID_75794
atgccgacgcccacgccagccaccaccgacaagcggacacccgggagcggggtgcacgcgcccggttcactgcgccgaggacccgcaccgcccaacagcggacggtgccgcgcggtcgcactgatggcatttggccgaggtggaaagatggacggccgccggccgtcctcatcgtcgtcgtcgtcgtcgttctgcacaaccaccacggtcgtgctctttgtggcgctctgcctagtcggcgcgtggatgatgacctcgtccactgtcttcccgctggagatttcgtccaataagaagccggtggtgaagcaacagcctgcgcctgtcaatttcggggcgtcgcaggaggcatcacctggcattgctggtgaagggtccgagaaatttgaggacaccgacaacaatgatgccacagtcccagaggaaccgaataaacaggatgcttctgagcaagagaatttcaatgagaagcctgaagagaaagagctggaagtgccggtagagaaagcggagaccaaggatatgtttgatgacgcaaatggaaaatcagaagggctgtcagatgaaacgaagaatgatgatggggagaagagtgtggagaagaaagacaatgaaatcacaaatgagagtggtgatgaaaaaactgatggtgagagtaaggacggtcaagaagagaagcctgatggcgatgccgctcaggaggagcaacctaaaatagaagagaacgtggaagaaaatggagagaaggatcagagctcaaactccaacgaggtatttcctgatggggcccaatcagagcttctgaaggagtcaaatacccagaacggttcattccccacacaggctgcagagtcaaagaatgaaaaggaagtccaagcgttaccgaagtcttcaggcgatgcaaccagctatacctggaaattatgtaatagtagtgcctcaacagattacataccttgccttgacaacgagaaggctatcaagaagcttcgaactaccaaacattatgaacatcgtgagaggcattgccctgaggagcctcctacctgccttgttccactcccagaaggatataaacggccaattgagtggccaaagagcagggacaaggtatggtacagcaatgttcctcacactaggcttgcagagtacaaggggcatcaaaattgggttaaggtctcaggtgactatctcttgttccctgggggtgggactcagttcaagaatggtgccctccactatattgatactattcagcaggcactacctgatattgcatggggcaaacgaagccgtgtcatattggatgttggttgtggagttgccagctttggaggctacatgtttgatagagatgcgcttaccatgtcttttgctccaaaagatgagcatgaagctcaagtacaatttgcattagaaaggggaattccagcaatatcagctgtgatgggcaccaagagacttccgtaccccagcagagtctttgatgtcattcattgcgctcgctgcagggtcccttggcacatcgaaggtggcatgcttttgctggaattgaaccgcttgttacgccctggtggttactttgtctggtctgccactcctgtttaccaaaagctcccagaggatgttgagatttggaatgccatgtctactttgacaaagtccatgtgctggaagatggtcaacaagactaaggataagttaaaccaagttggtatggtcatatatcagaaaccaatggacaatatttgctatgagaaaagatctgaaaacagcccgccattgtgcaaggaatctgatgatgcagatgctgcttggaatgtaccgttggaagcatgcatgcacaaactgcctggtggctcaaaagtccgaggatcaaaatggccagagttatggccgcaaaggcttgagaagacccctttctggattgatggttccaaggttggtgtctatggaaagcctgcaaatgaagattttgaggcagataatgcccactggaaacgggttgtaagtaaatcgtatgtgaatggcatgggaattgactggtccaaagtgagaaatgtcatggacatgagagctgtctatggaggttttgctgcagctctgagggaccaaaaggtctgggtcatgaatatcgtgccgatcgattcaccagacacgctgcccatcatctacgagcgcggtttgtttggcatgtaccatgactggtgcgagtctttcagcacttacccaagaacgtatgaccttctgcacgcggaccatctgttctcaaagctcagaaagagatgcaaactggctgcagttttcgccgaggtcgaccgtgtactgaggccacagggcaagctgatcgtgagggacaccgcggacacgataaatgagctggagagcatggccaagtccgtgcagtgggaggtgcggatgacctacaccaagggcagcgagggcctgctctgcgtcgagaagtcgatgtggcggcccaaagaactcgacgctagcacgtga

SEQ ID NO: 32420 - DNA, 1059 bp, Zea mays
  Peptide Sequence Number=SeqID_75795
atgcccctgaccagagtagctgccgatgcattcggtgtgttgacgatcggactgttggcgctgcttgccgctctgggcctcttctgcatcttccaatcggtctacttcaggtgtcagatccggagaggaccctccttcctcccgctcggctactttaacggcccatgggtgacccgcgtcgctctggttctgatcaccatctggtggggagtaggcgagaagaaggagctgggcactttaaaccagagatggaactggaagagcatggcctacacgctggttttctgcgttccagtgttctccgtgcaggcagtcctggtgttcgtcgtcgggcccaggcttgttagagactcgaaccatgatctcgggaggaggaagatcgcgaaatacttcgtacggacgcacacgccggttggagacaccagcgtctgcacctacccgttgttgggcaccatctttctcgggctcgtggatgccttcctgatgagctacgtgtcgtacgtcggatcacgggcgctgtccttggtcatcaacaagtcgctgcgaaggagggtgtacctgctgatgctgtcggtgctctgcttcctcccgaccagggtgcttctcctcggcttctcggtgctgcccaggccaggagacgctgccttcgagggcatcgtgttcctgtcgttcttgacgatgctgtcctgcacggccgtcgggatactcttgctggtctactaccctgtggccgattcgctggccctcagagacatgggccagagggacacggcggcagagatggtgccatacgatgactactactgctacgaaggcgcgtcgctcgtggccaaccggagtttccgagaactcgagcgcaactccgacacctcgacgaagccgggatccatatcgttccgcactatgatcagggaagaccagcttcagcaggacggcgccgccgacgagatcggcttctcttctcgcagcggtgcccatatcggatcaccatcacccgcaggctcttcgccgagcgcggcaatgccgatgctccctgtcaaggagatccctagatactaa

SEQ ID NO: 32421 - DNA, 732 bp, Zea mays
  Peptide Sequence Number=SeqID_75796
atggcttgcgttcgtggtgcaggtttctggataagcaaatccatggccatcccgtttaacgcctcttccaagctaagcttagcatacgctttacacgtttgtctgctcaagttagcggagaaaaccaacctgcactgcacatcgtttctgaggaagtcgtcaacggtagatgagttaggccgggggccgcggcggcaaaacaaccgcggggcgtgccgcagcgcagcacatcgtttgctattttttcccacccaaaagccacgcgtgtggtactggcgtactgcaattgtaatagccgattggaatgtggagtgcacactagagagtactgacgttgacgccacgctgcggaagtcgctgccgggtgcaccggaacgcggagctcgccaagcgaggggccgaggagatggactgggcgccggagagggaggcagagccgcagagggggtagccgctgcgttcgcggggacgggaagccattccccgacggggaaatccccgttgccatccctagccgggccgctcgttatgccagcagccgcacccatccgcgtgttcaagaacctccgggtgcgtgacgattgccatcaagatggttgtcaaggtgtacggcagagagattattttgagggatgtgaactgcttccacctagggctggtaacgggcctataaaatttaaatttaaggatcgaatagacttagaattgggctctagttctattcatttttga

SEQ ID NO: 32422 - DNA, 1449 bp, Zea mays
  Peptide Sequence Number=SeqID_75797
atggccggctcggcccgcccccccggccgcgccctggccgcccggccgcccgccctggccgcccggccgcccgcccggccgcccgcctggccgccccagcccgcctggccgcgcgcccctggccgcgcgcccctggccgcgcgcccctggtcgcgcgccttggccgcccgcccggccgcgcccccgcccctgcgcagggccggtggatatgagattgatggttttgatcatggttatggtgctggttgtcagcattgcaaccactgctcaggcgaagatgaagccgtggaaggagacttccaggagttcaagactacgacgagttctaggtgtgggttagcggcaacccccagtcggctgcctgtgaaggccgcgttatctacgtttcttttccgcactttgatttattgtaagacttatatggacgtctcagacatggctcgacttagacacactgcacgaaagtcagtcatccccttcttaccctcccgccttgctgagcgtccgcttcgccgtcccgtggccggacagtccagccacttggagagactacaccaccgcctgcgtgaggagcaggagcgtcgacgacaggagcagcagagctctttcttctcgctccaacaggagatagagtctgtgaggagcttctcccctgtgcttcctctggaggcgccccctgcaccaccactgggtgccccagcttctggagtagctgctggaggagacccagacgacggagatggcgacgacagctcgagccacgacaccgacttctctgctaaccctgagccggaaggatgggttgctcgacccatcactcgcgacgctgctcgcgggtgtcacttccatgatgcgctcgacaccctgctacgtcgggcatttgaccggcatacttggtccgtcgagtatcgctgtgtggtctaccagcatagtcgcggggtctacccggaccgctgggaggcaacttgcttggtgcgctgcccggagaacagtcttcagggtgcagaggcctgttcagagcactattccatctctgaacgggactcagctgaggcagccatgcaggatgctgcacggcgtgcgctttcgcactactgctcggttttcggtggggcagctgacggtcttgacctgaagtattacccccgccgtccatctggcagcacaggatgcgtgattgtctcacccgtcggtgagggcaatcctaggttgagcagcacagtcaacctagccgtcgtgctaaacacggagctggaccatgcattagatgagctgagtagggctcgtgctgagatcgccctgctgcgggctgagcgcgcggaacgtcgtcacttggatggtggttcccccgctcccgtcgggactcagcacccgtaccgctcacctcagcgtggacaccagtcgtatggcaatcccgactgcaagaccaagataactctagaaccatag

SEQ ID NO: 32423 - DNA, 390 bp, Zea mays
  Peptide Sequence Number=SeqID_75798
atggaagaccccgtggcggcgccctcttcgtcttccgccgccccagctgcttccgcagcggctaggatttcggcggcggcggcggcggcggtaacatctgccgttacctctgcgccgcccgctctcgctccgctgcagccgtctggcaccgccgctgcggtccctgaagccgcgtcgacgtgccggaggcagctgttcacggtggagctgcggccaggggagtccacaatcgtgtcgtggaagaagcttctcaaggaggccgggcacaccgccacggcaccgccagtggcgccggagccaaagttcgctgcacatgcgggcccatctggtgctgtgcctgtgctctatcttccagagatgttctacagcgagtatcagttcctcttgtaa

SEQ ID NO: 32424 - DNA, 342 bp, Zea mays
  Peptide Sequence Number=SeqID_75799
atggtacacagtttacaagattacattttcattacaagatgcttgattgcaaccaatattttcatttctttggtgcttgtgtcgaagtatcgccttgcaaagtatataccagactctcatgctgaaggtttcaaggacgacaagaaagttcgagtgattccctctcgaacatggattatgtaccatcctgccccccttaacagaaatctcgtcctcgagatttgtaaggaaaggctttgtggggctggtggtggcggtagtgggagattgggagagcataggtatccagctactctttatgtgggatataaactgaacaggttgtggttgaatggggtctag

SEQ ID NO: 32425 - DNA, 591 bp, Zea mays
  Peptide Sequence Number=SeqID_75800
atggggtgcacgacctcccacgacgccgtcgccgctgctgtcacctcctccagttcccggccccgtgcgcgccgctcgtccgcgtccgacccctcaccacggcgcggagaccccgccgcgctgtgccgcgagcgcgtggcgctcatccacgccgcgaccgaccgccggtacgcgctcgccaccgcgcacgctgcctacttccgctcgctcgccgccgtcggtgacgcgctgcggcgcttcgtggcgtcctcgctcgcgcccgcccacgcctgggtcctcgctggtgctcacgctccccgccttccccccgccaagctggtcgctgccgcgtccgccagcctcccgacgtggccgttgtccaccgtctcgtcgctctcgcactccctcgcagagaagcggcggatctttagggaggcggcgttgaagggaagcgcgcgagagaggacacagtcacggactcaggccaccgttgctcacagctgcattagaatccgatttcgggtccacgctcacacgtgtcaacgccggatacgggatgctcccgtgaagtgcggacgaggcttcaaaaggggtgaggttttaataacttag

SEQ ID NO: 32426 - DNA, 294 bp, Zea mays
  Peptide Sequence Number=SeqID_75801
atgaatcagcttgattcgtttgattcttctgacgatgaagaaacggagtatgacctgtccactagactgggaacccaagtggaggcggcacccatattagatcgagtgggtaacacattgcgacggtcggtagaggacattgatcgccaacttttgactgtgggcgacagcagcatgcgcagcttcttgcagccggaggggttttggcacccggttcgtgtggtgtcgtggccgtcggaggagcgctggagcctggcggaaggacagctgtcggggctgtcgagtccttgctga

SEQ ID NO: 32427 - DNA, 717 bp, Zea mays
  Peptide Sequence Number=SeqID_75802
atggctgaaaggtaccaactcccacggagttgcgttcctccaacgacaaggcggaaggactgcgggtatcccccatccgggggctcggaaggtggaaagacacgatgcataagggagcgcgaagacatgatcgcctttcaagggggtcaccctccttttaaaggcgactctccctacttgcgcccccagccgtcgtgggctgagtcttctccaacacgctccaaggtcctccccctatggcgcgggggccgggtcccacgcgtcatgcaagctggccaagggcagaagaagccaaaccgccgcgcgcggtggatgcaaccgtccagtggttacaagcgtccctccactttcgcccagaccagcggcgggacaagcggcgcctctggcaggggaagcgagcgacgcttcgcctccgccataatgaccgcgtcaaaaaagggaccgcgaaagggggataccccgaaaaggatccttctccgtgaaggaaacaagctccgagcctccctactgatcagaggttcgaaggctggcccctcggaagggtttaacagccgcctcagagcgcgtgggctccacacccactactggtcagaggttcgaaggtcggcccctcggaagggttcaacgaccgcctcaggccactcgggctccgcgcccactactgatcaggggttcgaaggctggccctcgaagggttcacaaccacctcagacatag

SEQ ID NO: 32428 - DNA, 165 bp, Zea mays
  Peptide Sequence Number=SeqID_75803
atggcgcatggtcgtcttgttctcctcgtaggacctagatcccacccctgggggagagaccttagggtgctccgggtaaacagggtcggcaagccacccaagacggatctagacgacgtagagtcgaataggggtggaggtagatatgcggaaagctacaactaa

SEQ ID NO: 32429 - DNA, 789 bp, Zea mays
  Peptide Sequence Number=SeqID_75804
atggctcgccccagcctcgagcgactactctgggccagcaacagcacccgacccccaccacgtgggcggttccggggccgccacgtggccataaaggatgatatactccaaggtatcagcaatgagtccagaccccatgggaaagtgccagactcctgcatatacaaatccagggctccgggtatagtccaggacctccacgtgggcaagccggacctctcggatgggacccggacccctctgtatggggtccgggccgctcacagcggggtcccgagattctgggacagagaatacccaggccttaatcaaggacaggcgggggtccgaagccgacacgtgtccggaccttatcgcatacgcttccgctccccgcccaggcggagacccgatgccgccacgtggcctactgcacgtgacgtaagccaacgggcggagcctgacgtaaggcctctgggccacgcagcctctgtatttattgcggataaggcgcgccgcctgtccattccactagcaggtgatgtgccgcctcggcatttaatgagccctgtccattccattggcaggcaatgtgccgcctcagcatttaatgagccctgtccactctactggcgggcggtgactagaccatcccgtaggcggcgtgcctgtccattccattggctggcagcacatccatactgcctcatgcactacactcatcatgactcacacgttaccgaggaagcaaccgcgacatatcaatactgtatggactatggatgttatggcgcacaggagattgcatag

SEQ ID NO: 32430 - DNA, 1065 bp, Zea mays
  Peptide Sequence Number=SeqID_75805
atggcggccgcggcagtcgctggcatcgtcagcaacgacgcgccacggaagcgcccgcgtcgcccgcccagcggcgtcagaatggaggccatgagcagaggcggtggctgctgctgctcgagcagcgacaagaagctggaggccgcggagccggcgacgacgaggctggtggtgatcgtgggcgccacgggcacgggcaagaccaagctgtccatcgacgcggccgtggcgctgggcggcgaggtcgtgaacgccgacaagatacagctgtacgcggggctcgacgtgaccaccaacaaggtgccgcacgcggaccgccgcggcgtcccgcaccacctcctgggcgcggtccgcgccgacgcgggcgagctcccggcgccgtcgtaccgcgcgctggccgccgaggccgcggcctccgtcgcggcgcgcgggcgggtgcccgtggtggccggcggctccaactcgctcatccacgcgctcctcgccgccgacagcctcggcgcaggcgacccgttcaaggtcgacgacgggtaccggccctccctgcggttcccgtgctgcctcctctgggtggacgtggacggcgcggtgctggacgagtacctggaccggcgcgtggacgacatggtgcgcgagggcatggtggaggagctccgggagtacttcgcgtcggcgccccccgcctcgcacgcggccgggctgggcaaggccatcggcgtgccggagctgggcgcccacttcgcggggcgcaagagcctcgccgcggcgatcgacgagatcaaggccaacacgcgggtgctggccgcggcgcaggtgcgcaagatccggcgcatggccggcgcctggggctggcccgtgcggcgcctagacgccacgcccacggtccgcgcgcggctggccggcgccggccgcgccgccgaggccgccgcgtgggagcgcgacgtgcgtgggcctggcctcgccgctatgcgccagttcctggacggccacgagcagcaggaaaggcctccaaattttggaggggccgagagggcactggtcgacgtgggagctgtaggcccgtag

SEQ ID NO: 32431 - DNA, 3117 bp, Zea mays
  Peptide Sequence Number=SeqID_75806
atggcgacgccgacgcccatgcctggaggcgaggggacgctcgcagcggtgatgccgcggtccccgtctccgacgccggcggaggcggggacctcggcgaccgagacgcccgtgctgatattcctttactttcacaaggcgatccgcgcggagctcgaggcgctgcacggcgccgccgtgctcctggccaccgagcgcaccggcgatgtagagatgctcgccaagcgctgccgcttcttcttcaacatttacaaacaccactgcgacgccgaggatgcggtcatttttccagcactcgatatccgagtaaagaatgttgcagggacctattccttagagcataaaggagaaagcgatctttttagccagttatttgatctcctgcaattggacatacataatgatgatggtcttcgtagggagcttgcgtcatgcacaggcgcgatacagacatgtctcagccaacatatgtccaaggaggaagaacagaactccatccagtcagctgcaatgatgcatatcaaagatgaggttgatcttagggggaagggagcaagagggagggctggagtgctagcggtggtctttccattgcttacaaagaaattttcgtgtgaagaacaagctgatttagtgtggcaattcctatgcaacattcctgtcaatatggtggcagagttccttccatggctttcaacttctgtcacatctgatgagcaccaagatatccgtaactgcttatgcaaagtagttcctgatgagaaacttctccaacaggttgtattcacatggatggaagggaaagcaacaagagaagtggcagagagcattgctgctggtatttcagcaagaaataatagtgttgaggatgtcccagaccaagggaagattcatatttgtttacatcacaattctaaacttgggagtaaaaactgtggagaatctaatggtcctcaggctgacaagcatcctatagatgatattttatactggcacaatgctattcgtatggagttacgtgatataaaagaggagacaagaagggtgcagcaatctggggatttttctgatatatcagccttcaatgagaggcttcagttcattgcagatgtatgcatctaccacagtatcgctgaggatcaggttgtttttcctgcagtcgatagtgagctgtcctttgtgcaggagcatgctgaagaagaatgcaggtttaacaattttaggtgtttaattcagcaaatccaaatagcaggagccgaatcaactgcattggacttctactcaaaactgtgttcacatgctgataaaatattggaggcaatcgaaaaacacttctgcaatgaagaaaccaagctacatactgagaatgattctaggccaggcaagcgaggaaaagatgcagtatctttttctcatactaatggaatctactgctctcaaactgctgacattgaagcaattccatgtagcaaaaaaccatgttgtattcctggtttgagagtagagagtagcaatcttggtattggttccttggcttctgcaaagtcttttcactctttatcatacaattcaactgctccttcactatattcgagcctcttttcatgggagacagatacatcattgtcttgttcggacagcatttcaaggccaatcgatacaatattcaaatttcataaggcaattcgcaaggatttagaatacttagatgttgaatctggcaagctcattgatggcaacgagtcctgccttcgccaattcattggaaggttccgtttgttatggggtctttacagggctcacagcaatgctgaggatgaaattgtgtttccagcattggaatccagagaaacattacacaatgtgagccattcatatactcttgaccacaagcaggaagaacagttgtttgaagatatctcaaatgttctctttcaactttcacaactacatgatagccagggccatgcccagactgaagttaatgaagtaaagaaaagctgtttccattcatctaatgatgtcgattttgctagaaagtataatgaacttgccacaaaacttcagggcatgtgcaagtctatccgggtcgccttgactaatcatgtccatagagaagaacttgaattatggccgttgtttgataaacatttttctgtggaggagcaagataaacttgtaggtcgtataattggttcaacaggtgctgaggttctccaatctatgttaccctgggttacatcagttctcactcaagaggagcagaacaaaatgcttgatatgtggaagcaagctacaaaaaatacaatgtttggggaatggctaaacgagtggtggaagggagctggaacagcatctgattcttcagcagaggcgtcctctgctccagaagatagtcatttacaagataagcttgaacaaaatgaccagatgttcaagcctggctggaaggacatatttcgaatgaatcagagtgaacttgaggctgaggtgcgaaaggtttcacgagattctacacttgacccaaggcggaaggcgtatctaattcaaaatctcatgacaagccgctggatagctgcacagcagaagttaccagaaccaaattctgaagaatgtaatcacgatgccagtatacctggatgtgcaccttcataccgagaccaggagaaacaaatttatggttgtgaacactacaaacggaactgcaaacttgttgctgcatgctgcaacaagctcttcacatgcaggttctgccatgataaagttagtgaccatacgatggaaagaaagtataacgagccaactcatcttgatgtctcaaggaaagcaacacaggagatgatgtgcatggcatacacttgtagtcactacacttgccctatctgctgcaaatccttgggagatatggcggtttattttggcatgcttgatgccttgttggcggctgaagagcttccggaggaataccgtgatcggtgtcaggatatactttgcaatgactgtgagaggaaaggtagatgtcgatttcattggttataccacaaatgcggctcctgtgggtcgtacaacacccgagttatcaagactgccacagcagattgctctacaccaaactag

SEQ ID NO: 32432 - DNA, 519 bp, Zea mays
  Peptide Sequence Number=SeqID_75807
atggagcctggcggagggacatctgtcggagcggttgagtccttgctgacgtcctcttgcttccgtaagggggctgagagccgccgccgtcacagggtacgcggggcgccatcattgcctatctggcggagcgagccagatgggacaccggtcttgtcccccgtggcccgagtcagctcggggttgggcgatgtggaagctcctccgaggccgaggtcgagtctgtcttccatggtcgaggtcgagtccgagcccctggttcaagcgaggcggagaccgtcggctgaggccagggcggagtccgagccctggggtcgggcggagcggagttcttcgtcttctggggctgagcccaagtccgagccctgggtcgagcggagcggagttcgccgtcttccgggacttagcccgagtccgagccttgggtcgggcggagcggagttcgtcgtcttccgggacttagcccgagtccgagccctaggtcgggcagagcgaagttcaccgtcttccgggacttag

SEQ ID NO: 32433 - DNA, 1011 bp, Zea mays
  Peptide Sequence Number=SeqID_75808
atggctgaaaagtaccaactcccacggagttgcgttcctccaacgacgaggtggaaagacggcgggtatcccccatccgggggcttggaaggtggaaagacacgatgcataagggagcgcgaagacatggtcgtcttccaagggggtcaccctccttttaaaggcgactctccctacttgcatccccagtcgtcgcgggctgagtcttctccaacacgctccaaggtcctcccctgcggcgcgggggctgggtcccacacgtcatgcaagccggctcagagcagaagaagccaaaccgccatgcgcggtgcgcacgaccgcccagcggttacaagcgactctccacttttgcccagaccaacgggcgaaaggggcgggcagccatgcaggcggcatgcaaccgcaccaagtgggcgcgcttctccgactcccaacacgcccagcatggaggcccaggcccacgcgtcatgcaaccggcgcgccgaatgcttcgtgcatgcaactgcaccgccacttgcgccgccaccgcacctcctcgactgcggaaccaataccgcgactcgaggcgacctagcgcacgacccagcagcgccagcctggcgcgacggtcaatgcagccaaaaacaggccggcagtaatggcggtggcaggcgggcaggagcagcggtcacgagaagcggtcgacgcttcgccttcgccataatgaccgcgtcagaaaagggaccgggaaagggggataccccgaaaaggatccttccccgtgaaggaaccaggctccgagcctccctactgatcagaggttcgaaggctggcccctcgaaagggttcgacagccgcctcagatcatgtgggccctacacccactactggtcagaggttcgaaggccggcccctcggaagggttcaacgaccgcctcaggctactcgggctccgcgcccactactgatcaggggttcgaaggctggcccccgaagggttcacagccgcctcagacacagagcgagggatga

SEQ ID NO: 32434 - DNA, 699 bp, Zea mays
  Peptide Sequence Number=SeqID_75809
atggcgagggtgtgttttggcctcggcgaccgcaagaaacacacgctacaagacaatccgatcctgcaggatcggatcctgacgcttgaagggagcagcagcaccctcggcgtcgacaacaccttcggcgagggtcttccccgagaatccggctcaggcaggcggctcggctggtcaccccgaggcctcggccggctgtccgccgcggacatcggcccgacacgaggcctcggcaggtctattccggcgtcggtcccgctaacgggcaacccggccaggctccggccgaccaggtcttcttttcgggccaactctgcctctgttcatgctgacaccgctaccccccggcctcggctcatcgaagggcggccgaggggtacgaacaaccccactcgatggggggggcctgcggagcaacagaagaccgacgaacggcgcgccgccgcccgctccagcagcggcgacgacgacgacttctgctccggggggccgaacagcggcagcgatgaccttagggcggatgctgctgccaggaggcccccgcccatgcccaaactcgtgaggcaaggacgggcagaaggacgtagagttggagaagacggcgccgagagcggctccgaagccactcgcgtccgaaggccaggcacgcggcagccgccggtgccacgaacaacaaccgcccttccccccgatcactga

SEQ ID NO: 32435 - DNA, 1085 bp, Zea mays
  Peptide Sequence Number=SeqID_75810
agcgcagcaacacgtgcgcggaggtcacagctccgatcgacaagccggccaagcagccacacatgcctcctcacatggcggcgatctcgcaccggatcgcaggatccggcccgcgcgtcgccgttgtggcgccgcctcgcccgcgggggcgcgctgccgtggtcgcgggtgctgcggcgaagggcgcacatcgggagcggacgctggagggcgcgagtgacgacctgagggccgccgcggctcagtgtctggactgggctcccgcgcggcgtcgggtgcgggccgccttcgcgcccgtgctccccaccctcgaccactgccttttcaagatggctcacaatgaaatccagatggaagagctttctggactcaagaacctcatgaaagctcagaaaaggattgctaagaggatagcagctgctggttatgcagtttatgctatggattatcctggttttggcatgtcatatggtctccatggctatattgcaagctttgatggaatggtggaccatgtcattgaacagtatgcacgaataagaggcatgaaagaagtgtgtgagctgccacactttctcttggggcagtcaatgggaggtgcagttgccctgaaagtacacttgaagcaacaacaagaatgggatgaagatgtaacaccacctgcacctgtattgaaggcactgagcatattgtcatgtcttcttcctgaggcgaagttatttccgcagaaagatataggagatttggcatttagagatccaaggaaaaggaaagtagctgagtacaatgccatctcatattctgaccaaatgagattaagaacagcagttgaacttttaaaagccacgaaggacattgaatcacagttggaaaagatctcctctccattgctgattcttcacggagccgcagacatggtaaccgatcctcaggtcagcaaattcctttatgagaaagccagcacgaaggacaagaccctcaagctctatgaaggcagctaccattcaatcttagagggagaaccagatgaccggatttcaactgccattaacgacatcatttcatggctagattcacactgttaa

SEQ ID NO: 32436 - DNA, 819 bp, Zea mays
  Peptide Sequence Number=SeqID_75811
atggcggcgaccgcggatccgagggcgaagccgccgcccgcggcgtcgcaccacctcaagccgtgggcgccacagccgcgccctcgcgcacgccgcgtgcctcccctcccaggcccggtagtgaccgggggaggcggcgcgcgcgatcggcgccgctcctcctcctcatcctcctcctcgtcgtcgcaccgacgtctcagcgccgacgcgggcaccgtgcagatggagctgccttgcgacggtcagataaaagatccccgtgccaagctcatgggccacctccgccctctgccgcccccgcccccgcccccgccgccgcctaagccgcaaccccggccgccgggacccgagccggcagcgccgcttccgcagccgacgccgtctcagccggaggaggctgcggcggccaggccctggaacctgcgtgaccggaagtgccgccgaccaacggcacgcggggcggcagcggctgcggcagcggcactcgacgcgtcgcacgcgcgggacgccgccggggcgggggcggagaaggcgcggctgcccgtgcccctggagcgcgcgccgttcgccgtggcgctgacggcggaggaggtggaggacgacgtgtacgctctgaccggcgccccggccgcggcggcgtccccggaagcgtcctcgcgtcgtgcagcggcagctcgatgtaaggccaattccccatactgcccctcgtgctccacctataaccacttcatgttgcacgagaaagaaaaaaacgcgctgttccctgggctgtggctgaccgagatcaccgccgacgcctacaaggtgccggacgagtag

SEQ ID NO: 32437 - DNA, 981 bp, Zea mays
  Peptide Sequence Number=SeqID_75812
atggcgtcaggggagaaccgcgcagagtttgggccgtgctcggcgcagggcggcggggaccgacgcgggggcagccgtggcagacgcggtgcccttcgtagccagtccggcagcgagtccagcagcgcgtacatggagatctcgaacgagcaccattgcgcggggagatctcgaacgagcaccattgcgcgaacaggaagagatctctcgaacgagcggagcgatataatgcagagaaaaggtggttggtttttggtttgtttgcttgtaggcaagaaggtgtccccgaatagggacaaggagtgcgcgttctgcgtgcttgagcggcagatcgcccggctgcttcgggcagatgctggggcgctcgattccccagcaaaggtaatccgctgcatgcccctattcgctgagcacttcaggtgggggcgccaggaggatgcgcacgagttcctccgctatgtggtagatgcctgtcacactgctggcctccgcacgcgcaagctgctactcgctaaaggtgccaatggtaactgtggtgaggatggcagggggcagggggcatgtctggttatgagggagacatttggtggggcattgctgagtcaagtgaaatgccttgtgtgcaacagagagtctaacaagactgatgaaataatggacatcagtctcgatctgcctgggagcagttctgttgctgatgcccttgcccgcttctttaagccggagatattggaaggtgcaaacaaatatagttgtgaaagatgtaaaacgctcacctcagcgcagaagcaaatgtttatgctgagggcacctaaggtgcttgtcatacaactcaagaggtttgaggggataaatggtggaaagatcaacaggaatatagaattcaaggagacacttggtatttctgattgcatgtacaataaaagccaggcatgcaaacttctgtggatgcaaaaactatctgtgaaaccaattatttag

SEQ ID NO: 32438 - DNA, 513 bp, Zea mays
  Peptide Sequence Number=SeqID_75813
atggggctgccgcaccctttgtctaacattcccaacgatgaggaggaacgacttgcgccactaggcatagaagctagaggtttagaagggccgcaatctcgtgctgaagaagtgccgcatcaagaggagctccgtgaccgcacgctcggtttgagcaatggtagcctcgcgttctgcctctgtcgtgtgggcaagggcagcgtcatgatcagccttggctgtgttcgctctcctgtgcagcgtgagcatcctcgcgctggaggcttgctaagtcagcttcttctgagcttcggctgtctgtatggatggatgatgtctataattttatgcgctcgcaaaaagaggcgtcgacttctaagttcagacgttactcaagattttgatgcaatgagaaagcagctagtgtcagattctgcagcaatatttaggtcaaaagttccggagtcactgatggaaaatctcattaaacgcctgagatcatacttcgagggcaaacattcaccacatgagtag

SEQ ID NO: 32439 - DNA, 483 bp, Zea mays
  Peptide Sequence Number=SeqID_75814
atggatggggacgctaccgcgctcgcctccccctcggccggtagcttcccagacaagcgcgtgcgatcggaatactccgtggagcgagctccaggcgattcaaccgcgaccgcaacgccgccggagaaggtagccgtggttccgcgcacggcaccaaatcctttctattggtccgggcgacgagcagcagaggtcgttgtggccgcggatccgccggcttgcttcgtggagcggccaccccgccgatccgtgcgaaggcgccaccgccggtcgtctctgtccgccggttttgcgtctgcggggaggaggtcaacgggagttcgtcgattcgccgagagatctacgctcacccgatctgcgtcattagagcttcaaggtccaagcttgtttgttaagtggaagggccaagcccggtcagccaacaagccgtttccagacctagaggcgacgtcagatttcatctgcagcacgggtgatacgtga

SEQ ID NO: 32440 - DNA, 828 bp, Zea mays
  Peptide Sequence Number=SeqID_75815
atggtgaagtatagtgatggaagcggcgagcgctaccctctcccctacctcgccgcactcttctctctcacgccagatgcaggggatgactgtagccgccccctcgcctccttcgcgcggacggagccggccgcgccagactacggaaacttctcggttcacctcgcttcgcctcgacccgtccacggaagggcgattttgcgcggcgacgcggcggcgggtctcccgtcggccggtggagtcggccccggcccccctcggttgcgcagaagaggaactcgaattcgtgaccacgcagtgccgctcgtgaccgaagacgaagaggagtccaatccgcttccggcgaggtacgtcgcgaccgattcgttggcttccgtctccgaccatcgacggcgccatcagatccacacggagacgcttcgattcggcgtgttgcggccgagatctccccttcttaaggagatgcagacggcccctacaatttatcagttcacccgtacttgccaatggaaccaagcccatttgatcatggcatcctccccagaagataagatgaaggcttcgatgaaagtccttgtagactgtaccgaggatgccacaaaatccctggggggtttagttgatcatgcattagaccacatgcatgatgaagagatcctagctaggacattgtttgccatgaaagaaaaactagagttgcttcagcacgatgccttagaggcaaaagtccaagcctttccagaaatagctaagtacgagtgggatgacatcagtgttgatcctccctctccgtcaccccctccaacagttactgatccttctgtttaa

SEQ ID NO: 32441 - DNA, 858 bp, Zea mays
  Peptide Sequence Number=SeqID_75816
atgtcaaatgcctcaagtggccagcagtttcctcctccacaccctttatggcctacgggttacatgcagcagagtggtatggattgtaactttatgggaaacctcaattttccaaaccctggtcaaggtccgacaacaatgtgggcacccatgcagacaggacatagtacttcccaatctaccatgattccggcctcacaatcagctatgtactggaatcattacttgaactttgtcaggaatcatcttgggtcagctgaagtaaatccatttcctgattccattccaccttccaatactagtacaccattgcagagttccaatactatacattcattacctgtgaacttggactcagatgttgaacacagtgttcatgacatcaatagtcctgaaaagaatgcacctcctgtgcagaaacctaagaagtctaaggaacaaaactttactgggcctgaagatcttctcctttgcacaacctggttgcaaataagcagtgaccctattgtgcacactggccaacgtagggaggggctttgggctcgaattgtgtcggcgtttcgagaccggagggtccctgggccgacgactagccagatgggacgccggtctggttccctgtggcccgagtcagctcggggtagggtgatgatggcgcctcttgttgacgagactggcctgcgccctaggttgagcgatgcggaggctcctccgaagccgaggtcaagtctgtcttccgtggtcgaggccgagtccgagcccctgggtcgggcgaggcggaggtcgtcggctgaggccagggcggagtccgagccctggggtcgggcgaagcgaagttcgtcgtcttctgggacttag

SEQ ID NO: 32442 - DNA, 1071 bp, Zea mays
  Peptide Sequence Number=SeqID_75817
atggagggaggaaggcaagagagggagtatgagatgacactcaagagaatgttgcagagtatttgcttgctcacagttcatgctaacaccaccacctctgtcgtgcttcagaacctttcagtggaacgatttgcttgtataacagagacagaagagaaaaactgtcataagacttctactttcacatactttccaacagatatgcaggatgctcagggttctttggatcgtcgagacgttttttcattggacacacattcaccatcagtctgccttttgattcaattggaaaaggctgctactgaagaagggggagtaacaccttctgtttattctcataaagagcctgtgcacttagctgagaaagagaagcaaaagctgcaagtatggtctcgaattatgccttgtaaagagtcatttgcatgggccatgattcctctgtttgaaggtaaccatgcgggtggtctcagtgatgctgctcacaaatattatatctcaaatctttttcaaagtattacgcgctaccatctgcatgtgactccttatttagctctgattctaacaagaaccttcctattgcagttgaaacggaaacataacgacagaacagaaaatgaagctgccgaatcaaatgactggatgagccctggatatgctaatgctggcagcagcccagttcctacacccccttcagggaaaggtttaaaagcatccaccaagcctaaggctacgaagggccagaaatctggtcctgagacccctttgggttttggttctccaggcaatctttctactcctgttggtggctgccgctatgatagctccctcgggctcttgacaaagttcctgaacttgctaaaaggtgcacctggtggcattgttgatctgaataatgctgcagaaactctagaggtacagaaaaggcgtatatatgacatcactaatgttcttgaagggataggactgatagaaaagaagcttaagaacaacatccgttggaaaggagttgacgactctcgacccgaagaagttagtgatgatatgtccattttacagatgcttcatgcttaa

SEQ ID NO: 32443 - DNA, 948 bp, Zea mays
  Peptide Sequence Number=SeqID_75818
atgaacaaaacaccggcattcaaggtgccattaaaaacggaactccggttccgtccccgcgggtatgaacaacctccacaccgggggagcccgcggggcgacaagctccaggcaactcaccagcgacctctgcagcagcagctatggtcccaggacggacgcggacaccggaaggctcttgttcgcgtcccctctcaagggacgcgaaccagacagcaaagccaaagagccggaggccggtccgtagacggcgctgacggccccgacggtggggaatctccccccggctgctaccacgtcagcaccgacggcggcgtccgcctctccataaacgccgcaccggcgaacgcgggccgctccaaagcgcaccggcaggacgcctcctccgcagagctggaggatggtttccaccaccagaagctggaagaggaggtggccagtcgacccatgcgggaggtaaagccccggctcgcctcgctctccgccccggccaggatgatgaacatccttgaagctgagggcgggaccaagatcgcagcccggcttgcttctccccacccaggggctggtggtcaccgtctcggggcagaagaagccaagccgccgcgcgcggtgcatgcaactgcccagcggttagaagcattcctccacaatcacccagaccagcggggacagggaaagggggataccccgaaagggatccttctccgcgaaggaaacaggccccgagcctccctactgatcagaggttcaaaggctggcccctcggaggggttcaacagccgcctcagagtgtttgggctccgtgcccactactggtcagaggttcgaaggccggcccctcggaagggttcaacggccgcctcaggccactcgggctccacgcccactactgatcaggggttcgtaggctggccctcgaagggttcacagccgcctcagacgtag

SEQ ID NO: 32444 - DNA, 465 bp, Zea mays
  Peptide Sequence Number=SeqID_75819
atgggcaagagtaacaaacgcaagcgtgagccgactcctccgtcggaggacttcggcgactcggaatactcggaggaggagttctcctccgagtccgaggggtctccggctcccgtctctcccccggggtcgtctgatgattcagacgactcccaggggattgccgcggaagtctggacgtacatccgggccgttgagcgctccgggctcgagggctcggatgagttggagttctcctcggacgaggaggactcggacggcggcgaggacgaggatgacgacgacgacgacggcgatgacgacgacggtggcgacggcgacggtgatggcagcggcagcggcgggagcagcgacggcaagggcagcaccagaggcggcagcagcacaggcagcaccagaggcggcggcggcaacggcagcaccaggggcggcggcggtggcagcagcagcaaggccagtggctaa

SEQ ID NO: 32445 - DNA, 1734 bp, Zea mays
  Peptide Sequence Number=SeqID_75820
atggccatcctgaacagagctgacactagtcacactaccaccgcatccaacggcagcgccaccccggctgcccccgttgccattgccatgccttcgcttcctcacccgccactggacgccgacgagttccgcaggcagggacgcctagtcgtggacttcatcgcggactactacgcgcgcatcgacgggtacccggtgcgcccggccgtcgcacctgggttcctgatccggcagcttcccgaggcagcgccggcgcggccggagcccgacgcgctcgccgcggcgctgcgcgacgtgcgcgacctcatcctgcccggcgtcacgcactggcagagcccgcgccacttcgcgcacttcgcggccacggccagcaacgtgggcgccctcggcgaggccctcgccgcggggcttaacgtgaacccgttcacgtgggccgcatcgccggcggccaccgagctagaggtcgtcgtcacagactggctcggcaaggcgctgcacctcccggagagcctgctgttctccggaggcggcgggggcacgctgctgggaacgtcctgcgaggccatgctctgcacaatcgtcgccgctagagaccggaagctcgccgaggtaggcgaggagcggataggagacctcgtggtgtactgctccgaccagacccacttctcgttccagaaggccgcgcgcatcgccggcattcgccgcgggaactgccgtgagataccgacctccagggagagcggcttcactctctcgcccaaggcgctggccgcggcagtgcgagccgacgaggcggcgggcagggtcccgctgttcctttgcgcgaccgtggggaccacaccgacggcggcggtggaccctctacgcgagctgtgcgccgccgtggcggggcacgacgtgtgggtgcacgtggacgcggcctacgccggcgccgcgtgcgtgtgcccggagttcagccacgttgtcgcgggcgtcgaggccgcggagtcgttcagcacgaacccgcacaagtggctcctcgccaacatggactgctgtgcgctctgggtgcggcgtccggctgcgctgacggccgcgctcggcaccgaccacgacgtgatcctcaaggacccggcggcggcgcaggcgcaggcgcagcagcagcagtgcagcgacggcggggtggtggactacaaggactggcaggtcgcgctgagccgccggttccgcgcgctgaagctatggctcgtgctccgctgccacggcgtggagggcctgcgcggcctcgtgcgcgcccacgtgcgcatggccgccgcgttcgaggccatggtgcgcggcgacgcgcggttcgaggtgcacgtgccgaggcagttcgcgctggtgtgcttccggctgcgcgccgtcgccgtcgccgtcgccggagagaagcgtgccggcgactacgacggggtggcagctggcaacgagctcaaccggaggctcctcgaggcggtgaacgcgacggggcgcgtgtacatgagctccgccgtggtcggcggcgcctacattctgcgctgcgccatcggcaactcgctgaccgaggagcggcacgtccgggaggcgtggagcgtggtgcaagagcaggccaccgctatcctgtctgccgcgaccgcgacggcgcgcacgaacgggctgacggttcgccgtgcgcgctgtgacgcggaggccgatgtcagcgacgtgccgacgccccagcagcctcttcctcttgggtag

SEQ ID NO: 32446 - DNA, 528 bp, Zea mays
  Peptide Sequence Number=SeqID_75821
atggctcctcctatgacgtggtcggtccgagccctgggtagggcgaggcggaggctcctccgaggtcgaggtcgagtctgtcttccgaggccgaggtcgagtccgagcccctgggtcgggcgaggcggagaccgtcggctgaggccagggctgagtccgagccctggggtcgggcgaagcggggttcgttgtcttccggggctgagcccgagcccgagcccctggggtcgggcgaagcagagttcgtcgtcttccggggctgagcccgagtccgagccctggggtcgggcgaagcggagttcgtcgtcttccggggctgagcccgagtccgagccctggggtcgggcgaagcggagtttcctatggcgcctgaggccggacttggctgttgtcagcctcactctttcgagtggcacaacagtcggagcggcgcaggcggcgctgtcctcttgtcaggccggtcagtggagcggcgaagtgactacggtcacttcggctatgtcgactgaagggcgcgcgtcaggataa

SEQ ID NO: 32447 - DNA, 537 bp, Zea mays
  Peptide Sequence Number=SeqID_75822
atgaacaacctccacactggggagcctgcggggcgacaagctccgtgcgactcgccagcgacctctgcagcagcagctatggtcccaggacggacgcagccaccggaaggctctcgcggcgccgacggcgtcgacggtggggaagcttcctccagctgccaccacgtcagcaccgacggcggcgtccgcctctccaccaacgccgcaccggcgagcgcgggccgctccaaagcgcaccgacaggacgcctcttccgcagagctggaggatggtttccaccaccagaagctggaagaggaggtggccagccgacccgcgcgggaggtagagccccggctcaccccgctctccgccccagcaaggatgatgaggatccttgaagctgagggcgggaccaagatcgcagcccggcttgcctctccccacccaggagctggtgaccagcgggtgaaagggcgggcagccatgcagtcggcatgcaaccgcgccaagtgggcgcaccccttcaactccaacgcgcccagcatggaggcctag

SEQ ID NO: 32448 - DNA, 282 bp, Zea mays
  Peptide Sequence Number=SeqID_75823
atggccgaggaggccaagtacctggagacggcgcgggccgaccgctccgtgtggctcatgaagtgccccccggtcgtctcccgcgcctggcaggccgcctccgcctccgcctcttcctccgacgccgctaacgccaaccccgttgtcgccaaggtcgtcctttccctcgacctgctccgcccagaagaacgccccgaagagcgcccggaagagcccacgctccaggcaagtacccccaatctcctccatccggctggtcccttccccgtgcttcggctatag

SEQ ID NO: 32449 - DNA, 336 bp, Zea mays
  Peptide Sequence Number=SeqID_75824
atggcgcctcctgttgacgtggctggcctgcgccctaggttgggcgatgcggaggctcctccgaagccgaggtcgagtctgtcttccgtggtcgaggccgagtccgagcccctaggtcgggcaaggcggaggtcgtcggctgaggccagggcggagtccgagccctggggtcgggcgaagcggatcggagtggcgcaggcggcgctgtccttctgtctggccggtcagtggagcggcgaagtgacggcggtcacttcggctctgccggggggcgcgcgtcaggataaaggtgtcagggcctctgaagcgtcccgatcctctgggactcaaatgtga

SEQ ID NO: 32450 - DNA, 678 bp, Zea mays
  Peptide Sequence Number=SeqID_75825
atgacttcccacggatcctccgatgacggaaatgcactgacccgcacggacggacttgcacgagagggctttccccgcattttgtgggaggtacttcagggggccggatacgcgacaccccctcagtacgtggtgcagcagttcgagaagcaccgagtgcctcgctgtagagtgaggatgaccttggagcctcatcccctgcagccaggatggcgctctttggactccgagtctttcggataccgagcagaggacacgatcgaggcgatcgctctgcatggattgactactttctgcaatgtcccatctgatggcgctgctggaggcacaaagattacattggacaacagagaggaactcgtggtcgacttgtctcaagaaatggtggagaaggacttgcaggtggagcagctatccactgatattcaggagttggaggagctggtaggcaccagggagaacaccatcgaggttctagaggatcagctcattaacactcagcagcagcttgctgaggctaacgagcacctggacatgcatcaccaggagatccaggaccaagaggcaaacgaggacgtcgacattgagggaggagatgagcctgcctccagtgtggacactgctggctcgggaagaccaccttcccccgagtcgagtgttgcttcgttcgctcactag

SEQ ID NO: 32451 - DNA, 324 bp, Zea mays
  Peptide Sequence Number=SeqID_75826
atggctcgacgtgttctcatccccagactcgggacgtttgtttctttctttctagtgatccgtgtccactcctttgtgggcgaggtggacaacggagttctatggggtttccgaccctcggtttgtgagggatcatcttcctccgagctatgggcggtggtgtcgctcgctgttttgctttggcttccctcgggatctctgaggaaagctttttctcaggcggagttcccttccctcttcatccgctatgcacgagatggttccaaagcagaacatagttctggggtgaagggcgatcttgcacttgaaggtgatggccattga

SEQ ID NO: 32452 - DNA, 246 bp, Zea mays
  Peptide Sequence Number=SeqID_75827
atggccatcaccttcaagaacaagatcactcttcgcccaggggctatgttccgctttggaaccatctcatgggagatcggagtcagcacccttctccgacgatcagcctaccatgcaaaggggaggaacctccccagcgtgaggccagacgatggagaaacagacgccagaacatgtggcgacatcatgaagccggggaacgggatccggcacagcctgtgtcccaagacaaaagcctcggagtga

SEQ ID NO: 32453 - DNA, 222 bp, Zea mays
  Peptide Sequence Number=SeqID_75828
atgcccccaattaatttcgggtcccgtggtgtggcggcagcggcagcggcagcagtactgcctccactgcagtcccagaattcgtggtggtggcagaggtgggggttggggtggggcatcgctggaggatgggatctagctagctgggcactaatgcgttggttgctctggccactgatggccggtgacattacttgcggatccttgctgcaaaaattgcag

SEQ ID NO: 32454 - DNA, 2254 bp, Zea mays
  Peptide Sequence Number=SeqID_75829
atgtcttcctcctcatttgctgcgagtgcatcgtcggccgacccgtcgtccgaggataccttgagtgatttggtggcgacggagttgcagccgggccacaccgtggagttcggcactttgagaatctcctcggttcacgtgcaggagatgcagcagctcggatactttggtgaaggttccggaggttttgcggaggactggcaagacttcggcggaagtcgtggaaatagtcccttctgcccggaacaagtgggggcaattggtgggacttttggttttatgtttcttgtggggaagttgaaggtttgcctggggctccctgcggccattatgtgctctcactgctatgtggcgttcccacaattcgaggtggcggaggacgatgagaacgaaaggggccctttgttggtgcgaagtccggccttcgctgtggatttgcggggccggaacccagcctcgtttgtgcgcgaagttgaggccgaggccgcaaggattgtaggacgatatgtaccaaagactgagaccttgcgtagttgggatatccacggttcaaatgtttgtttgaatcgtgtttttgagttgaaccgtctatcgtatagcggctacccgggagacgacgatgctgctgttggcgaccgccggggaaaaaaggctatagcaacggtcgacgaaggcccttcgcggggagcaatgccggctgcggccactaagaagaggaaactaggtactgcagctgagggattaggggcttccgatcattttgttgtggatttaatgggaacttgcgcggctcccggggagaggatgtcttcgcccaggctccaggaatcttcggcgcggatgctgaaggttaccggggaatgttgctgctgttgtatcgacagtgatgggaaaaggatcgccaagatgcgtcgcagaagcgacgggcgttcacgagggtcagggaccccgcggcgcgaggtcaagatggctcgggggatcgcgaagtctgctgccccaggaaccagcaagcctccgctgggcgcgaagtccgccgcccccggccctagcaagccgcttcctgtcgtgcccgtgccggagcaaaggcctgcgtccccgcggcgtaccgctgagacggaggtgggtggggtcgaagtctccatggatatttccgtggatgactttcttgtgggcggcgtcccgatgttcgacgcccatatagggcggggacttgttgggtcggaggctgggcaactggctgttgtcccggcgctggtggcggctgggttggtcgccgtggcgaaggggtatgcgcaggatcctttggccaagttttgcgccagcggcgagatcgcatcggccgccactgccaaggacgtggtgggctcggttacgcagcagctgaaacacgaggagctggaggtgcttccatcgatcgtgacgggtctcatgtccttcgcttcgctcatcacctgtgggggagccatgaatgccttgtcccgtgatggatgcaggcacttcgaagtcttcgatcggtccgatgaagacttcgactgcgagatcttccaggttgaagatgcggtgctaaagcagtccgctggggcgctttatgataggatgtggggccctcatggtcgtgacactgtccgggaaaggtctgaccgggcgatggagcagatggtgaatgatgaggaggtcgaagacttaggtagcctggagagcgcaaaccctttggcggagggtgtgagggcggggactgaggagcagccagcgctgccaacaggtgtcggcgaagacgaccctgtggtcgccgctgtattgcctgaagacacttcggtggcagccgcgccggctgtcgaagactctgcagcgtcgatgggccctgcacaggttctgacatctgggcctgcgcaaccaacctctactgatggtactaattttgtggtggccatgaacgcagtgccagctaatgataatttgtctggttctgaatctgggtctttttcatctgatggtgatgtggctgcggcggagtcttcgccgcggctggagatgggcgaagcgttggatcctccggctggggtgaggatcgaacgccgtcaaccaaaagtggtggcgaagcatagtgttggcgagagttcacgaagtggtaggcgccgtcggatggggctggagcaaactcgtcttcatgtagatcggggtggccaacgcgacttgttgtcctcgtcgtttgggacgagtattggtgaaagggatctacggaatttgttagagg

SEQ ID NO: 32455 - DNA, 1242 bp, Zea mays
  Peptide Sequence Number=SeqID_75830
atgaacaaaacaccggcattcaaggtgccattacaaacggaactccggttccacctccgcagcagcgacgacgacgacttctgctccgaggggccagacagcagcagcgatgacctcagggcggatgctgctgccataaggccctcgcccatgccctcactcgagaggcaaggacgagcaaaaggtcgtagagttggaggtcagtccatgggtggcaccagctatctcgtcggcggagaaacctcttccggctgccgtggcggaaggcggcgccggaagcggctccgaagccactcgggtcagagagccgggcgcgcggcagctgccagtgccacgaatggcgaacgcccttccccccgatcactgagggaaggagcgggccgccgcccacgcagggaccgaccccaactcggcgcactcccctccccagcactgatgatgaaaatccttgaagctgagggaggggcagaggccgcagcccggcttgcttctccccacccaggggctggtggtcaccgtcttggggcagaagaagccaaaccgccgcacgcggtgcatgcaactgcccagcggttagaagcattcctccactatcgcccagaccagcgggtgaaagggcggatagccatgcaggcggcatgcaaccgcgccaagtgggcgcacccctccgacttccaacacacccagcatggaggcccaggcccacacgtcatgcaaccggcgcgccggttgctacgtgcgagcaactacaccgccactcacgccactaccgcgcctcctcgactgcggaccagtaccgcgactcgaggcaaccctgcgtataacccaacagtgccagccaggcgcgacggtcaatacggccaaaaatgggccggcagtaatggcggtggcaggcggacggaagcagcggtcgcgtcgtcagccaaggaccgggaaagggggataccccgaaagggatccttctccgcgaaggaaacgggcccccgagcccccctactgatcagaggttcaaaggctggcccctcggaggggttcaacagccgcctcagagcgctcgggctccgcgcccactactggtcagaggttcgaaggccagcccctcggaagggttcaacggccgcctcaggccactcgggctccgcgcccactactgatcagggcgggaacgatcgtgtaacggaatcccatcagagggaggcatcgagccctcggaccccgtcaaaaggggaccgggttcggtag

SEQ ID NO: 32456 - DNA, 270 bp, Zea mays
  Peptide Sequence Number=SeqID_75831
atgaagcgggatgcctcgcaccacgcatatggacaccgaggaaagcggcaacatggcaccgcacaacgtgctgacgaggaacttgaacggggaggaggtttggaccttgaagacgattgggagggatgtgtgcagggagcggaggcagaggtcgacatggcacttggagttggcttgaagtcgatcaccacttcatcctcctccacctccaggagaatcactccctcctcctcctgcaatagaatcaccccttccacctcatatctataa

SEQ ID NO: 32457 - DNA, 336 bp, Zea mays
  Peptide Sequence Number=SeqID_75832
atggccattggggatggcttctgtcgacgggcgcaccggacagtccggtgtgccactggacactgtccggtgcaccagccacgtcacccaactgttagggtgagaagaactgcctgcaaatcattaggagcgctagcaaagttttctactcagtacacagagaaggccttggacttgttgatggacatgatgaatgatgatacagaagcagttaggctgcatgctctagaagcactatttcgtatggcaacatatggatgtttgagtgtgcaggagaagcacatgcatatggtattaactatgaacatactccgttcacaaatgcatgacaggtag

SEQ ID NO: 32458 - DNA, 1017 bp, Zea mays
  Peptide Sequence Number=SeqID_75833
atgaccgacttgcgagctgtttttcactgtggttcattatattcaggatggggcaccgacgagcaggcggtgataggcatcctagcccaccgcgacgcgacgcagagggagcagatcgcgctggaatacgagcacaagtacggcgagagcctagtccagcgcctccagtccgagctcaccggcgattttgaggttccgatcaccgtgctttcatcatctggtataattagttttttttttttgacatcgcctgagctgacgaatttgagggtgcagagagcagtgtaccactggatgctgggccccgccgagaggcaggcggtgatggcgaacgccgcgacggagtgcctccaggaggagtgcgcggtgatcgtggagatcgcgtgcgccaactcgtccgccgagctcgtggccgtcaagaaggcctaccatgccctgtacaggcgctccctggaggaagacgtcgccgctcgtgccacggccggcaaccttcgcagcctcctgctcgccctggtgagcacgtacaggtacgacggcgccgacagcgtggacatggagctagcgcggtcggaggcgaaggccgtgcacgaggccgtgagggacggcggcggcgcggggggccacgaggagctcatccgggtcgtgggcacccggagcaaggcgcagctcagggccacgttcggctgcttcaaggacgagcaccgccgcagcgtcgccaaggcgctgccgcgcggcaccgaccccacggggtacctgcgcgcgctgcgggcggcggtgaggtgcgtcgcagatcccagcaagtacttcgccaaggtgctgaggagcgcgacgcgcgagtccgcagggaccgacgaggatagcctggccagggtggtgctgctgcacgcggagaaggacgacatgggggccatctgcgccgcgttcctcaagagggcctcctgcaccttggaacaggccgtcgccaaggaaacctcgggcgactacaggagcttcctgctggctcttcttgggagctaa

SEQ ID NO: 32459 - DNA, 285 bp, Zea mays
  Peptide Sequence Number=SeqID_75834
atggggacgctcatttccctatatgcaaaatctgcactgttaagagattcgctaggtattttctttatgacaaactgcactctagcatttgtaacatgtgacactgtttacaggcttgagagagatgcttatcctctttttaggacacttcgacagaagtataagacaagcacagatcgtgacgctgtgtttcaggagttactggacgaaatagctgcaaaattttacaatatacagcgccagaaccctttagaaggacttttcagcgaaatgttcaggatataa

SEQ ID NO: 32460 - DNA, 288 bp, Zea mays
  Peptide Sequence Number=SeqID_75835
atgtcgcggtctttgagcatgagaggtagcatgaggtcgcgccgcgacctacctcctcccgggaagacaattgaaaggcttgagagtatggttgatggaggaaatttctatgaagctcaacaaatgtacaagtcaaccagcgcaaggttgtcaagggcgtcggtgccaggacagcagggccccgactacgcagctcgtagtcacgacgggtatattgctgtccataagtattcagaagccttggacatccttcaatcaggcgctttggtacaattgaagcttggacag

SEQ ID NO: 32461 - DNA, 480 bp, Zea mays
  Peptide Sequence Number=SeqID_75836
gtgccaaaggttcacaataagccaataaaaagaccaagaaaaagggttcaaacaaaagagcaaagggacaaccgaaggcaccctggtctggcgcactggactgtccgatgtgccaccagacagtgtccggtgcaccaccggacagtgtccggtgcaccaggggactccaagctgaactcttcaccttcgggaattctcagaggcgcggactgtccggtgcaccaccggacagtgtccggttccccaagaccaagcgactctgaactcgccagcttcgagaatccgcttcgctataattcaccggacatgtccggtgtacacaggactgtccggtgtaacggcggagcaacggcttgtctgcgccaacgatcacctgctacagcattaaatgcgcgccagcgcgcgcagaggagcagagcacgcgctggtggcacaccggacagcctacagggcatgttcggtgcaccaccggacagctag

SEQ ID NO: 32462 - DNA, 282 bp, Zea mays
  Peptide Sequence Number=SeqID_75837
atgtccggtgcgcccaacggctcccgcatctgcaacggtcggcttcgccatttaaggaaggaaatcgggcaccggacagtgtccgtcctgaatctgacggtaaatgtcaagaaaatgttgtctaagatggacgatgatctcttcttgtcatgcgtggccaagtacaaggacaaagaagaaaaacacgtgtctctagaagcaaagcataaacttacctgggagaagcttgagtccgctgcagcatgtaggaaatgggtgacacctaagaggggggtgaattag

SEQ ID NO: 32463 - DNA, 483 bp, Zea mays
  Peptide Sequence Number=SeqID_75838
atgggcaagaacaacaagcgcaagcgtgagccgactcctccatcggaggagtttggtgactcagaatactcggaggaggagttctcctccgagcccgaagggtctccggctcccgtctctcccccggcgtcgtccgatgactcggacgactcccaggggatagccgcggaggtctggacatatatccgggccgtcgagcgcgccgggcttgaaggctcggatgagtcggagtactcctcggatgaggaggactcggacggcggcgacgagggtgaagatgacgacgacgacgacgacgacgacgacgacggcggcgatggcagtggcaggggcggcggcgacggcagcagggacagcaccaagggcagcagcaggggcagcaccaagggcggcggcggcagcggggacagcaccaagggcagcagcaggggcagcaccaagggcggcggcggcggcaggagcaggggcagggccagtggctag

SEQ ID NO: 32464 - DNA, 981 bp, Zea mays
  Peptide Sequence Number=SeqID_75839
atggctctggctttggtagttagctttatatgcttagtgcctagcaaaccttacctgaaatatgggcaaagagtgggagcggcagtggtggcagctcacgttaacatggggacatattcttggctaagatgtgtggaaatggatcttagcacacatatggtatgcgctcggttctacgccctggaactgggtgtgacagaagtgatggttcgtactctccaaactatccgggtcaacaccagctacgcccctccgccccgacaaatctctgtctacctagtggtagtcgaggaagttccgatgaatctccctcacattcgagtggagaatgaagtcatcctggaggacaactcggaggaacagctgtcgacgcccaccccattgacagagtcactggccttcgcagctaggtcatcgacatcggcaccgcctgcaccagccatccaagctcctgcacccagaggcgacgacctagatgactctgggacgaggatgacgacgataacgaggacgaagaagaacaagtcaacgagggataggggattcaagactctgtctgctcatgagtccctgacaccgctatccacctacgctgcttcggtcaccgatgctgccagacggactctgtggtctcacagccacacctaccggcagcagctgcacgacacgaattttaggcatcttcctctgcgtctgagtggagggagtcagaccagcatcgttctaggtgaagctagtgaggatcgcctcaacaccctagctggtgtggtggccgacctcaacaccgacctggacagtgccaccctggatctctctagggtgcatttggagctggaggatgcccatgccatgattgcagccctggaagcccaacttcaaggacgggatccgcctgaagcccaggtccccgccatggcgttgtctcctccccgcaagaggcttcgctatggggagcccggatccgtcaccaggttgctctag

SEQ ID NO: 32465 - DNA, 390 bp, Zea mays
  Peptide Sequence Number=SeqID_75840
atggccaagctcatcgcacttgaaatagccattgggttggacaaacagttcccatcttttactttcaaggccaattgtcttgttcaacagagtctggaagttagggaagggaatatgatgagcgcggaagttcacttggaactcctgccaggttatggtatccgcattagggtgatgtccaacttctttccgataaccttgagccagtcatcggcatccaaaggatcaaccacatgggagaacgttggcggtgagtccttgcagaagctgcatctaggcggtgatgaactgttccatgttggggttcggtgctggtggtggtatctgttgactacgttggttccggttgttgttgggttcttggcgagcgttcaccatctgattggttag

SEQ ID NO: 32466 - DNA, 435 bp, Zea mays
  Peptide Sequence Number=SeqID_75841
atggtcgccgttgccgccgctccagcatctgtggcgccgtcccctgcgcccaaggccagcgacagcaggaaggcggtggtgcccgtggatgcgtcggagctggagaagcacgtgctggcggtggacgatagctccgtggactgcgccgtgatcgctaggatcctgcgcggctctaggtatagggtgaccgcggtggagtcggcgacacgcgcgctgggcctgctccccgacgtcagcatgatcatcaccgactactggatgccctggatgaccgggtatgagctgctcaagcgcgtcaaggagtcagcggtgctcaggggcatccccgtcgtcatcatgttgttggagaacgtgcccacccgcatcacccgcttcctggaggagttcgacccgcgcctcgccgaggtcttgaccccttcctcgagaatctcataa

SEQ ID NO: 32467 - DNA, 989 bp, Zea mays
  Peptide Sequence Number=SeqID_75842
gagctctcgatggtgcccgcggccgcggctgtcgcagcggcgagcccggcagcgctccctcgttcaacgtccccaaggggcagacgtcccagggcccgtgcctgctcgtttcggtgcgctgggccgagcgcacgctcctcagcacttgtgtcctcctatttcacgtgcagaagtcgggttccgccggccatggccatccccggattcggcagctgcgcggacggccggactgcagccggcaggcggaagtgatgggcagcaccgtcgacgacgacgaggcgtgcgagctggtgagcggctcggacctcgtcatcggcgagggagacgacagcgtcagcgcgtaccttttcaaggccgtcaagaacaacaatggcaccggcatcctcctgctctccgacatcttcggcttccaggactccgccacgcgggacttcgcctaccgcgtcgcctgcaatggctacaatgtcctagttccggacttgttccgtgggaacccgtggaagctgaacgtcccgttcgacggcgacagcttcgagcggtggcgggcggggcaggccccgggccgggtgtccggcgacatcgacgcgtgcacgaggtggctggtggacgagttcaaggccgcgggggtgtccaagaagctgggcgtgatcgggttctgctacggcggcgggcgcctcgtggagacgctggcgcgcgacgccgagagctgcttcagcgcgggggtctgcttctacgggtcccggatggacgcgtccctgggcgaccgcgtcgcggcgcccgtcctgttcgtgtgcggcgacggcgacccgctgtgccccgtggagacggtgcgggagctggaggggcgcgcgagaggcgcccgggcggcggtgtacgccggcaggggccacgggttcgcgcaccggccgcagtcggtggaggaggacggcgacgccgaggacgcgttcaacgcgatgcgggggtggctgcacgaccacctgctcgcctga

SEQ ID NO: 32468 - DNA, 1545 bp, Zea mays
  Peptide Sequence Number=SeqID_75843
atggccgcgcgttgccggatcctctgcaagctgctcggcttaccgcccctgctcctcctctgcgcttgcacaatcccatggcttccctcactcctgctccagtttgctggccgtgtgttcgctcatctccatggccgtggttccccagttcctctctgctcgccggttgccacgagctccagctcggattcagtcctgcgcgccgtctctgctccctcgccatggacgccccagctcttccttcacgctcggattccagttccctgtgtcgcgcgccctggcggctgcgccttgccctcagcgtcggtcatctttgccgggcgcgtgaccctgctcggcaatgaatatcgcgttgctggcccagctttctccatctccctgctcctgtcgttcgcggacacggccgcccctgccctggacgagctgtacaggaggagcggcgaccagccggagaccgagcagcaggccgacgaggaagacgaagaggacgaggtcgaggtcgtggagaatgcgacggaaccactttatgctttactaattgcttgcatgcatgtgcagttctttggcaagtctagtgggcagatggtggaattcttacagtgttctgttggcattgtacataagaatcatgctgagagtataacctcattcattaaagagagtattgatgaggagctgaaagatacagattcatctaaacccactcagaagaagaggctaaccttttgtgtggaagggaatatcagcgttgggaaaaccactttcctccaaagaatagctaatgagacaattgaactgcgtgatcttgtagagatagttcctgagcctattgataagtggcaagatgttggccctgatcacttcaatatattggatgccttctacgctgagccacataggtatgcatacacttttcaaaactatgtgtttgtgacgagagtcatgcaagaaagggaatctcaagctggaataaagcctctcagactgatggaaagaagtgtattcagtgataggatggtattcgtccgtgctgttcacgaagctaattggatgaatgagatggagatcagcatctatgattcctggtttgatccagttgtgtcatcactcccaggtctcatccctgacggatttatctatttaagagctagtccagatacttgccacaaaagaatgatgcataggagaagatcagaggaaggtggtgttacacttgattacttgcaaggtttgcatgagaagcatgagagctggttgcttccttcgaaagggtcgggtcctggtgtattatcggtcagtcaactccccatgcatatggagggctccttgcctccagaaatacgggatcgtgtattttacctggaaggaaatcacatgcactctagcatccagaaggttcctgctctcatcatggattgtgaaccagacattgatttcagcaaagacatagaagctaaacggcaatatgctaggcaagtcgcagagttctttgaattcgtgaaagaaaaagcaggaacgagctccatctgggcaaacaagcaatga

SEQ ID NO: 32469 - DNA, 306 bp, Zea mays
  Peptide Sequence Number=SeqID_75844
atggcgatggtggccaggccagtggcctccaggggcaagccctgcccaccacctcgcgcgctgacaccgccccaagccgacgacctcgactccgacaacttcacactttacaccaagacgcaagagcccatagctcagattaccgggatgacggccccaagacacaaggcatcagatcagaacatgatcagaggccacatacaaattcggaagttgaatgttagggtttgtttggttggcccgtggaaaaagcccgtgtgcactgagttgttaaaaattctaaaaccgtttagtagaactcattaa

SEQ ID NO: 32470 - DNA, 285 bp, Zea mays
  Peptide Sequence Number=SeqID_75845
atggcgagggagcagagacggcgcgcagggctgaatccgagctggagctcgtggcaaccggcgagcagagaggatttggggaaccacggccatggagatgagcgaacacacggccagcaaactggagcaggagtgaggcatcagaggaggcacgagggctatggagtttgggctagtggctgttgcaaggacgaggaagacgaccagagaaatttgcgcaggaagagaagaggagaaaagaacgacggcttaggagagagagcctgcttggatcccatgaattga

SEQ ID NO: 32471 - DNA, 138 bp, Zea mays
  Peptide Sequence Number=SeqID_75846
atggcgcgccgccgcggtgacccccgcgtggctaccggagttgggccagatcattatgttaattggaacatggagaaccacccgggaaaacagtgctaccacaggggtttaatgggacgcccttggctgattaattag

SEQ ID NO: 32472 - DNA, 2781 bp, Zea mays
  Peptide Sequence Number=SeqID_75847
atgaagggagcaatgccgccgcgccagttcatggtgccgggccctggggggccgatgctgccaccgcagcagcagttcgggctggtggagacgcgccccccgctggcggccgtgctgcggccgcgcttcaacatcccgggcctccacccgtcagcggcggccgccgccgcggcctcgggcgcgggcaagatcgcctccacctatgacctcgtcgagccgatgcggttcctctacgtgcacgtcgtcaaggcgcgagacctccccgcggtgtccgccacgggcgccatcgaccccttcgtcgaggtcaagctcggcaacttcaagggcaccacgcccgtcagggcggccagccacaacccgtcctggcagcagtcttcgccttctccgccacgcacctccagtcccatctgctcgaggtcgccctcaaggcccaaggatctcgccggcgacgacctcgtcggccgcgtcgccttcgacctcgcggaggtgccggtccgcgtgcccccggactcgccgctcgcgccgcagtggtaccgcctcgagaccaagcgcggcgagaagctgccgcacggcgagatcatgctctccgtctggctcgggacccaggccgacgaggcgttcccggacgcctggcactccgacgcgcacgccgccgcgggcccggcggccgtcgcgtccacgcgcgccaaggtatacttctcgcccaagctcgtctacctccgagtcgcggccatcgccgcgcaggacctcatcccgcatgacacctcgcgcccgatgagcgcctgcgtcaagctgcagctcgccggccagctccgccgcacgcgccccggcgcaccgccggggacgcccaacccgatttggaacgaggagttcatgttcgtcgcgtcggagcccttcgacgagccgctcgtcgtcaccgtcgaggaccgtgtcgcgccaggccgcgacgagatgctaggccgcattttcctgcccctcgcagcagcaatgccgcggcacgaccacttcggcaaacccgtggagccgcggtggtacagcctcatgcgcccctctgatgatcctgataagaaggaagtcaagttcgcaagcaagatacagattcggatgtcgcttgattttgggtaccatgtccttgacgagtccacctactacagcagtgatctgcagccatcatcaaaacctgcaaggaaaccaagcattgggatgcttgagctgggagttctgggtgcgcgaaacttggtaccgatgaagcccaaggatggacgcaccacggacgcctactgtgtggccaaatatggaccaaagtgggtgcgcaccaggactattcttgacacgctgaatccacaatggaatgagcagtatacctgggaggtctttgatccttgcaccgtgatcacagtggtggtgtttgacaatggtcaaattgggagcaagaatggcggtggcccagatcagcggattgggaaggtcaggatccggctctcaacactggagacggacagagtgtacacgcatttctaccctctgctggttttaaatccgagtggactcaagaagaccggcgagcttcatttggctgtgcggtttacctgcacagcttgggtgaacatgatggcgctgtatggtcgtccgctgcttccaaagatgcactacacgcagccgatcgctgtgatgcaactggactacctgaggcaccaggcaatgcagattgttgcagccagactcagccgcgctgagccgccgctgcgcagggaggttgtggaatatatgctcgatgtggattcacatatgtttagtctccggcgcagcaaggctaatttccatcgtatcacctcactgttctttggttttctggcaatgctcaagtggtacgacggcatcaggagctggtggaactcgatcacgacggtgctagtgcacatgctgttcctgatactgatctgctacccggagctcatcctgcctaccatcttcctctacatgttcatgatcgggctctggaactatcgtttcaggccaaggcatccgtcgcacatggacactaagctgtcccatgctgagctgacacaccctgatgagcttgacgaggagttcgacacattcccttcctccagaccagctgaaatcgtaaggatgcgctacgacaggctgaggagcatcggaggccgtgtgcagaccgtggttggggacctggcgacacaaggcgagagagcccatgctttgctgagctggagggaccctcgggccaccgccatcttcgttttcttgtccctggtggtcgccgttgttctgtacgtgacgccgttccaggttctgatggtgataggcatgctttacctgcttcgacatccccggttccgcagcaggatgccctccgtgcctttcaacttctacagaagactgcctgccaggtcactaggcgaggaggcgaactggagctgcgcaaggaagagcggtggcgactgctactcccctcaccaggcgaggcctagcgctgcgactctctcctctcgcgactcgccgccgccgcggctctcactccagccagacctggccgctctgctccgcttcgacccacgcgacatcttcctccctgaggacgcgctcaccggctccaacccgtccgttgccgccaaattcctccacggcctcctccaccctgcggactccgccactgccgtccctggagacttcaccttccgcgaccgcttcctcctccgcgacccagccgacgcgctcgctctaccgggcctcctcatcctccccagtcgttcggtctga

SEQ ID NO: 32473 - DNA, 585 bp, Zea mays
  Peptide Sequence Number=SeqID_75848
atggcggcagcagacaagcggaagcagcggtcaaatcgcctgcagggcaagcgacacctttggcaggcgaagcgggcgtcgtttcacctccgccatgatgaccgcgtcaaaaaggctggccctcggaagggttcgacagccgccccagagcactcgggctcaaagcctattactgatcaggggttcgaaggctggcccctcggaagggtccgacagccgccccagagcactcgggctccgcgctcactactgatcgggggttcgaaggctggcccctcggaagggttcgacagccgccccagagcacgcagagtgagggatgactctgggtacgtccgttacatggccgaggatcgggctacgctctcgaggcagtgggcgcaccctcggcacgcccgaggcccaacttgggcaggcttcgtcgagaagcaaccttggccaaatcgcctctccaaccgaccgtatcgcaggcgcattcaatgcgaggatcgcctgacaccttatcctgacacccacccgggcaaggctgacaacagcaagttcagcctcgggcgcaataggaagctccgcctcgcccgaccttag

SEQ ID NO: 32474 - DNA, 516 bp, Zea mays
  Peptide Sequence Number=SeqID_75849
atggtgtccataggagctaacacgctctcaaaaacacaaattacaacgcttgagagtgagataaaaagggaaaaggaggcggaaaagatttttaatgatacacattcacagttctcgcccaccacaaaagaaatggagaccaaaggttactgcagatacgacagacgtctggccccagcagtcgaaccatccagatctaaggcggacagtctgtgcccagcgcccaaactatctgcgcaccaccaggaaacttatgacatctctctagtcgctatggaccaagatggcgacaaccacgatgatctattggaagaggacatggtggattatgaaacatcgccagagcacacaagtattgagtttaataagcttggtaaccaagataacgagttgattaggaccaatatgacactcagcggtattgcgagcaatagttcgattgaagctaagggtgtcacgttcgttgaattaaccatcgggacaaagaccctcgctgttgccttctttgttgcctaa

SEQ ID NO: 32475 - DNA, 660 bp, Zea mays
  Peptide Sequence Number=SeqID_75850
atgaccttggagcctcatcccctgcagccaggctggcgctccttggactcagagtcttccgggtatcgggcagaggacacgatcgaggcgatcgctctgcatggattgactaccttctgcgggttccatcccttggagctggctacccatcccattggcttgttccccgctgaaaaggaggacgacccaatgtggaaggatcgggtggaacatgccaaggacatctgggccatctacccaggtcagactgcgcacttgacagtgatgcgcggtgaggccatgtcccatctgatggcactgctggaggccaccaagatcacgttggataaccgagaggagcttgtggtcgacttgtctcaagaaatggtagagaaagatttgcaagtggagcagctgtctggtgagattcaggagttggaggagctagtgggcacccgggagaacactattgaggtcctagaggatcagctcctcaacactcagcagcagctggcagaagcaaatgagcacctggacatgcaccaccaggagatccaggaccaggaggacgacgaggatgtcgacattgagggaggagatgagcctgcctccagtgtggacactgctggctcgggaagaccaccttcccccgagtcaagtgttgcttcgttcgctcactag

SEQ ID NO: 32476 - DNA, 936 bp, Zea mays
  Peptide Sequence Number=SeqID_75851
atgaccgcatcaaaaaggtacgccacatcgttcaaattcatatccctttttctcttcccctttctctctcttgctacagggactaggaaaggggataccccgaaagggatccttctccgtgaaggaagtgggccccgagccctcctactgatcagaggttcgaaggctggcccctcggaagggttcgacagccgcctcagagcactcgggctccacgctcactactggtcagaggaaaacagcgtcgcctacgctgctccgactgctgtgccactcgccagagtgaggctgacagccgccaagaccggcctcaagcgccataggaagctccgcctcgcccgacccctgagctcggactcagcctcgacctcggaagacggactccgcctcgcccgacccctgacctcggactcagcctcgacctcggaagacggactctacctcgcccgaccccagggctcggactcagcctcgacctcaaaagacggtcttcgcctcgcccgacccccggggctcggactcagcctcgacgccggacgacggtctccgcctcgcctgaccccagggctcggactcaacctcgacgccggacgacggtctccgcctcgcccgaccccagggctcggactcaaccttgacctcggacaatggtctccgcctcgcccgaccccagggctcggactcaacctcgacgccggacgacggtctccgcctcgcccgaccctagggctcggactcaaccttgacctcggacaacggtctccgcctcgcccgaccccagggctcggactcaacctcgacgccggacgacggtctccgcctcgcccgaccctagggctcggactcagcctcgacctcggaggagccaccacctcacccgacctcgggctcggaccgaccacgtcacagggggggccatcattaccctactcctag

SEQ ID NO: 32477 - DNA, 171 bp, Zea mays
  Peptide Sequence Number=SeqID_75852
atggcagggatgtactgcagcgcccgcgcctgcctcaactggaggatgcagccaccggcccacaccgccatgcgaactcttctttcccccgtcggcgagggatcgggaaaggggatactccgaaagggatccttctccgtgaaggaagcgggccccgagcccccctactga

SEQ ID NO: 32478 - DNA, 222 bp, Zea mays
  Peptide Sequence Number=SeqID_75853
atggccagggcgcgtctgcgcgacttgaggagggagaagaagggccagggtggggcccacgtggcgtgcgcggtttctcttttcatgtatggaatagccgggttcaagcttaccctatcccatatccagggcatgtggccagttaagatagtccttgatcttcaggcctacatacgtgtcacacccgggttttggggcaccaagacccgggcgcgaacataa

SEQ ID NO: 32479 - DNA, 722 bp, Zea mays
  Peptide Sequence Number=SeqID_75854
atggcagatgatgacgatgtcaatccggtcaccggcaacgacgaccttcgtgcggcagggcttgtcccagatgacgaagacgacatccaggctgacgctgctgctttgctcggtatcgatctaacctctgctcctgtcgatctaagttctaatccgaccaacgctggtggagggcctgctacgtccaccgatactccggtcggctccaccagcatcgatggtggtactggtacctcatctgttgcgggctggcccggcacgaaaagtggcccagagggtcgtgcctgggccaacggccaggcacgtgggttctctaggcacggcccgttaagcccgtgtgcccgggccggcccgttggctgatgggccgtgcttccccgggcccgtgccgggtcgtgccgggccggcctgttggccatctatacgctcactgccgttcacgtatgtggcttacgtgtggggcccactgtccagaatcgtcatctccaaccaacgcggcgggctcctgtacagcaaaacggactccgtaacaaactcatgcgaatcccgcggtcttcgcctgaactctgcgcgcgcgtttcggagggccagggcgatgctgggctatataagtgcagggcgccgcaatatccccacctgcattccgccgctagtgctggagagagaagggcatggggagtccttcaccggcgtcgatttgggcaacgccggcctcatcaccgg

SEQ ID NO: 32480 - DNA, 138 bp, Zea mays
  Peptide Sequence Number=SeqID_75855
atggagctgtcacgtctggagaacggcgtcgaaagggccaagctgcttcggcgtgagggagcaggccactcacaggctgggagcgagcgggtggggaagaactacgtagaagctcgctgcaacacaacttggaaatga

SEQ ID NO: 32481 - DNA, 475 bp, Zea mays
  Peptide Sequence Number=SeqID_75856
taaccgcggcggaagaaagggcggaggggcttaccagcggcgagattgctccggtgaagtggtcgaggacgaaggggaagtctcagggatcacaacgggaggttcacgggatgccagagaagatatgagcgcaaggaattggacggagactcactggatagctcggtccacgcgcggcggcggaagaccgaagtccggtgaggtcgatctcgggcctccggtgaagtctggccgggtccgagggcttggcaagcttcacgggctactggcggagctagccgaagcactggcttgcccagaggatggctggagtgggctggccacgatggccgaagctctggcggcaatggcgggcggaattgagctcgccggagctaaggaaaagtggtcggccggtgaggagatatggagccaggaaatccggtctatctccctgcccaaacccgaggcaaatccaaggttttgtcgtgtctag

SEQ ID NO: 32482 - DNA, 234 bp, Zea mays
  Peptide Sequence Number=SeqID_75857
atggcgggcggaattgagctcgccggagctaaggagagggggctggccgatgaagagactaatgtattgtgtctaagtgctggaaacaggaaaaatcaagttgaaattaaagatggctttattcagccaaagtcagctctgtctgggtgcaccagactgtccggtggtgcaccggacagtgtccggtgcgccaggctggctcaggcgaacttgctgctctcgggaagcgattaa

SEQ ID NO: 32483 - DNA, 393 bp, Zea mays
  Peptide Sequence Number=SeqID_75858
atgaaggctggggagcaccggggggataaggagggggaatgttttgtccggtttgggcatggcggtggcctaactccttctggtataaccgttaaggttaggacgtgtgaggaaagaaagagattcggcattcgggtctcacgacgcctcctgggactagtaattgtatcacatttgagtcccagaggattggggcgcttcaaaactgctgcagctgctgaggaaaccccggctgcagtgcctgaaaaaagagagaagatgcctggaaaagagaaggagcctgccgaagatgcttcggaagaaggaaatttcaactttcaaaacataattgggcaagaattgtcaaaggctaaaaaagaagagctgaaaaacataattcggtggtgttgctga

SEQ ID NO: 32484 - DNA, 117 bp, Zea mays
  Peptide Sequence Number=SeqID_75859
atggcgggcggaattgagctcgccggagctaaggagaggggctggccggtgaagggagaaaatctctggtttgatgtgtccgaggcacgcgtcccaatgccatctcctggcacatga

SEQ ID NO: 32485 - DNA, 438 bp, Zea mays
  Peptide Sequence Number=SeqID_75860
atggccggagtcggtcggtccacacgcgcaggcggggatgctcgtcggcggcgaggagtccggcctgatcacggcgagatagagcaattggatggtttagagaggcatccggtgaagtccggccgggtccgagggcttggcaagcttcacgggctactggcggagctagccgaagcactggctcgacttgaggatggctggagtgggctggccacggtggccgaagctctggcggcaatggcgggcggaattgagctcgccggagctaaggaaaggggctggccggtgagggtgagtgcggggcgaagtgaggtgcctccgaggaggctttataggcacgggtgggcacggccgagggcgtgggcacgcggcggacttaaccggacgccgggggctcgcgtcccaatgccatcttctggcacacgacagaggggttag

SEQ ID NO: 32486 - DNA, 738 bp, Zea mays
  Peptide Sequence Number=SeqID_75861
atggcgagctcggcccgtaacgcgcggcggccacgcagggcccgttacaatgggccggatcgcacgtgggcctctgagctggacgaggccgcactatgggatgacttcatcgccggtcttcgtctggtgccgatcaagcgaagggtgtccctgcctgttttgtctgtcagaccggcggctgcagcgaagacttcgagcgaagggtggcgtctttgccttcgccccaacatttgccctccgagggaccagttcgacaaagtcacctggttcaagattttgggcctgcacgcgcaaccgctactactaaatttttggcggcttcgaccgcggaaggtggtaatgaatgtggtggcatctgcatctgagtttttggattttgctgactctgggagctcggttgagtggactgaggagtcgtcggaggaggacttggactactttgcggccttggatgtggctgcggtggaggcttcgccacacgccgcggacgcacaagatgtgccaggtcctagcaccgggcgccgacgacgaagggcggttgcgaagcgtagagttagtggggaggagggggctcggcttcgtgtgagtagggctggtcggcaggaactgttgtctttgccggccgccgcgagtacgggtgaagcggaactgcgaagtctttttgcgggtgaggagcttaggataatgttatttaattatagggagatgggaattattcctaaggttgagctgatgtag

SEQ ID NO: 32487 - DNA, 375 bp, Zea mays
  Peptide Sequence Number=SeqID_75862
atgggcttcgctacgataccagctgtgacggaacctcccaagtcattaggcccacctacagttgtccttgtccaacggacctcagacaaccctgcaggtgcacctgatcacttgacaagctcggtatctgaattccttaccttcccaagagtgttttacccgtcacgcagacattacaaatcatcggagatgcggttcttaagaccagatcaggttcacgccaaccgagagcacagatacaccaccgtccagcctcttgccacggagggtacactctactctcgccatctctccatgctcattgcgtgttatcttattctggtattagtctgcccgaggcaaagcttacccatgacgaggcatgtgaccagttaa

SEQ ID NO: 32488 - DNA, 129 bp, Zea mays
  Peptide Sequence Number=SeqID_75863
atgtacgggaagaggccgtgccagcggcgaagcgtcggaggtgttgccttagatgtgaaatgtgatgatctaaatggggaggagaagatgcagcaacatgagatggtgatggatacagaagcacaataa

SEQ ID NO: 32489 - DNA, 1238 bp, Zea mays
  Peptide Sequence Number=SeqID_75864
cactctgctacaccccccgttgtacacctggatcctctccttacgactataaaagggaggaccagggccttcttagagaaggttggccgcgcgggaccgaggacgggacaggcgctctcttggggccgctcgcttccctcacccgcgtggacgcttgtaacccccttactgcaagcgcacctgacctgggcgcgggacgaacacgaaggccgcgggacttccacctctctcacgctcgactccggccacctcgcctctccccccttcgcgctcgcccacgcgctcgacccatctgggctggggcacgcagcatactcactcgtcggcttagggaccccctgtctcgaaacgccgacaaggctgcaccgcgaacgacgcgaaccgcccccgcaaacctcctcgagcaacccttcgcgctcgcgcaatccccgtgtttgtttaatctgtacatggatgacgacgacgtgtctcccgacgcccgcgacgtctacgtcgccaacgccaacgtatcctcctacttcgccgcctccgatgtcgcctccgccgaccgtctcttcgcggaggtctccaccgacgtcgccgacgtcgtcgcctggaccaccatggtcgccggccacgtcagttccggcggcctaggccgggcgaggcacttcttcgacgccatgcccgagaggaacgtcgtattctggaacgcgatgctgcgcgcgtatgcccacgccgggatgctcaccgaggcgcgggacctgttcgacgcaatgcctaccaggaacgccgccacctggagctgcatgatcagtggcctcgtgctgtcgggacgctgctgggaggcgctgcatgatcaggggctcttcggtgacatggtccgcagcagcagcatcgtgccgaatgagcccgcgctggtgagcgtggtctcggcgtgcgcccagctgcagtcactggaacacggcgcgtgggtgcacgcgtacgccgaacaggagctgcaggggacgatgagtgttgtcctcgcctccgctatcgtcgacatgtcaggaaatgtggggggtatccacagtgccatcagggtgtttgctgtcatgcccatgaggaacatctactcctggaacgcgatgattgctgggctcgcgatgaatggtggcgaacgacaggccctgtcgctctcgtcgtgtcatggaggccttgtatttcgtcaagagcatgcccgtggagccacaccctggcttatggggcgcactagctag

SEQ ID NO: 32490 - DNA, 744 bp, Zea mays
  Peptide Sequence Number=SeqID_75865
atggcgcttcctgttgacgtggcggtctgtgccctaggcagggcgacgtggggggcggagtccgagccctggggtcgggcgaggcggaagtcgttcggccgaggccagggcggagtccgagccctggggtcgggcgaggcggagtttcgtcgtcttccggcccgagtccgagccctggggtcgggcggagcgaagttcgccgtcttccgggtcttagcccgagtccgagccctggggtcgggcggagcggagttcgccgtcttccgggtcttagcccgagtccgagccctggggtcgggcggagcggagttcgccgtcttccgggtcttagcccgagtccgagccctggggtcgggcggagcggagttcgccgtcttccgggtcttagcccgagtccgagccctggggtcgggcggagcggagttcgccgtcttccgggtcttagcccgagtccgagccctggggtcgggcggagcggagttcgccaccttccgggtcttagcccgagtccgagccctggggtcgggcggagcggagttcgccgtggcggcgctgtccttctgtcagactggccagtggagcggtggagtgacggcggtcacttcggctctgccgggggcgcgtgtcaggatgaaggtctttagcaaccgcggcgggattgcagcgttcgtggatgttgcagctttattagccgcggcgggattgccgcgtggggggttcgtggaggtcgcggcggctgcttag

SEQ ID NO: 32491 - DNA, 438 bp, Zea mays
  Peptide Sequence Number=SeqID_75866
atgagcggcggcggaagcgtgagtttcctcgagatccagccgtcggagctcgcattcccctttgagataatgaggcagagctcgtgttccatgcaactgaccaataagactgaccattatgtagcattcaaggtcaaaacaaccaacccaaagcagtactgtgtgcgtcctaatattggtgttgtattacctggctcaacttgcaatgttacagtgacaatgcaagcacagaaggcttcaccacctgacatgcagtgcaaggacaagttcctagttcaaagcgttgtggccgagaatggtgtgacagctcaagatattaatgcagcaatggcaacttctgtgatctccaagctaactgaggagaaaatgtctgctgttcagcagaaccagaaattacgccaagagctggtgtcctttgaatcgtttccattctcataa

SEQ ID NO: 32492 - DNA, 303 bp, Zea mays
  Peptide Sequence Number=SeqID_75867
atggccgaggccgagtccgagcccctgggtcgggcgaggtggaagtcgtcggcagaggccagggcggtgtccgagccctgggtcgggcgaagcggacccgagtccgagccctgggtcgggcggagcggagttcgccgtcttccggggcttagcccgagtccgagccctgggtcgggcggagcggagttcgccgtcttccggggccttagcccgagtccgagccctgggtcgggcggagcggagttcgccgtcttccggggcttagcccgagtccgagccctgggtcgggcggagcttcctatg

SEQ ID NO: 32493 - DNA, 2091 bp, Zea mays
  Peptide Sequence Number=SeqID_75868
atgcgccacatggacctacacatggaggctgaggagaagtacgccgaggcctgcctcgccgcttgcggcgctgaccgcctcgcccggaagctccagctcgagatggcctcctgccttgcctcggactcgtgcacgccgcccgtccgctggggcccttggctgtactaccgacgagcggacgagggcaagcaataccccgtgctctgccgccgctccgccgcgctccatagcgaattcgtctcgtacagtgacccctccgcaggtttcgacttcacggctgggaagcgcatcgagcagaaattggtggattacaacaaggaggccgagcggttcggaggatactcatatgaggagctgtctgaagtatctccagatcacaggttcattgcatacacaatgtatgacaaagataaggactccttcactttaatggttagggacctagtaacaggcacacttcatgataaaccctgtgctgaccgggtgtcaaatatttcatgggctatggatgggaaagcattggtttatattgttacaaatgaggaaagaagaccatataggttgttttgtagcatgattggatccaacaaggatgccattctcatgttggaagaacctgatgagaatatttttctaaatatcagacatacgaaggattttcgatatataacgttaaatgtcttttcagatactcactcaaaggtgtatttaataaatgcttctaatcccctttcccaaatgacgcttgtatgggaaggggaatcccaagttcattgcattgttgaacatcatcgtggtcacctttatttgtttacagatgctgcaagagaaggtgtccctgttgattcacattatataatgcagtctgttgtggaatcttctgggccaaacagttggaagaatgttttagttgaggaacctggtgtcattcttgaagatgttgatttttgtgatactcatatggtgctaactctgagacaaggcagaaaactcagactttgttcagttaaattgcctctaactgaagatatcaaagtacctactcatctatcagatttgcgtccaattgacctgcctctccccagtgatgaaggatacaattctagaatagtgttcagtcaaacccttgctatagaaattacacaaattcatatgaaattgtgctttcgtctctcagtgtcagtgttggcccagcagagtgctttcaccgttggtgttctttccgatctcaatgtttttccttctttacagcaatcctcagataaagcagatttttcaaatgatgattttgttggttgtgcttggaatgagctctctgaatactatgcttgtgaatactatgatgttccatcaaaagatggtgttttggttccattaactttagtatactcgcggaagcacaagcaagatggaaatccaggattacttcatggacatggtgcttacggtgaaattctggataaacgttggcgcagtgaattaaaaactctactggatcgtggttgggtgattgcatatgctgatgttagcctattgaaattacggcatttggttatatactcactaaagcatgtttattcaggggtggtggaggttatggctatcatacaagaaaataagcttgctggatggggatatagtgctggaggacttctggtggcctcggcaattaattgtcgtccagatttgtttcgtgctgctgttttaaaggccctctgtgaagatatcagcaaaccgagaagtcattgggacgtggagaacacggacgtcaccaatggctacacgctcgcgcacaaagtggagatcaatctcaacatgcatcgtgcgtttgtgttggacatgattggtggagagataaaatgcactgatattatcacagtagaccagggtactcttggtcagagggtcgtggagttcatgcagcagttgacgcaaccagcaggcctcagcaaagcattggcgactgcacggtactcagcttcgacacttgaccgggaaacaacactctggcgcttggaggatcaggaaacaagattctcaccaatgaaaaccgcatacccagaagtagaccgtcgcgtgtcaggacaatga

SEQ ID NO: 32494 - DNA, 456 bp, Zea mays
  Peptide Sequence Number=SeqID_75869
atgggcgtcagcggcatccttctcagcctgctgggcagcgtggagatgttcggcgacctgctggaggaggtcggcctcctctttctcctggcgagcctgctcctcaggggtgagaaggttgtcgcccatggtggagacgagggagggcggcagaaggtccctttcttggatgtttgcaacacccttctccatcctattgtacctcttacagccattgattatgaagagtttgggtatcccgtggattatgaggaattccttgcaatcaggaagtattctccttatgataacatccagaaggatgttccttacccagctctgtttgtgacgtcatcattcaatacaagagaggccgtgtgtgaacaacatgtgtcttattattctgaatcaaaccctgttggtcaaatatgggaagctgaggcaacaatgtcagtcctctccatcctaggcacctga

SEQ ID NO: 32495 - DNA, 345 bp, Zea mays
  Peptide Sequence Number=SeqID_75870
atgggcggacccacagggtggtccgggtgggccctggcacaccctaagccaggtccaccgggaccccacccggtcattcggttcggcggacgtcctactgctgttccaacttccatctccgaatctccgatcgttcggcttcccacagccccaaaacgatcgatcctcctgcgcaagacggatgttcctagcggctggcttcctgcgcggccacaagcccacaaccacaagacaatcccttctcctgcgcggctattcctggcgactgggcttcctgcgcggctgaccggctgttccgggcttccagctctcgtctcgtctcgcgaaatccggtcagacacctga

SEQ ID NO: 32496 - DNA, 711 bp, Zea mays
  Peptide Sequence Number=SeqID_75871
atgtcttctcactcccttatgcgccgcgcctttccaccttccaaacccccggatggggggagaccgccgtcttttcgcctcatcgttggaggaaagcaactccgtgggagttggtaccttttagccatcattcggcttcaaggattttcatcatgcaacccggttgctcccctccgctggcggtcgcccgagacggtgatcaccagctcgtgggtggggaggagcaagccgggctgcgatcttggtcccaccctcagcttcaaggatgttcatcatcctcgctggggtgggtgtcgggctgagccggcgctctacctcccgcgcgggtccgtgggccatcctctcccgcggcatccgagggagagggcgctcactggccctgcgggcggcccggacttcgacaacgcggggctggtcgacggcaagcgtcgtcacctccagcgtgtcgggtttgttggcttggctcccggcggccccttctgtcggagggcggctgccgcgccgtgccggtgccccacttgtctgggaggattcgagtggggatctgccggagggctggtgggccctgacgtcggcgccgaggcggaggcggctcgagaagaatccctcggctcggtcggccttgctgtccgaggctcctctagcttagttaaagagacccctcggccgctcttcgacgagccgaggccaggggtagcaatatcagtatga

SEQ ID NO: 32497 - DNA, 225 bp, Zea mays
  Peptide Sequence Number=SeqID_75872
atgggctccgccaccgtcggcgccctcctcctcggctccgcgcccgcctccggccccagcaatagcggcggggcgcccagcatagggctgcttgcatttaaatttgcactgcctcgaaatccactaggaaaggtgagttcagaagacacgggcgaggagtatggcggccccgtcgttcgcgccaagcggacgaggatgggcggggacgaggataagttgacatga

SEQ ID NO: 32498 - DNA, 219 bp, Zea mays
  Peptide Sequence Number=SeqID_75873
atggcagatcgacgggagcagagaggagaggagaggacggggcggaggggtcttataaccaccgcgggagggaaggagaagagagacagggagtggcgcttggccgggaagagaagacgaggggaggggaggctgtcagtgggtggaggtggcgcccaccgaattcggatctgggcatggagggagcggagggaggcgtcgcgtggtgcggtgacgtga

SEQ ID NO: 32499 - DNA, 1539 bp, Zea mays
  Peptide Sequence Number=SeqID_75874
atggacggccacggcggcggggcgggggccggcaagctgacgcggacgccgtcctcgctgctgcgctcgcccacggtgcgcaactgctcctcgttccaggccgtggttgtcgacgacccggagcccgacgacaagaaggcgcaggcgcaccccaagcccccgccccaccacttgcaccccggtggcggccccgcccacccgcggctcgtcctcgcgctcccgctcgccttcctgctcgtgctgctcctcctccgcggcggcggcgacggccaccacctcgccctcctttcggcgtccgcggccgtcgcgctcgccgccgccgcgggggccgcgcgcctgctccggggacgtctgcgccgctcgccaggctccggctcggtccagtggttcatcggggacgacgacgacaagccgcagaagcgggcggacaaggccgccgcgccgcacggccgcgtcgtgcgggagggcgtcgagttctacagcaatggggactgctacgagggcgagttccaccagggccgctgcaacggcagcggcgtctacaacttcttcggcaagggcaagtacgagggcgactgggtcgacggcaagtacgacggctacggcatcgagagctgggcgcggggcagccggtaccgcggccagtaccgccagggcctccgccacggccacggcgtctaccgcttctacagcggcgactgctacgcgggcgagtgggccggcggccagagccacggcatcggcgcgcagacctgctccgacgggagctcctacgtcggggagttcaagtgcggcgtcaagcacggcatcgggagctaccatttcagaaacggtgatcggtatgcgggcgagtactttggggacaagatccacgggtttggcgtctaccgcttcgccaatggccactgctacgaaggctcctggcacgaaggcaagaagcagggatttgggatgtacacgttccggaacggcgacaggcgatcgggggactgggattctgggactctcaagacccccttgccccccgctgatccttccgtccagcgtgctgtacaggccgctcagcgtgctgcggagaacgcatttcgcctgcctagagttgatgagcaggattcctgcgggtatctgatatcgttacatgtgtttgttatgggttctattggaatcaaatacattggaatcagataccgctgtacagaaaactcaaaccctccaaccctagccggaatcaacaccccgattcactcgctcaggccgctcgagcgttcctcctcctcctgggacgccagtgccgccgccacccaggcctccatcctcctcggcctcctcctcggacgccagtgccaccgccacccaggtctccatcctccccggacgccagcagccggcgccaagtcttcgcttccgtccagggtaacaaatctcctagagtctgttctctctgaatctcgaatttgcccagagtccgtctctctgaatctcctagagttcatctctccgaaactccgaatctctggttttggttcgtcggagttctag

SEQ ID NO: 32500 - DNA, 684 bp, Zea mays
  Peptide Sequence Number=SeqID_75875
atggaggacacaagcctgctcatggaatgggcgatggacacgctgctgcaggaggaggaggagcctgcggcgctctacgacagctgcggcgaggcagtagccgtcttcccctcgttgcaagggctccgcgacgcctcccacgcggcggagatggtgcgggagctgatggccgccgtcgaaaccgacgacgcggcaaacagctggacgacgagcggttctggcggcgaggtcaccgacggcggcagcagcggggccactgaccctgcagcccccgcggctgcggaggccgcggatttctacggcggctccgggccgccacactcgcccaactcgttcccgagcggcaaaaccaacaccagtctgcccacggtgagggtgagctggaacttcgtcaccggctcggcggcggcgcagcctcgcagcgacggcgtgctggaggaaggcgccgtcccgatacgccgcgtgccgccggagctggcccaccgccgccggtcgccgccaccgccgccgagaagagcccaccacccaacacgcggcatgggagccgcgtcgtgcacgccggaacacatcgtcgcggagcgcaaacgccgggagaagatcaacaatcgcttgatcgagctctccaccgtcatcccaggactcaagaaggtcctttctcagtcccagccgatccatatgaactga

SEQ ID NO: 32501 - DNA, 291 bp, Zea mays
  Peptide Sequence Number=SeqID_75876
atggttcagtaccctgaatcagatcagaccgccagcgcagccgcttcatcgccgacaaccgctcctcgccgtgattcgcgccaccaccgtgggattcgcgtcgccgatgacccgataaggccgccagaaaacgaagaagagatcgaagtgaccgaagagaagacaccaccaccttcggaatctcaggccggaagttgtttctactttgatatttgcgggtccgagcctgactcacctactaacgaaggcaagccccggtgcattttgccccccttccttgatgttttttaa

SEQ ID NO: 32502 - DNA, 297 bp, Zea mays
  Peptide Sequence Number=SeqID_75877
atggcgccccgcatgctctatgacgacggcggctctcagcccccttacggaagcaagaggacagcctgtcgtgtgcctggtggcgacgaccgtgatgatgacacaaacccgttccgcctcctctttgtcgcattgttcgttccattgccgcatcacctccttctcatcgcgcattatgaggtcctcaaagggttgctggtcatcagccgggagtgcctccgttgccggcttgaagatgttggtggaggagaccttggtgtgatccttggaaccaagaatctgtgggctaatttttag

SEQ ID NO: 32503 - DNA, 462 bp, Zea mays
  Peptide Sequence Number=SeqID_75878
atggggaagacgtgggcagcgcaggaaatggaattgggagatgaaaaactctacgctagggacgatgtctcgtccccattatatgcacgcgacacggctaagtcatgtgacccttcacacagctgtcgccatcccatcgccctccctctcgtccaaggtctgcctgcctataaagtgaaagtgaagccagggaagaggcaaagcgaaaggagagaaggaatccgatccatccaagccaagccaaggcagagaagaagaagaggaggaagaagaagcatcggcagcatgtcggaggggactgccaactgcgtggacatcctgatcgccatcatcctgcctccgctgggggtgttcctcaagtacgggtgcggccacgagttctggatctgcctcctcctcaccttcctcggctacatccccggcatcatctacgccatctacgccatcaccaagaacacctag

SEQ ID NO: 32504 - DNA, 2706 bp, Zea mays
  Peptide Sequence Number=SeqID_75879
atgaacagtggtgacaacagggatacgtgctcaggggcaaatagctctgttaatgacgaggccgtgctgcggggagacgtcaccgcaggccttcgtctggtgctgaatgaagcgaagggtgtccctgcccgttttgtcttcgtcaaaccagcgactgcagcgaatggcgacgagcgaagggtggcgtctttgccttcgccccaacatttgccctccgagggaccagttcgacaaagtcacctggtgccgaagacgtcgctagatggcggagacgctgccctcgctcgaagtggttccgcgggggttttcgatgtgaccgttgatggacggcgtactgttggattgcgggtttcccgaagcgccgcgccctgtcggattgcgggtttcccgaagagccgcgccctgcctataaaaagggggcaggggtcggtgctttttgaactttgccttccgcgcaccgcgaaaaaccctagccgcccgccgacttgctgctcgtctgcccgtcgtgcttctttgatcgccggagatctggctcgcgtgaagcagaccgcccgccgccgcagacggtacgtagcaatgccgtcctcttcttcttccgccgacaccacgccgccggcagccgcctcgtctgaggagacgttgagtagcttggtggtggaggagttgcgcgccggcgactctgttgattttggtgtgtcacggatgacgtcagcccgcgttgaagatatgcaggggttgggctacatagcggcggagtcgctcgcgctcccggggacggaggaagtccccgagccggaggaagaggatgcagacgaaggggcccttcggtgcgccgccggtcagagcagtgggcgtgatttagttgaagagttcgtggcgtacggggtctggcccttggcgcacggctgggcgttgggcgaagtgtgccctcgccagatgccttttcacggaggaagggtggtgcgaagtcctgccttcgcactgaatttgcgaaaccgcgacccggccgcctttgtgcgtgatgcggaggacctggcggtgcggctcgtgggacgttacgtgccgaggacggaaggccagcgcagctttgatatccgcgggtcaaatgaccgtttgaacagggtcttcgaattaaatcaattgccgtacgacgactatcccggtcaagacgaagcggaccgccgtgggaagaaaccagcggtggagactggagacgaccctgcgccggcggccgccccttcctcgaaaaagagaaaattaggtactgcgatgggaggacttggggtgtctgacagttttgctagagaattgatgaggacgtgtgcggccccgggggaaaggatgtcttcgcccgagctccgggagtcttcagctcggatgctgagggttaccgggggctgctggcttagaaatgttcctatcccctgcgcggctgaggaggactgttttacatctcgtatggttcatcggtggagagtgtttccttacgggcgaaatatcggtgctgttgtgtgggcagtgatggacaaggatcgccaaggtgcggcgcaaaaacaccaggcgactgtccggctgcatgaagctaggccgaagaggccgcggggggctccgaaggctgcggcctccggcggaggcaagccgccgctggcggcgaaggcgggcgccgctgcacctagcaaggcgccggaggcgatggcgggcgccggagtctccaagtcaatgagggtggtgccgccggccagcaaagtggcggaggcttcgaagacggcccaagcgttgccgttgtcgggcaagcgcgttgccgacttcggcaccgatattactgtggacgactatcttggtgggtcggacgagggccagcttgctatgggtgcgcctggcgcggagatcgcgacggcggccatagtgccgaaggcgaggggcgaggcccttgacgccggaggcgaggtgtcggcccctcccccgtggtcagggacgaggcggggcgcagcgaccctccggctgaagggagtgacggaggcgctgagtcaggcgacggaggcgctgagtcaggtggctgacttcgccagccgtactgcgtcgggggccctcacggcggctgtgtctgccgaagtcgagagacttcggacacaacatgctgacgctgtccgtgagaagtcggcctccgacagcaagtgccgtaagctgacggacagggtggccgccctggagagggagaaggctgacctccggcgccaactggcggcggagaggagggaagctaacgaggccgtcgccaaggggcaggctgcgcaggcggaggccaagctggcgcgggcggagggcaatcttgccaaggagctcgccgaacatctgcaggagcggctcacagccctggagagccacgctaaggaggccgaggccgcaatgcatgcggaggccgaacggacgcgcacgcagcttatggatacatatcgtgagctgggtgcgcggaccggtgacttcgaagtgccggaccgagagcccggccttcgctgtctgcagtgggtgcaggaggagctgctggaacttccagccgtcgtgggggggttgatgtcgtacgcctccctggtcacctacgagggggcgatgaacgcgctctcccgagaagggtgccggcacttcgaggccttcgaccaggcggatgagattttgatcgagatatctataaggtcgaagaccccgtag

SEQ ID NO: 32505 - DNA, 738 bp, Zea mays
  Peptide Sequence Number=SeqID_75880
atgggcgagcatctgtgcaccgccatcgctggcactctaaatgtggagggctccgggagtgcgctatccgcgctcttcgtccaccagccgccgccaggaaacttccccgcattcctaccctgcgctggcgactgcatcttccggggccgagccctcgatccggcacgcttcgccgccgacatcgaggcaggagggcgagaaacggccgtgcggaggcgggtctgtcggcgtagagctcgcaccccttggaaccgaggccgtgcgaccccccgcaaccgaagatccaagccagcttccccctgttcgtcgccggagagtcgccatcggcaaaaggctttgtcgtccgccgacttcgtcgaaggcagccggcaaaaggaagagaacctcctcgccgccgtcgtcttcgtcttcgattcggtccaccgaggcagatccgcgaacagcgagcctttcaactcacctttgctcgacgaattgaaccgagcactagttgagattgacgacctcgccaaggatcttgaagacgtagcagtgcaaactcagtgggaggtagaaaatatggctaagagtgaagtgaaagaacatccacaacaagaggaagcagtagaggagcttctcatacaagatggttcagaagacgagctactgataaacgaagagtcaccaattaagtatgaagaccttgtgggctacgacgatggtcgtgactactcaaccgacgacacatatccgtactag

SEQ ID NO: 32506 - DNA, 459 bp, Zea mays
  Peptide Sequence Number=SeqID_75881
atgctcgtcccctgccgccgagacctcccttccctgctccctgctctacgagccctccttgcacacgagcaagagctcaagatggttcgtacaatcgaaatcacccggaccaacaccaactacatccctccgccacgacaagttcccgtctatctagtggtagtcaaggaaatccttgtggatatccctcgcattcgtgtggagaacagagtcattctggaggacatctcggaggagtttctacctacgcccaccccgttggtagaatcactggccttcgcagctggatcgtcatcttcagcaccgccagcaccagtagtccaagcccctgctcccggaggcgacgacctggacgactttggtgacgatgatgaagacgacgaagaagaagaagaagaagaggagaacatcaacgaggatgccaacagtgaacaccaggaccactacgtggggttatag

SEQ ID NO: 32507 - DNA, 837 bp, Zea mays
  Peptide Sequence Number=SeqID_75882
atggtgaccaccagttcgatggtggggagaagcaagtcgggctgcggcctctgccccaccctcagcttcaaggatcttcatcatccttgctggggaggagggcggggcaagtcggggcttgcctccgcgtgggccggcgacccgcttcttcctccggcatccgggggaggaagacatcctccagctctgcggaggaggtgtcctccagccatgcgggggaaggcgaactactgctgcctggccagggtgcagcatttcgtcttccgtccgggcgactgtggccggctgcaccggggggtcacacaacacgtcgtacgccgcgagggcggtactcgtgttctaagacggtcccgttctcgttctcgtggcgagaacgggagtgaggacctgccggtgcgctttggggcggccgccgcttgctggtgcggtgttggtgggcaggtggccgctgtcgtcagtgctgaggtggtggcagccggagaaggtttctctgccaacgacaccgtcagtgccacctgcgctctgggcctccggctctttggctttaatggctggttctcgtcccccgcgaggggacgtgaacgagggccttccagcggtagcgttcgccctggggccatcgctgctgctgtcttgccatccgagacggaggtcgttgccgcgctgttggtgcagcggtcgccggcgagccacccggagtttgtcgtcccgcaggccctccgatgtggaggttgttcatactcgcgggagtggaactggagttccatttgtaatggcaccttgagtaccggtgtttgttcgttgtggctgtcgaggcctgaacatctgtgtatttga

SEQ ID NO: 32508 - DNA, 1026 bp, Zea mays
  Peptide Sequence Number=SeqID_75883
atgtgggtggcatgcaaccgcaccgcggaggcgcaccccttcagcttcgtcacatccagcatggaggcccaggcccacacgtcatgtaaccggcgcgccggttactacgtgcgagaaattgcactgccacttgcgccaatgtcgcgccttctcgactgcgaaaccagtgccgcgactcaaggcaaccctgcgcatgcccaacagtgccaatcaagcacatcgatcacgggtcagtcagccgcgggaggaggcgcgatggtttatatggccaaaagtggactggcagtaatggtgacagcagacgagcggaagcagcggctggcccctcggaagggttcgacagccgccccagagcactcgagcttcaggctcattactgatcaggggttcgaaggctggcccctcggaagggttcgacagccgcctcagagcactcgggctccgcgcccactactgatcaggggttcgaaggctggcctctcggaagggttcgacagccaccccagagcacgtagagcgtgggatgactctgggtacgtccgttacatggccaaggctcgggctacgctcccgaggcgcattcaatgcgaggatcgcctgacaccttatcctgacacacgtgcctcagtcagcaaggtcgaacctcaggcgcaacaggaagctccacctcgcccgaccttgggcctcggcctcaggaggaggtctccgcctcgcccaaccccagggctcggcccccgcctcagcctcggaaggtggtctctgcctcgcccgaccccagggctcggccctcacctcggccttggaaggtggtctccgcctcgcccgaccccagggttcagcctcaacctcagcctcggaaggtggtctacgcctcgcccgacccagggctcggcctcaacctcgacctcgggaggaatcgcgtcctcgcccgaccccggcctcggcctcaggaggagtctccgcctcgcccgacattgggcttggaccgaccgcgccacggaggatgcatcattaccctacccctag

SEQ ID NO: 32509 - DNA, 798 bp, Zea mays
  Peptide Sequence Number=SeqID_75884
atggactgcacaggcacgctgcttgcaggatggcctggacgccgcctagaccgcacggctcagaggccttacgtcaggctctgcccgctagcttacgtcattggcaacaagccacgtggcagcatcgggtctccgcctgagaggggagcgcaggcgcacaggataaagcctggacacgtgtcagtaccggacctttgcttaggccagggtatcccctgtcccaggacctcgttatggatggcccggaccttactcggagggatccggaccccatccaagggaccctggcacgcttacttgggagtcccggaccgtattcgggggtccgggctgtgcgcacaggggtccggtgcttcctcgcggaggtccggtccagctgattgcatcctgggatatatcatctatatttggctacacgcgcccctggaggaaccggcgcccaaggaggataactcgtcggcccaggcccccgtgccagagactgggctgtcggtttcggcgagggcgaagaggcacactaccgcaggcggtggcgcgctcttcacgcgtcggttcgccttctccgcacatagaaaccggcgcgccagactgagtgagtgctctacatggtataccgcctgcttggatgggatgcgccggcgttcggcggaaagatttgcgtcggcaccatccatcccggtgcgcggccttgtgggagcggcgctcttccaccggtgcttggcttcaaggatgttcatcagccttgcggtggtggagagcgagctgagccgcggctctgcctaccacatgggctggtga

SEQ ID NO: 32510 - DNA, 312 bp, Zea mays
  Peptide Sequence Number=SeqID_75885
atggactactctgcaccagcagggtcgcgttggaagctagctccgggcggctcaccagcggcggcgaccagctctgcaccggacagcctcaccagcggcagcgaccacctctgcaccgacgacttgccagcggcggcaaccacctatccatcgggcagcctccctagcggtggcgaccacctcagcgtgcatgccatggcaaagaggccctcgcccccgccctcctatgggggcgaggacaagaccatccaagccatggagctgggagcacggcaacaaggcggtgcttgcggtctggccgggaccgcgtag

SEQ ID NO: 32511 - DNA, 312 bp, Zea mays
  Peptide Sequence Number=SeqID_75886
atggagctaggactccgcttgaaggcggatgtaatacttttgctttttgtaagaccaacaggccgggcttatgagggtggacctcaccgggctggtcgtacacgtatgcgtttcctagttacgaaagggagaaaatttcgaaccctcggacttgctcctatggatagaacttacagagatgctccaatgccatttctgcatgggcttgttagaagcctggacccgtggggagtccagaagggtttccgggggaaggtagaagccatcctctcctgggttagactgaggacaacctctatccacaagatctaa

SEQ ID NO: 32512 - DNA, 246 bp, Zea mays
  Peptide Sequence Number=SeqID_75887
atggcgaacgacgtacacctcgacgacggccgctcagccacatcgccgtcgcaagtggatgggcgacagagcggccacagtgctccgagttcatccgcggcgagatcttttcaccgggggtcattatccgcactgttggggaccttcagcgtccgaagagccgaaggtgttgagcaggaaagcttcggcgtaacagcaaagagtggaaccgacttaaagatgaaaaggctattcagacctcaatag

SEQ ID NO: 32513 - DNA, 366 bp, Zea mays
  Peptide Sequence Number=SeqID_75888
atggattccagcatctactgcacctacctgtatccccaaaccctcaccaaacgtgaagaagaaatagaagtcaccgaagaagggataccaccaccctcggattcgcaagctagcaactgtttctacttcgatatttgtggatccgagcctgactcacctactaacgaaggcaagccccggcgtgctgaccgaggaccctttaactggtcacatgcctcgtcatggcatacccttgagagtcttttccttagtcgggtgaggaagcgacaaatttttgttgcttttgctccaaggtggtaccaaatgaagaaaaacaagactaaagtgcgggaggacttggtcctccacataggatcttttgcttaa

SEQ ID NO: 32514 - DNA, 375 bp, Zea mays
  Peptide Sequence Number=SeqID_75889
atggctggaagctccgcctcgcccgaccttgggcctcggcctcaggaggcggtctccgcctcgcctgaccccagggctcgacccctgccttggcctcggaaggtggtctccgcctcccctgaccccagggctcggcccccacctcggcctcggaaagtggtctccgcctcgcccgaccccagggctcggcctcagcctcggaaggtggtctccgcctcgcccgaccctagggctcagcctcaacctcgaccttgggaggaatcgcgtcctcgcccgaacccggcatcagcctcaggaggagtctccgcctcgcccgaccttgggctcggaccgaccgcgccacagaggatgcatcattaccctacccctagctag

SEQ ID NO: 32515 - DNA, 144 bp, Zea mays
  Peptide Sequence Number=SeqID_75890
atggacaaaggccttaagccgaaggaaaagaaggttgctgctgagacgaagctgactgaagaggagaagctatttgaggagaagaagactgtggatccttatattgctggatttgtcgagtcgatgacaaaaacaaacacatag

SEQ ID NO: 32516 - DNA, 276 bp, Zea mays
  Peptide Sequence Number=SeqID_75891
atggagaagcggcctcaggaactcttcagcttcgggaaaagccaacggctcgtccactataattcaccggacatgtccggtgtgcaccggactgtccggtgtgactccaacacaacggctatcccgcgccaacggctacctgcagaggcattaaatgcgccgcagcgcgcgcagacgtcaggggcaccggacatgtccggtgtgcaccggactgtccggtgcgccatcgagcagactggctccccaacggccacattttggtggttggggctataa

SEQ ID NO: 32517 - DNA, 1164 bp, Zea mays
  Peptide Sequence Number=SeqID_75892
atgggcgccgaacatggtgtctccggtgagctgcaagcggggcccacgcgatctgaggcggctgctgaacccttccggggggccagccttcgaactctgatcagtagggaggctcggagcctggttccttcacggggaaggatccttttcggattattatggcgaaggcgaagcgtcgcctgcttctcctgccagaggcgccgcctgtcccgccgcggagttaatgcgacggggcgagtgcccccggatgggggatacccgccgtctttccgcctcatcgttggaggaacgcaactccgtgggagttggtacctttcagccatcgttcggcttcaaggattttcatcatgcagcccggctgcacccctccgccggcggtcatccaagacggtgaccaccagcccctgggtggggagaagcaagccgggctgcgatcttggtcccaccctcagcttcaaggatgttcatcatcctcgctggggtggaggccaggctgagccggagttctacctcccgcgcgggttcgtgggtcaccctctcctgcggcgttcgagggagagggcgctcactggccccacgggcgggtcggactttgacaacgcggggctagtcgacggcgggcgtcgccagcctcagcgtgtcgagctcgtcggcttggcccccgggcggtcctgcctttgcaccggtatggcgtctccgcgcggaggtcggtgccccactcgtccgggaggatctgagtggggatctgccggagggctgacggcccctgtcgtcggtgccgaggtggaggcggctcgagaagtccccgtcaccgatgggatcaccgccaccacccgcgcttcgggcttccggctctttgtacttgtcctcgcccctcgagcgtcggcgttggcgagggcaagattgcagcagcacccgccctggggcctacgctgctgcagttcggccacccggagcgagggtcgttgtcgttgttactcgcctgctggttgtctgaaccgcttcaccaagcgtgagtcgccccgtgtaaaggtgacgagtgagaaggtgatgagtgagaagagatctttcttcgaggaaaatttcgacgcagagggggttcccccccctttagcccccgagggagggtcgggctttgccgaggcgaggctgacccttccttga

SEQ ID NO: 32518 - DNA, 894 bp, Zea mays
  Peptide Sequence Number=SeqID_75893
atggcgatctcccagatctcacgcatattcctggccatccttctcctggccgccgccttcgccgccgccccagctgcgcttgcggacggcgacgacgtggtggcccttaccgaatccacgttcgagaaggaggtcggaaaggaccgcggcgccctcgtcgagttctacgccccctggtgtggtcactgcaagaagcttgctcctgagtatgaaagacttggtgcaagttttaagaaagctaaatctgtcttgattgctaaggttgattgtgatgagcacaagagtttgtgcagcaagtatggagtttccgggtatccaacaatccaatggttcccgaaaggatccttggagcccaaaaagtgtggtcactgcaagagtcttgcaccggttagtacatggttctcgtttgagttcttgacacattctattgtggttttactcttgtatggagttagtggatttcctaccttgaagtttttcccaaagggaaacaaagctggtgaagattatgatggcgatagggacttggttgactttgtcaagttcattaacgagaagagtggtaccagccgtgacacaaagggtcaactaacctcagaggctggccgtatagcaagtctggatgtcctggctaaggagttccttggtgcttccggtgacaagcgaaaggaagtcctctccagtatggaggaggaggcagataagctcagtggttctgctgcaaggcatggaaaggtctatgtaaccatcgcaaagaagattctagagaaaggcaacgagtatactgagaaggaaaccaagaggcttgatcgcatcttggagaagtccatcagcccctccaaggccgacgagtttatcatcaagaagaacgttctttcgactttctcatcctaa

SEQ ID NO: 32519 - DNA, 957 bp, Zea mays
  Peptide Sequence Number=SeqID_75894
atgaacaagacaccggcactcgaggtgccattacaaacggaactccggttccgtccccgcgggtatgaacaacctccacaccgcggagcctgcggggcgacaagctccgtgcgactcgccagcgacctctgcagcagcagctatggtcccaggacggacgcagccaccggaaggccctcgttcgcgtccccgctcaagggacgcgaaccagacattaaagccaaagagccggagccctcgcgggctgagtcttctccaacatgctccaaggtccccccctacgacacgggggctgggtcccacgcgtcatgcaagatggcccagggcagaagaagccaaaccgccgcgcgcggcgcatgcaactgcccagcggttacaagcattcctccacttttgccggaccagcgggtgaaagggcgggcagccatgcaatcggcatgcaagcgcgccaagtgggcgcaccccttcgactccaacgcgcccggcatggaggcccaggcccacacgtcatgcaaccggcgcgccggttgctacgtgcaagcaactgcaccgcccctcgcgccactacgcgcctcctcgactgcggaacgagtaccgcgactcgaggccaccctgcgtatgacccaacagtgcccgccaggcgcgtcggtcacgggccagtcagccgcgggagaaggcgcgacggtcgatgcggccaaaaatgcgccgacagtaatggcggtggcaggcgggcggaagcagcagtcacgtcgtcagccaagctcacgtcccatccagggacagcaagggaaccctctctcgcggcgcaaagacagcgcgctcgtgttccgttcctcgaacggctcgcgcacgcgcaacggctgccccgcgaaccactcacctcgttgcattaactccgcggcgggacaggcggcacctttggcaggagaagcgggcgacgcttcgccttcgccgtaa

SEQ ID NO: 32520 - DNA, 213 bp, Zea mays
  Peptide Sequence Number=SeqID_75895
atgacgctgcaagagctaaagcacggatctccacgagcgagccctgttgggggtcttcttctccgccgaaggtcctctaggcaaaaacaccttcggcaagacaatataaaggaagcattcgagaacaaggatcaacaagcccctcagccacccctgatgtcgacgagtcaacctccaaggaccttttcgatggagatcgtgttcttgccatag

SEQ ID NO: 32521 - DNA, 231 bp, Zea mays
  Peptide Sequence Number=SeqID_75896
atggaattaccactagacgcgcagagcagcggaagacgtctcgatgtagacgaacgcgccgagcagtgccgtgcagtcgtcggcgtccttcacgtcctcgcacggttcgtcctggtgctccagatgcagcacctccgaggttgccttcggtgcaatctatgctcaggtaaagaagaaggcgtcgaggcggatctccaggagttccaaggcttcgacgagttcgaggattag

SEQ ID NO: 32522 - DNA, 264 bp, Zea mays
  Peptide Sequence Number=SeqID_75897
atgacacgattggagacttggaggccaaggtggaacagcttcggacagagctacgtcaccggaatagggcatgggcgcaggacagccaacatgccatcacggactcgcgcacacgatggtgcgggggcttcctgtggtcaggaagatactcctaacccgccaccagtaccaccgactttggccgaggctatcgctgccttggtcaatgccaccgcagataatacacgcttcttgcgtgagatggcgggcaatcagttccaatag

SEQ ID NO: 32523 - DNA, 159 bp, Zea mays
  Peptide Sequence Number=SeqID_75898
atgaagggagtcataaagggaagcttcagcccagcaaccttcggaatgcgcttcggctcactgacctccggcgccgccatcctgcagacaaacaacggtatgagccgaaggggcaatttcttcagagctggccccaaccgagctaaagattccttttaa

SEQ ID NO: 32524 - DNA, 426 bp, Zea mays
  Peptide Sequence Number=SeqID_75899
atggtgggcatcgcacgcacaggaacgagccgacgcgaccgggaacgagagtcacgcatgtcgcacggactacgccgaggcacattgctcaccgcggtcgggcatggactgtcaagtgggctgcgcaccgaggtcgcgttgaatacatgtcgcaccgcacgctgcaccggaggcaggataggtcgagcgtcaaccgttccggggaaaaagggtaaaggggaaggggagaagggggtatgggcgcgagctcactatggtgacgaacggcaaggacggactctggtgcggtggtttcgatggcgaactccatatgtgcgtcagagatggcgaggtgaagactgggcgacagttttgggggcaacgggtgtgctggctattggggaaatgaaggagggaagaggagaggaggtgcagacgctcggatag

SEQ ID NO: 32525 - DNA, 234 bp, Zea mays
  Peptide Sequence Number=SeqID_75900
atgaccgaggaccctttaactggtcacatgcctcgtcatggatctggtcttaagaaccccggtggtgagttgacatatgcaagggtgaagaagcagcaaacttttgttgcttttgttcaaaggtggtaccaaaagaagagcaccaagactaaaagctgcggaaggaaaggtcctccattaagaaaaactttttactacttattcgggagggtttttgcctcccatgttttgtaa

SEQ ID NO: 32526 - DNA, 453 bp, Zea mays
  Peptide Sequence Number=SeqID_75901
atgtcctcgggcaagtcggagactgcgctcgggtgtgttgtgactgcgggaggtctcaggcgttccatgactgcttctctcgctgaggttggcctcgggcaaatcagaactacatctcccgccgaggatggcctcaggcgaattggaactgtgtctcccgccaaggttggcctcgagcgaatcgaaactgtgtctcccgccgaggttggcctcaggcgaatcagaactgtgtctcccatcgaagttggcctcaggcgtgtcgtgactgcatcggcgaatcgtggcctcgggcgagtcgtggcgcacaacggtcggctcatcggttggcgcagccatccaaggaaagcaatcggagactgctctctacccgatgcactcgtggatagaaggaaattgagatcttcttcacaaggaaaggagcaacgactaaggcacccattcgaagatatgtag

SEQ ID NO: 32527 - DNA, 654 bp, Zea mays
  Peptide Sequence Number=SeqID_75902
atgggcgtccttcggagcacgcagagccttcaggcggaggtggacgagctgcgcgccgcgctcctggcaggcggcgggcacgaggccgcgggcgggtggcgccggtcggcgggccacgcggacgccaagcgcagccccggcggcgacgccggaggggccgcggcgcgcgccgtgtgcgtcacgggagggatctccttcgtcgggttcgccgtcgtcgaccgcctcctccggcacgggtacaccgtccgcctcgcgctggagacgcaaggtatatatccagacgtcgtcctcccgcactactacctcggcggaacctacccgtccgcttctctctcccccggccgctcgctctcgctgccgtttgcgccttcttctggttctgggctctggccttggccttggagcggctgtcaggacatggacaagctgcgggagatggagatgttcggcgacgacggcagggacggagtgtggacggtgatggcgaacgtgatggacccggagagcctgcaccgcgccttcgacggatgcgctggcgtgttccacacctccgccttcgtggaccccggcggcatgtccggctacacggtgagcacaccaaacacgtcctctgaatctgtagcctcactcacgtcacggctcagtactcagtag

SEQ ID NO: 32528 - DNA, 660 bp, Zea mays
  Peptide Sequence Number=SeqID_75903
atgaactggtcctgcgcgacgtgcaagggcgcgagcagccgtgccgaggttgctcgagccgcgctggtcgagcgagggcgccgcgagttatgccgtggccgctcctggacgagccgtgagcacacaggccacgccgcgcacaaggggagctcggccactatgcacacccgaggagaaccggtcggggaggccgcgactgggccgcacgagggcgcgccgggccgccatgcagactggccgcgccgggccgaaccgcgcaacgccggggccaagccgcacgcgccgcacgccatgccggggacaccgcgggctggccacgtcgcggacgccgcgagcctgcgcgtcgggtcgggtcggggcgggccgccgcgccgggccgccacgccggggtgcccgcgctggagccacacgcccgtgccggagccgcgccgaggccgtgcccgcgctgaggtcgcgcccgcgctgaggttgcgcgcccacgctagggccgcgcccgcgccgggggcagggcgggagctcgccggagggatagaagaggggggcgatggctggaggggcctacctcgacggcggcaactgctccaagctcggcgggtgcgtcttgggcgagaactatggcagggcggtttgggaggaggaataggaggtgggcgctcctga

SEQ ID NO: 32529 - DNA, 597 bp, Zea mays
  Peptide Sequence Number=SeqID_75904
atggaactttcaattggtatcgaaaccatgttctccagtgtgggcatagccgtccggagaagacgatgttgtcgcaagagaattaagtcaaaatattttaagtcctcgtgcaccgcttctgctccctctattgtttgtggtactaacctttcaaagggagaagaagaaaggtggcgaccaaacgatgagtccacctcagagacaggtttgtctcccactagttataaatgtcttgttgctaacaatgatagtggagacaaaagcgatgatgaggaggaatatgaggatgatagcgaggatgaaaccaaatccacatcatcacaaggtgcatcttcgtatattgttttgcatgcttccgcttataacgatgatatggaagaagagatcgaggacgtaaaagaaaaggagcttcgccagttctatggacgtctcaacatggaagacaaggtgttcttgctgaagctattgagaatgaacaaggaacaaggcaagacacttctcaggctgcaggaaacactcatcaagacaaacaaccaactggagaagacgaccaaagaacatgaggggctaatgtgctctcatgatgatttggtctaa

SEQ ID NO: 32530 - DNA, 1386 bp, Zea mays
  Peptide Sequence Number=SeqID_75905
atggccaataagcatgagacccgcgagctcaggacgaagcctgctgtttgggtctggtccgagcccggcacgacccggttctatgcggccaagcacggcctcaggcgccataggaaactccgcttcgcccgaccccagggctcggactcgggctcagccccggaagacgacgaactccgcatcgcccgaccccagggctcggactcgggctcagccccggaagacgacgaactccgcatcgcccgaccccagggctcggactcgggctcagccccggaagacgacgaactccgcatcgcccggccccagggctcggactcgggctcagccccggaagacgacgaactccgcatcgcccgaccccagggctcggactcgggctcagccctggaagacgacgaactccgcttcgcccgaccccagggctcggactcgggctcagccccggaagatgacgaactccgcttcgcccaaccccagagctcggacttagccctggcctcagccgacggtctccgcctcgcccgacccaggggctcggactcgacctcggcctcgaaagacagactcgacctcgacctcggaggagcctccacctcgcccaacctagggctcggaccgaccacgtcacaggaggcgccatcattaccctaccccaagctgactcaggctacggggaacaagaccggcgtcccatctggctcgctccgccaaacaactctcagcccccttacagaagcaagaggacgtcagcaaggacccgacagccccgatagctgtccttccggcaggctccagcgctcctccgacggccacgacaccacacgaaccgggtgccaaaacctctccggctgccacgatggcatggccctcttacaaagggttggccgcgcggggaaggacgggacggcgctcgcgcaaggccgctcgctccctcccgtgtggacgcttgtaaccccctactgcaagcgcactcgacctgggcgcgggacaaacacgaaggctgcgggatttcacctctcacgcctgtctccctccggcttcttccccccttcgcgctccgtctcgcgccgacccatctgggctggggcacgcagtgacaatttactcgtcggtccagggaccccccgggttcgaaatgccgacggcgctcgcgcaaggccgctcgctccctcccacatggacgcttgtaaccccctactacaagcgcacccgacctgggcgcgggacaaacacgaaggccgcgggatttcacctctcacgcatgtctccctccggcttcttccccccttcgcgctccgtctcgcgccgacccatctgggctggggcacgcggcgacaatttactggtcggtcgagggaccccccgggtttgaaacgccaatag

SEQ ID NO: 32531 - DNA, 198 bp, Zea mays
  Peptide Sequence Number=SeqID_75906
atggcggtgagcggtatgggtgctgagtcccaacaggagcgggagaaccaccctcctggtgtgccggtcgaaagcctggcgcagcaaggtgtcgagtgcgtcgtggaagtgacaaccgcgagcggcgtcacgggtgatgggtcgggcgacccatccttccgcctcctgcggctcagaggactccgtgttgtggtctga

SEQ ID NO: 32532 - DNA, 363 bp, Zea mays
  Peptide Sequence Number=SeqID_75907
atgcctcaatattctggcatcgacgaccccgacctccattcctccgtgccgcttgtgctgatcaagatcgaggtcggggtcaaggttgtcacgacgttgtcgtttggatccttcatggacaagaacttgccccttccccttcttaaggatgtctttatgcacgagattgggcccttggtgcctagtcttccacccctccctgagggcgtctccgtcaaagcggagcggaagcggaagagggacgtggggaaggagaccttggcggcgcgttcgaagcgcctccaagcaaagaaaaagaaggtctcccgccctgctcacgcggagcggggagggagcgtgcccctttcctctgatttgaagtga

SEQ ID NO: 32533 - DNA, 441 bp, Zea mays
  Peptide Sequence Number=SeqID_75908
atgaccgcctcgcctgagcctatcccggtcgagagggacaagacttgtggcaagcctctcgaaggccactgggggacagccgcattcaatgtgcattcctatcaacacaaggctgcagcccctgacgggacatgtaatatgatagaggcacagaccagccctcaggcgcaaactccgtctcgcccgacgtggagctcgccctcgggacaaactctgagcccagtctcggctacctgcttccccacaaaccctgcagaaggccactctttcaaactgtggcacatgtcatcaaatctcagggcgagctcggtcacgacttcaagtggaattttgccttgcctaagcccggttctgccctcgatatctgtgatggaggacgcccccaatgtcatcggacacagtggacctgacgcatcccttaagaagtttttcccatactaa

SEQ ID NO: 32534 - DNA, 255 bp, Zea mays
  Peptide Sequence Number=SeqID_75909
atggggattagctctccccgggtagaaagggaatcacggctcatgggtaaaatggttcgagatacaaggattatgttatggttttggttcgactacgatgatgatccaaacgggacatttgctgagtacgttgatgtgtactcatccttgctttaccacaaaacaccaggttgtccgcattgtaaccactgctcaggagaaggcgaagccgtggaaggagacttccaggagttccaagactacgatgaattctag

SEQ ID NO: 32535 - DNA, 543 bp, Zea mays
  Peptide Sequence Number=SeqID_75910
atggagaaaattataggggcagtggccggtcaagaaactggtagtaagaacagcaatgcacttcatttgccttcctcaacatgtgcgggaggagcggagcgtgctggcggtgctcggccgcgcaagcctcttcgcgatggcacagttccccacggcgtcgtcgcccgtggtccgggagaaggttgccatggccgtgtgccagggagagagaggggagggagggcgggctcacctgacggcacgacatcatttgcgggggagcaggggaagggggctgaggatcttggcagtgtggagccgtgcctctttgtgatggcgcagctccccacgacatcgtcacccatggtctgggagaaggccgccaggggggcacctggtggcgcgacgtcgtttgaggcagagcagaggagtcatctggaagcgtcatgtacaatggagaccgggtcgctccgcgacggcgatgccgtcagttttgggatcgaaatgccagaaaaaaaagatatttacgtggagagctttgatgcgtctgttggaagtttctaa

SEQ ID NO: 32536 - DNA, 516 bp, Zea mays
  Peptide Sequence Number=SeqID_75911
atgacggtctataaccctcctttatggaaatattctgggataatctgggtacccgaggacataactgtccttgtcttgggacgttcgacgctcggcgaaggcagcactgctagccgagaaaagggcaaggccctcgtagataacaccccccaagaagcctgcgaagacgaagctctcagcaagatacatcgcaacgaacaacccactctcgaaggcaccctacgcacctgcagctctagaggacaaccacaagcaccacccccaggcttcgctccactactagagggcgaggacgcaatagaggacggcgaagtcatcgacgtctcagcagaagaacagctacagctacgggccctgcgcatcaagaaccgcaacctccaaaagcagaaagaaatcctcgaggccaagcgccaatgtgtcttcatgcaagccaaggtgcgccagatgatacgagacgaggagcagagggcccgagaactcgagcaagagattgtgctcatgcagcgcgaaggctag

SEQ ID NO: 32537 - DNA, 375 bp, Zea mays
  Peptide Sequence Number=SeqID_75912
atgattgagcacgatggttctgccaaagggattgtcttcagccagttcacatcattcttggatttgattcagtctccttcagctagcaactgtgaaagtgccaacacactgaatgtaaatgaattgtctgaaaaaatttcacaaactaacttgcatgaggtggagcatgttattattccggaacatcttcgtgtgccagaatatgagcagaccaagttaagttttggcagtttcacatctggtttggattcggaacagcctcgttgttgcgtcatatgttgtctatcgtacgaggcttcaatccaccgtagtcagggcgtcaccgcgtgccaggacagacaaccaggggcaaggtcccatcgtgctaatgtctaa

SEQ ID NO: 32538 - DNA, 1047 bp, Zea mays
  Peptide Sequence Number=SeqID_75913
atgtcggcgagccgtccacgctgccacgacgtcccgcccccgccccacgctgcccctcctccggcgacgtccttgcccgccactgccgtcggtcaccgatccctctacgtcggcgtccacaatactacgttctgcctcggttcgatgtcggcgctctccaccgccgccacaatcaacgcccacgcggatcccccatcctccccaccaccgccgctgcaatcaacagcatggaaggtccgccattaccgtggcaggcgtcacttggtacttcgggcaggcatcacggcgtccatggaaggtctgtcacctcctcctcgtcccgtggcaaaaatcaccttcgagcgccgcagcatccagagctggctcgacggggggcacctcacctgccccgtcaccaacctcccgctgccgccctccccgccgctcatccccaaccacgcgctgcgccgcctcatagccgccgtctcgccttccgcggcggcgtctctcgtccctgcggagggaggggcgcacgcaaggcaagaagcggtgtcggcggcggtgccaacccggcccgcgtcgcccatgccggcgctgctggggctggccaagtccagcgccacagggcggagggaggtgctagagtcgggcaacgcggcggtgctgctgcggcaagcgaaggtcggggacgaggcggtggccagggcgctgctgcacctcagcctggacggcaacgacacacgcgtgggcctcgtggcgaacggcgccgtggacgcgctgtccgccgtggagggccgcgaggccgccacagcgctctacgagctctgcaagctgccggagaaccggcgccgccgcgtggtgcgcgagggcgcggtgcccgcgctcgccgacttcgccgtcgccggctccgcgcgcgccgtcgaggtgctcggcctcctcgcccggtgctgggaggggtggcaggagctgtgcagggctttcgacctctgcgaggctctggtgaacgatgacaactgcaagatcgccaagaacgcggtcgacttggcccggacgctcgagaaagcatag

SEQ ID NO: 32539 - DNA, 1293 bp, Zea mays
  Peptide Sequence Number=SeqID_75914
atggtcgccttccaagggggtcaccctccttttaaaggcgactctccctacttgcgtccccagccgtcgtgggctgagtcttctccaacacgctccaaggtcctccccctacgacgcgggggctgggtcccacgcgtcatgcaaagctggcccagagcagaagaagccaaaccgccgcgcgcggtgcatgcaaccgcccagcggttacgagcattcctccgctttcgcccagaccagcgggcgaaagggcgggcagccatgcaggcggcatgcaaccgcgccaagtgggcgcgcccctccgacttccaacgcacccagcgtgggggcccacgcccacgcgtcatgcaaccggcgcgccggtcgctacgtgcaagcaactgcaccgccactcgcaccgctgccacgcctcctcgaccgcggaaccagtaccgcggctcgaggcaaccctgcgtacgacccagcagtgccagccaggcacaacgtgaaagaaccctctctcacggcgtgaagacggcgcgcccgtgttccgttcctcgaacggctcacgcacgcgcaacggccaccccgcgaactgcccgctccatcgcattaactccgcggtgggacaggcggcgcctcaggcaggagaagcaagcgacgcttcgcctccgccataacgaccgcgtccaaaaagccgcctcagagcgcgtgggctccacacccactactggtcagaggttcgaaggccggcccctcggaagggttcaacggctgcctcaggccactcgggctccgcgcccactactgatcaggggttcaaaggctggccctcgaagggttcacagccgcctcagacacagagcgagggatgaccctgggtacgttcgatacataaccgaggctcgggctacgctcccgagtcgacagagtcgaagtgaccgcagtcacttcgccgctccactgaccggcctgacagaaggacagcgctgcctgcgccgctctgactgctgtgccactcgacagagtgaggctgacaggcagtcaggcccggcctcaggcaccataggaaactccgctccgctcgacccagggctcggactagggctcagccccggaagacggcgaactccgctccgcccgaccaagggctcggactcgggctcagccccggaagacggcgaactccgctccacccgacccagggctcggactcgggctcggccctggaagacggtgaactccgctccgcccggccaagggctcggactcaggctcagccccggaagacggcgaactccgctccgcccaacctag

SEQ ID NO: 32540 - DNA, 498 bp, Zea mays
  Peptide Sequence Number=SeqID_75915
atggcgagggtgtgtttgggcctcgtcgaccgcagaaaacgcacactacaagataatccgatcctgcaggctcggatcttgacagttgaagggagcggcagcaccctcggcgtcgactacaccttcggtgagggtctcctccaagaatccagctcgagcaggcggctcggctggtcaccccgaggcctcggccagctgccccccgaagacatcagcccggcccgaggcctcggcagatcaactccggcgtcggtcccgctaacggacgacccggccaggctccggccgaccaagtcttcttttcgagccaactctgcctctgtccatgctgacaccgctacccctggcttcggctcatcgaagagcggccgaggggttcctttaactaagcaagagaagcctcggacagcaaggccgaccgagccgagggactcctacgcctccgggatacggatacctcactcgtcacctttgtacggggcgactcacacttggtga

SEQ ID NO: 32541 - DNA, 216 bp, Zea mays
  Peptide Sequence Number=SeqID_75916
atggcgcctgaggctggacttggctactgtcagtctcaccctggcgggtggcacagcagtcggagcagggcaggcagcgctgttttcctgtcagatgcaaatatattatcaagtgaatttcaacgaggaaagatgtcgaacatgaccgaaggtacattgtacaacataattgaggacatatgcacatttatattgagagaagtcattctcgtgtaa

SEQ ID NO: 32542 - DNA, 792 bp, Zea mays
  Peptide Sequence Number=SeqID_75917
atggacgatggtcttctttgtgtacacctattgaaagactttatgcaccttcagataatcgaataccaaaggagatatgaaaaggcacttgatatgttagatgacctagtccaagttttgtcaacaatagaacctgatattgggtgtgatgacagcgacgatggtattgattgtgatgaaaatcaggagggggatgtatttgctgggggtatgggatcagacggtcaaactgaacaagctgatcaaaatgtggttggtgatgaaaacgtgggtgataaagctgggtgtgagcctggtgcatcaaatgctttagtaagagttgaacatgatgtcattagcaaaagtaatatgctggaaggcaaaccccttttgcatggagatattggaatagaagattggggtggttgcgaaatagacaaacagtctaggaagaagctagattttaacattggaggagtaagtatggataaaccaataaatgcgaaaccaaaaggaagaacaataagaagtgacgagataaggacagtaaaattaggcaccaaaggagaaaaaaagatgaacagaaggtgcaagaagtgcagggttgcagatggtcataatagcagaacttgcctttcagttgaagaaaatagagttcgtttggtgagccttgctaacccaaaaaaaagagggcgtccgccagggtcaaggaacattaatacctcaagagctccggaatggaatgaaacaactacttcaaagaagcttgcgatgagtgtagagatgactggtgagtctgatagtgaaatttaa

SEQ ID NO: 32543 - DNA, 735 bp, Zea mays
  Peptide Sequence Number=SeqID_75918
atgccttcgcactcccgtcatgcattgcgccctttcaccttccgagcccccggatggggagcgccgcgttgctttcgtcttgctgctgttggaggagcacaacttcacggaagttggtacctttcagccaccgctcggcttcaaggattttcatcaggcagcccggctgcatcccctcgccgatggtcacccaagacagtgaccaccagttttatggtggggagaaacaagccgggctgcggcctctgccccgccctcagcttcaaggatcttcatcatccttgctggggcggagggcgagctgagccggagctctacctcccgtacgggccggcgggccacctcctccttcagcattcaggggagagggcactcactggcctagcggggggggacttcgacaacgcggggccaatcggccgccagcatcgtcagctccagcgtgcccggtttgctggcttagctggctctggcccagcttccggtgccacctcctaccgctgggtggagtgcggctatctgcccgccgacttgatcatcggtaacagaattgtttatccgagcgagagttacttattgcggaaggtgatgagtgaggatcccactatcgaagtagtcgaaaggcacgaaagatgttctggcagaaagacttttttcgaggaaaattttgacgcagagggggttcccaaggggttcccccattctagcccccgagggagggtcaagctttgctga

SEQ ID NO: 32544 - DNA, 309 bp, Zea mays
  Peptide Sequence Number=SeqID_75919
atggagttcgctctctggggaggctgctcacgctcagattcttctgtcctctgccgccaagcatggttcgatcaatggagttcgctctccggggagggtgctcgtgctcagattcacacctcccccaacatgacgtgtcccaccgcccctgctcgcggcctccttgccagcatcgtgccggacgccgctgcctcctttgctcgtgacctgctacccacgacccccttcctcttctccagcggtgccgctcccaccagtgttccctccatttcccaccctcgctccgacgatactcccggacgagcatag

SEQ ID NO: 32545 - DNA, 726 bp, Zea mays
  Peptide Sequence Number=SeqID_75920
gtcggcgcgcccgctctaccactccgtggccgctccgccatagtgagccaccacggcctccccgactcgtcacccgcgcaccgccagcatggttcgatcgtgtcacagctgaaggagatcagtaagtcagtagagatttccttaatagcattagcatttggtgcatgtgacacaactggtgatagctggcttaacagcctggcggcagatgaaagggcgattctgtctaggagggtggaggagaatgggaaggccttagcgaagatgagattggaagccatggcccgggagatggagaattttggggagaggccaaaatcatcagagttggggaaggggcttgtcggcgtttcgaacccgaggggtccctggaccgacgaggtaatgatggcgcctcctgttgacgtggtcggtccgtgccctgggttgagcgaggtggaggctcctccgaggttgaggtcgagtctgtcttccaaggccgaggtcgagtccgagcccctgggtcaggcgaggcggagaccgttggctgatgccagggctgagtccgagccctggggtcgggtgaagcggggttcgtcgtccttcggggccgagcccgagtccgagccctggggtcgggcgaagcggagttcgtcgtcttccggggctgagcccgagtccgagccctggggtcgggcgaagcggagttcgtcgtcttctggggctgagcccgagtccgagccctag

SEQ ID NO: 32546 - DNA, 264 bp, Zea mays
  Peptide Sequence Number=SeqID_75921
atggcgagccgtggcagcgccgctcttgtcgtggcgtgtctccttgtcgcggtcaccgtggccgccgcagtcccgccgccggtgtcggtgtcgcagctgttctgcagaaaggtgtacgggatgcatgagcgggagacgtgcttcgctgtggcgcaggccgccgggctgaccctgaagcagttcctccgcttcaaccccaacgtcaactgccgaaagctcttcatcggccagtgggtttgtcttgacgctattctcgtttcttag

SEQ ID NO: 32547 - DNA, 165 bp, Zea mays
  Peptide Sequence Number=SeqID_75922
atggaggctcgcggcggcgcggggatagggaggcgctctgcggcggtgggggagagggtggcgcggggacagggaggtgcgcgtacaggagggtcgagggcggctcggggtgttattgcatctgggtgcattcaatatagagaatgcacccagatatttgggtag

SEQ ID NO: 32548 - DNA, 1422 bp, Zea mays
  Peptide Sequence Number=SeqID_75923
atggaagccccgaccagcaaccgaccaggtgcacggaccgcaccgtaccgaccaggaacattatacatgaagaacgtagaccgacctccatctaatccaaaacggattataattcagtctactcaagagtgctttagtgtcgacataccccatgttccggcggaaactgttagacacaaaacaaggcaggctgctgatgaggacgatgactttatgccattatcgaagaagcgtaactttgatgacagtcctccaaaagtcttgaagaagatagttacaaagcagagaaaacagaggcttaatgtgagatgcaatccccaagacgtattagtaagcatccagatattaaatgacagacagcgccaagctattgcacggagggggttctccagtattcttgatatgagagttgacgcactcggtagtagatttcatttagcttggctgatggaaaagcttgaccataatgacatgacaattcgagccggcgcaaggaaggagctcaaaattacaaaggatacggtgcaccttattttggggttaccaaatgctggtggaggaacgacattgggcattgatgaagctgttgctgccaacaatttaagggctgaacttggtttatcgaaagaagattttggggttgtagctcttcaagatcgtctgaggaaagggtctgacgatgatctaagcatcagatccttcttcctgatactgttcaataagttgttgttccctactgccagctggggaataaccaaccatgaggttcttttaactgaggagatggatcgtttccaccagatggactggtgccagcttattttcaatgatttatgccaagctgccaagaagtggcatactaggagcgttacaaacgtttctacaaccatttacggatgttccatcatcattcttctgtattatttggatcatcttcatgactcagcggcacctcagaataaacgtggaacaccacgcatcaaatattttgataggaatattattcaagcactgacaagagctgacaagggcaagatacacaaaggacaagaaccatttggacattgttcgcataagaccagaacaaacacttttgatgtacctcgtcctgacccatctggacagcacacaattcacatcgaactcccgctcatcagggatttgatatcaagcaagctgaatcagcttccatcccgccaccgcctgggtttcatagagaagttgtcacattatgatacggaggttggtaaggcgtgttcagttattaaacagactcttcagcagattgttgagaaacaatacaatctatctgatgtttttggcgagttaattgatgaggtcctccgtgcggagtcgggggacaacgaagatggttatgatgtgcagaaaacaactacaaaatcagatgatattcttccctag

SEQ ID NO: 32549 - DNA, 405 bp, Zea mays
  Peptide Sequence Number=SeqID_75924
atgtctactccagcatcccagcaggatacgcagttgacagacacacagggtaaacatggtgacggtggcaagaacatgccgaccaacacaaacgtcactcctaaagcaacaccacatacggaatcttccgtgccgatatttgatgtgacgccgcaaataaaggtttctgttgaaaccgatccagctacaaacactcctcaggttgaccaggcttcactggattcggagatgcaaactatgttagctctacgcgaatatttgtgtggtacgcaatctgacaccagcagcttggagacaactgatcaagccaaggatggaggtaagaagagcttcgaggtaccaagtgcacgggagaaggtcaaagaggttgaggaacccaaagccaagggtgaagaagaagactag

SEQ ID NO: 32550 - DNA, 840 bp, Zea mays
  Peptide Sequence Number=SeqID_75925
atggactcgggactcctcttctcgccgcgtcacatccacgggcgaacccgtcgcctcccgcaccgcgcgtgcgggcgcccgctctcctctccgggcctcccctgttccccgcgattcctgcgccggagccgccgtccggaggacaccgtgtgcggcggcggcaataggtggaggtgtggaggcggagtccacggagcgagaggcgcccgatcggatactctaaagcgggtggcgctgctcgcgcttggctgctgcactgtagccgccgctcttggcgcggcgcgggcagtggcgggggactccatcaaggcgtcaggattcggactatgggtggcggagttgctgcggaggctcggatggcacgacgacaccgtcgtgttcgcgctcgcgacgccgccggtgatcgagctgcggggggcgatcccgttgggtattggctgcggggcccatccacactgcccctctgtcgcaaaccccacgcgcgtcgcctccactgcacacccccgccttccatcatcgggcctctgccgcaaaccccgcacgcgtcgcctccaccgcacacctcgcccttccatcgtcgccaccgcgcactcgccctccacgccatcctcgccccaaatcgctcagcttaggcatagatggaagtccccccgcatccgcccctgcggcagaggcccttcgtgcacgatctgtttgcccctccacgcatggtggttccgcctccacctatcgtcgccccatccactcaaggccaattgcatccaaatgtcgcgcaggccgcacgtcatcttcatccttgtggcgccaacaaccatgtgcagcaagcagcggatgcggtag

SEQ ID NO: 32551 - DNA, 1275 bp, Zea mays
  Peptide Sequence Number=SeqID_75926
atggagaacgatgttgagaaaaataacatggtgaaagagttctatatcccaacctatattttcgtgccagagtctccagtggagcatgcatctcagatacctacttgtccggtgattgtttttgtcaacacaaaaagtggaggtcaactgggacgtgagttgattgtcacataccgtaagcttctcaaccatgcccaggtatttgatctgcttgatgaagctccagacaatgtcttgcacagactatacagcaacctggaaaggctcaagcacggtggtgacactcttgcttctgaagtctataggagactaaggctaatagttgctggaggtgatggaacggcaggttggttgcttggagttgtatctgatcttaagttaggacatccacctcctgtagctacagttccgctggggactggaaataacttgccatattcttttggatggggaaagaaaaatcctggaacagattatgattcggtcatatcatttcttcagttggagtattcttatacatatcgtgggggattttggaattacttcagtatgggaatggatgcccaagtgtcttatgcatttcattctcagaggaaactgcatccagagaagttcaagaatcagttgtccaatcagaaaacatacttgaagctggcatgcacacaaggatggttttgtgcctctttgtttcatccaatgtcacggaacattgcttgccttgcgaaagtgaagataatgaaaaaatctggaaaatgggaaaccatggaaattccacaaagcttctctggtggactaaacccttggggaacaccaagtaagaggaagcaaagaaaacgagacttggtgatgcctccacttgtggatgatggccttctagaggttgtgggtttcaaagatgcttggcatggccttgtcttgctatctccaaaaggccatggaactcgccttgctcaggctcaccgtgtccgattcgagttcctcagaggcgcaactgatcatgcttacatgagaatggatggggaaccctggaagcagcctcttcccacggatgatggcaaagtcgtggtagagatctcccatgctgggcaggtgaagatgctcgcgaccaaagactgcatagccaaaggggtccatgaccatgagtcgtgcccagctatttcaacggttcatccagagtccatctacaacgacatgaacgatgacttcgaggaggaacggaggaactttggtgccgccttgtcgtttcgatacttgagtgatgtgaacaaacaataa

SEQ ID NO: 32552 - DNA, 168 bp, Zea mays
  Peptide Sequence Number=SeqID_75927
atgaacgcagcggccacccctaaaccctctcctacaagcaacagtggtagcgctgagaacagtgctccaccagatgtggaggcagcaccgttcgccaacaagtgcaagcggcatgtgcaagaacgtgaactgtatagtggtagttgggtggggaagcgaagagaatga

SEQ ID NO: 32553 - DNA, 447 bp, Zea mays
  Peptide Sequence Number=SeqID_75928
atgtgcgcggagaggcctgcagaaaggctcagtggcctgacgcaacggaccttgagtccgatgcaccagaccgcctacagagaactcggcgttctagggtttttggctaaaatcatcgtctcatggtccggtgatgcactggacctcggggacttcctgccaatgatggtgaggaaggtaggggtggaggggctgattcaggagctatgcaaagggttccagctgctcatggagcctaggacaggcaagatcacctgccagagcctgaagcagaatgcggccaggttcgggcttggagaactccatggtgatgagctcccggagatgatcagggaaggggatcttgacggggatggggcgctggatcagatggagttctgcattctcatggtcagattgagccctaagctgatggaagaagaggcacacatgatgtttcaatattga

SEQ ID NO: 32554 - DNA, 858 bp, Zea mays
  Peptide Sequence Number=SeqID_75929
atggaaggaggaggccatcccgcccacgctgacgaggagccaccaaaggagaaggccccaccacccaaggagaaagccgcccaaggaaaccttttcatttcagaagatgaagcatgcagtagttgtttcaaaaaggatagtgacaactttgcaggatgttcagttaaattcagtagtcctcattgttcacaaaactataaaactaaagacagttcgccatatgttgatgatcaccgtgacactgtcgaagaagcctctggatacatcatctctaggctttcctgcttattattggatatgtttgatattgtacttagtttataccaactacctatcccaagcaagttggaactcttacttttgtatattttattaaatctcatctttcttccaagcttcagcactttcattgagatcacaaccctagaagaatttgtgttagaccaactgcacacttatacatacagtaccttctccggcacgggaattgaatttccatgtcccatcttcgtgtacttgatcagtagtagcctcaacatactggcaacgaaaggtttgtgggtggcatttagagggtcgtatactcatttctgtaatttccaaaacatcaggaaaaaatgcactactttacagaagggaaaatcctctctccttgagatgctcttttcgctccttgagatggcagtcctaatggtggatcaagtgcatcatgccttaggggaagctggttctggtcactggtggaaccaacggcatcgggcagttggttgtagcatcatcgctgagcaggaacatcaagtcaaggttgctcctaagagatctagaaaaggcatcatccttatttggcaagtaggatga

SEQ ID NO: 32555 - DNA, 621 bp, Zea mays
  Peptide Sequence Number=SeqID_75930
atggctgaaaggtaccaactcccacggagttgcgttcccccaacgacaaggcggaaggattgcgggtgtcccccatccgggggctcggaaggtggaaagacacgatgcataagggagcgcgaagacatggtcgccttccaagggggtcaccctccttttaaaggcgactctccctacctgcgtccccagccgtcgtgggctgagtcttctccaacacgctccaaggtcctccccctacggcgcgggggctgggtcccacgtgtcatgcaagctggcctagagcagaagaagccaaaccgccgcgcgcggtgcatgcaaccgcccagcggttacgagcattcctccgcttttgcccagaccagcgggcgaaagggcgggcagccatgcaggcggcatgcaaccgcgccagaggttcaaagactggccctccgaggggttcaacagtcgcctcagatcgcgtgggcccgacacccactactggtcaggggttcgaaggccagccccccgaagggctccatggccacctcaggctactcgggctccgcgcccattactaatcaggggttcgaaggctggcccccgaagggttcacagtcgcctcatacgccgagcgagggatga

SEQ ID NO: 32556 - DNA, 1347 bp, Zea mays
  Peptide Sequence Number=SeqID_75931
atgtcggcggcaagcgaggcgcgctcgtcacgttcgtcacgacgcccctcaacctgcccccgcctcggccgcgcccctagcgacggcgcgctccccatccgcttcctgccgctccgcttcccctgcgccgaggcaggcctccccgagggctgcgagagcctcgacgcgctcccaggcctcggcctcctccgcaacttcaacgacgcctgcgccatgctccgtgggccactcgtcgtgctcctcagggacagggagggcgacgccccaccagcgagctgcgtcgtctccgacgcctgccatccgtggaccggcggggtggcgagggagctcggcgtgccgcgcttctcgttcgaagggttctgcgccttctcctccttgtgtatgcgccagatgaatctccacaggatcttcgagggcgtcgatgacgacaacacgcgccccgtgcgcgtccctgctttccccatccatgtcgagatatcgagggcgcggtcgcccggaaacttcacgggtcccagcatgaaggagttcggcgaggagatcatgagcgagagcgagagggccaacgacctggtggtgaacagcttcgcggagatggagcccatgtttgttgacgcctacgaggcggccatgagcaagaaggtatggaccatcggcctctgttcctggcccccaccgtgccgttggcgacgacagcagaagacgccaacgccgtccggtgtcctagtgcgctcgtcgctgccgcaactcgtcgaaatcgggcacggcctcgaggcgaccaagcgcccgttcatctgggtggtcaagcccggcaacctcgccgagttcgagcggtggctgtccgaggatggcttcgagtcccgcgtcggggagacgggcctggtgatcagggactgggcaccacagaaggcgatcctgtcgcacccggcaacgggagcctttgtcacgcactgcggctggaactccgtgctcgagtgcgtcacggtgggcctgccgatggtgtcgtgcccgcactttgccgagcagttcatgaacgagaagctcgtggtggatgtgctgcgggtcggcgtgcctgtcggcgtcaagggtgccgcgcagtggtgcgtggaggcggagggtgtgctagcgacgaggcaggacgtggagggggcggtggctgcggtgatggactgcggggaggagggctccgcgcgccgggcaagggccgccgagctcggcaggaaggctcgggaagccgtggtacacggtggctcgtcgttccgcaacgtggcgctgctcatacaacacgtccagcagcgaaccagcactagaaatacatggattgaaaagaagccgagcgaccgtagataa

SEQ ID NO: 32557 - DNA, 843 bp, Zea mays
  Peptide Sequence Number=SeqID_75932
atgggctccatctccgcgaagctgttcaccaccaggtcgttggccctctcgctctcgctcatgatctcctcgccgaactccttcatgctgggacccgtgaagtttccgggcgaccgcgccctcgatatctcgacatggatggggaaagcagggacgcgcacggggcgcgtgttgtcgtcatcgacgccctcgaagatcctgtggagattcatctggcgcatacacaaggaggagaaggcgcagaacccttcgaacgagaagcgcggcacgccgagctccctcgccaccccgccggtccacggatggcaggcgtcggagacgacgcagctcgctggtggggcgtcgccctccctgtccctgaggagcacgacgagtggcccacggagcatggcgcaggcgtcgttgaagttgcggaggaggccgaggcctgggagcgcgtcgaggctctcgcagccctcggggaggcctgcctcggcgcaggggaagcggagcggcaggaagcggatggggagcgcgccgtcgctaggggcgcggccgaggcgggggcaggttgaggggcgtcgtgacgaacgtgacgagcgcgcctcgcctggagagggtgcgagccatgtcgagcatcgggccggcgtggcccgcggccatcatcgggaccagcacgaagtggtgtggtcgttagctactttaattgagtgggttcagaacattcaaggtttcatgtgggccgaggagaaagtggacgatgaactagaaaaggacatgagcagtgcttttcaacacatgaaggccatgtgcaaatctttggtgctgccgaagtgtgtcgtgacattggaactgcgggtctag

SEQ ID NO: 32558 - DNA, 1227 bp, Zea mays
  Peptide Sequence Number=SeqID_75933
atggagtatttcgggttaactgctttgttggttgctcctgtgtctttctcctcatttgtcttggctggtttaccaaaaattatcggctcttcaatgttccccttggcatgtcccacatttgattgggcgaatacagtggtggaagatatgcatactgatatggcacaggtgggtatgagggtggaggtgtccatgtatgtggtcgctgctcctgggcagtgtcggaccgtccgcgactacgcgccagactgtccgcggtgcactgaacagggggctgcacctggcctcttttgtgcacctgccgccagtgttggaggtcgtgatggcgcgctggtcacattcgtcaccacgccgctgaacctgctccgccttggccacgcccccggtgatggcgcgctccccatccgcttcccatgcgccgaggccggtctacccgagggctgcgagagtgccgacgtgctcccgggcatcgacttcctcaggaacttccacgacaccttctgtgctttctcctcattctacatgcgccagatgaacatccacagcgtcttcgagggaatcggtgaccagaagcaccccatgcgtgtccctagcttccacatacacgtcgagatgttgagggcgcgatcgccggaaaacttctctagttttggcaaggtgttcgccgacgaggtcatggctgaaaacgccaagaagatatgggccgtgaggcctctcttcctccagcacaacatgtcgttcctggcccgctcgtcgcagccacagctcgtggagatcgcccacgggctggaggcgagcaatcacccgttcatctgggttgtgaagcccaccaacctcgccgagttcgagcggtggctgtccgactccgacaacggcttcgagcgcggcgttggggacaaggggctcgtgaaggcaatcctgtcgcacccggccacgggcgcctttgtgacgcactgcggctggaactccctgctcgagtgcgtcgccgtgggatcgttcggcctagagccgcttaccgtccgcgcccccgcagtgagcaccaccaggcaactcggcgacccagtgacccgtcgtggaccgtcgcgctgtccaactcgcagagccgaacccaaggtgctcaaggtggcggagaagtggttcctctcgcacttcagggtagattgttaccagaagaccgtccaagagagggaaataaacgccgagtacatgtcaaccgtgctacaatag

SEQ ID NO: 32559 - DNA, 480 bp, Zea mays
  Peptide Sequence Number=SeqID_75934
atggcgtctgccaagtcgtcgaggtcacggcccaccggccacttcagagtgttcccgctcgtggacaagctcaagatattcaaggctgacaactttgaccccgatgcctacgtgcagtccaagtgccacgccatggacgagaagtgccatcctcctctgccttccgccactgctcactggcccagatcttcaatgccctcgctaccacctaccgatgttttggctctgccccattcatcttcgacctccgtcacccgccgcatcctcgttgccggcgcacgaccgctccccaccactgcggcggctcttctttgttcactcccttccgccaccgtggccctcgacatgtatcatcaaatctacacgcattcaagtccacggagcaatcacctcctcctgccaactgttcacaccttcaattccctcctccttgctttccaccatgatggcaagtgtgatgaattcaagattgtgctctag

SEQ ID NO: 32560 - DNA, 108 bp, Zea mays
  Peptide Sequence Number=SeqID_75935
atggagctagtatggggctcggctcgaatagaggaggatggagggagtgctaccggtgtgcctcaagtaactatcgacaacttttgtaattggagccattcaatttga

SEQ ID NO: 32561 - DNA, 270 bp, Zea mays
  Peptide Sequence Number=SeqID_75936
atggcgttggaggtgatgaagacggagatcgacatctggagacctaatctagagaaaaaggtggatgatctcgccttggaagtgacatacgtcggcaaattccgcgaacgcgagcactacatagctgtgttcggcaaactaggcatattcgtcctgtgcgagtcggcgaccagatgcccacctgtcggattccatctcgccggtgggccttttggccatcacgtcaacaactatcaccgggagcatgagtcgagacgtggtttcgcctag

SEQ ID NO: 32562 - DNA, 396 bp, Zea mays
  Peptide Sequence Number=SeqID_75937
atggcgagcttggccgcggcgcaggcggtactgcggcgcagttcgattcgcccacggtggcgcaaggaggtgggaggagggagtagaggcggtgcccggttttatatcgcgaagacgcaggtccgaaggaggatggaatcggggaggatcgcgcggagctcgcggagaattttgggtgttacagtcgatgagcgtgcaacttatgagtcacgaaccaacccaggaggaggcgttggagtctactcgacgatgccgtggcgagactatctccaacaagatggcttggtcgattgggagtacttgatcgaataccggaagactagagtgttccataggtccatttctgactgtggacaaggccattcccgacaacattcgctatttatcaacaactga

SEQ ID NO: 32563 - DNA, 63 bp, Zea mays
  Peptide Sequence Number=SeqID_75938
atgtttgtcggcttgtggaaaaacttgcgtgataggtttttacatggtggtaacgaaaattga

SEQ ID NO: 32564 - DNA, 201 bp, Zea mays
  Peptide Sequence Number=SeqID_75939
atgccgcaatcagtccttaatatatttgttacaaatgatttgagaaaagtcactcaatctgaactcgtacggtccaaccccagggttatgaaggctggggagcaccaggaggataaggagggggaatgttttgtccggtttggacatggcggtggcctgactccttctggtataaccgttaagaaaaaggagatcgggtaa

SEQ ID NO: 32565 - DNA, 201 bp, Zea mays
  Peptide Sequence Number=SeqID_75940
atgtcgcgtgcgttcgatgactactatatcaaggactgtggcgtcatctcggcgtcggaggtgacgcagaggaggatcggcagcaatgaccagttcgtcatccttgtcgtagttggggtgtggaacgtgctctccaacgacgagaccatgcaaatcgtggcatatattgaagtctacatggtactgatggttgcaatatag

SEQ ID NO: 32566 - DNA, 453 bp, Zea mays
  Peptide Sequence Number=SeqID_75941
atgccttgcctggatgctttggcgagatgtgtcatgtgtgcttggaaaaccacagatgcattgtctggtgcaacatctgtgtctaaaataagcaacaagcaagtaatcaagcacctggtgaagagcgtgtcgcagtcgcagtggtactcgcgagggccgcaggtcttggcgtgtgccttgagaatcttagatgaacctacaattaaaggtatacctagaagtggatataggattgatgctgactcgtcttctaagcatgtgtctcaatgtcttgttaacatcaccatgtttgattcgcacagacaaaagtcggcaaccaaggcggcttcagcgcaccatcagggggtggtggaaacggtgtcgctgaaggagaatgtgagcgcaaagacattggtcattgttgcggagaatcctgataagttcagagttgttgctctttctgctggcttctag

SEQ ID NO: 32567 - DNA, 390 bp, Zea mays
  Peptide Sequence Number=SeqID_75942
atggattttctttggcgcatgtatgagatgcacccggctttgtcccttaaagcccggggtgttacagttctgcatgatcgatttgggtatgatgatgtcgaacataaggatgttgtgtgctcggacttcccatgcccttgctgctatgaagatcatgatgttacttctctttgtgcccatttggaggacgagcacccttttgagtctaaaattatggtgagtccatctcctaattatgcaatatttacaggatattatcaatttgggtgtgatgatatcgaacctgaggatgatgtgcgctcggacttccatgcccttactgctatgaagatcatgatgctacttctctctgtgtgcccatttggaggatgggcgccattttgtgtctaa

SEQ ID NO: 32568 - DNA, 174 bp, Zea mays
  Peptide Sequence Number=SeqID_75943
atggccgttggaaggctgctgtcgcatggcgcaccggacagtccgggagctattggagcaatggaattgcctcatcttccccaatatgacagttttatggggatgagggatggtattggagagctactagatgctctatcggatctgatatttggcttggatattgcacagtga

SEQ ID NO: 32569 - DNA, 2019 bp, Zea mays
  Peptide Sequence Number=SeqID_75944
atgccggtgcacgtagaggtgaccaaggccacggcgccgggcttcttcaactcgccggggtgggaggcggtccggggcgagtgcgtggaggccatgcgcgcggccgacggcgcagtggtgaacacgttcgtgggcctcgagggccagttcgtgtcgtgctacgaggcggcgctcggcaaacccgtgtggacgctggggccgctctgcctccgcgagcgggacgccgacgccatgtcgtcgcggggggcggacggcggccagcagcacagcgcggtagccgcctggctcgactccaaggagaccggctccgtcgtgttcgtcagcttcggcagcctcgcgcggaagctcccgaagcagctgttcgaggtggggcatggcctggaggactccggcaggccgttcctgtgggtggtgaagctggccgaggcgtccccgccggaggtgcgggagtggctgggagccctggaggcgcgcgcggcggggcggggtctcgtggtgcgtgggtgggcgccgcagctcgccatcctgtcccaccgcgccgtggggggcttcgtcacccactgcggatggaactcgctgctggagtccgtcgcgcacggcgtcccggtggtcacgtggccccacttcgccgaccagttcctgaacgagcggctggcggtggacgtgctcggcgtgggcgtgcccatcggcgtgacggcgcccgtgatggtgttcgacgacgagagcgtggtggtggcgcgtggggacgtcgcgcgggcggtgtcggcgctgatgggcgaagggaaagaggccggcgagaggaggcggagggccagggagtacggagagaaagctcacggcgccatggagaaaggaggctcctcgtatgagaacctgacgcagctcatcgagagcttcgggcaagtggaggcaagaaaagccgcccgatcccaccccgatcctgccggccagaccccaaattcatcgcgaccctttttcttccttccccgatttcaccgccgccagtcgcccgatcccgccgcccggcccctgccccggaggttggaggcgcgagggcgatggcgctcctgcagcaccagcagcttcaacagcaacggcggcagctcgaggaggaggatgacgttcggcggggtggcggcgttcccggcagcgctgggccacggtcagcaggtggactacggggaggacgccggcgggctcggggacagcgacgcgggcgggtcggagcccgagccactgccagagcggacgcgtggggggttcggcggcggcagcaagcggagccgcgctgctgaggtgcacaacctctccgagaaggtggtgccgttgtcatttcttgaaattcgagttctttctccctgtggagaaagggactgcatccaatcccccttcactgctaagcctgatagttggaagaatgggtgtcagcagagtgagggctatgggatacaggattccatttgcgatgatggtcacactgaaactgctaaaaccaagaagaagatggatgaatccttggagccaagtggggagaataataactgtgagcaagttgagatttcgagtaaggatggcaaaaaggtgcccatgaagttggaggtctcatctggagttcaaactacatcatccattatggaacaagaagtgcactcagggtttgttggggtagaggttagtgtatctcacattctcacatatatttatattactgaatatatttcactcagggtcaaatctatactacttaagacagtaccttggtcgctcttgacgaaatcaccacagtggcacatgcgggtggccttcgcctgcagcgtgtgcgggcagcgtacgaccagggccatcaatcctcatgcctacaccaatgagactgtgtttgttcaggcaaccttcgactgcccgatgaagacctatggcttcctcacgcctgaattttggagccataccaagttttccatgactccgttccatcaatacacggacctgctggcgaaggctaccaagggtcttgtgctttag

SEQ ID NO: 32570 - DNA, 645 bp, Zea mays
  Peptide Sequence Number=SeqID_75945
atgggagtcaactttggaccctgtttgctggccgctttgatgattttgccttttgaggatggtcaagatgaatttgaaaagcgaacaaagaaaactaaaaagaaaaggaagaggtacctccatttgttcctactaggaataaatgtcaatagtgttgtagaggagcaacggtgccaggacgcgtcaaggttgctccagaataaatggatcatagtgcggtggtcatgggattggaatctgctctgtatttacagggaagcgataattgatcctgcagcaatttttgaacagttagaaaagagaaaattgatcccccaagcattagcagcaaaaagggtgcatttcttcaccttaataaaaaagcgacactgcaaggaggccaaagcctacgccgtgaccccctctagtaccctgctatggtgctgtcagcgcagccgcctcgcagaaaaaaatcgacactgcaaggaggtcaaagcctgcgccagtgaccccctcgagcaccctgctacggtgctacaagcgcagccgcctcgcaagttgatgttacggctgggcaaagtattgaaccctgaagagagccgtggcagcacccccaaaatggctccagttcaggccttccatagccatggcagacgcgacatctag

SEQ ID NO: 32571 - DNA, 285 bp, Zea mays
  Peptide Sequence Number=SeqID_75946
atggcatggagacttacccggtccacgttcgtcggtgagcggaaggagtctggcgagggtgattcagggtctccggtgaggctctgccgggtccgaggacttggggagcttcacgggtttcaggcgaaactacccgagcagctggcgcagcctgggagtggctggagtgagctggccgcggtggccgaggctcgggtggcttggcgggaggtggcgcggcatgttcaaggcaaagtccgggtccgaatcccaatgccatcttcaggtatgaggaagaggggttag

SEQ ID NO: 32572 - DNA, 1077 bp, Zea mays
  Peptide Sequence Number=SeqID_75947
atggatcctggcacacatatggtttgcgctcggttctaccccctggaaccgggtgtgacagaagtgatggttcgcactttccaaactacccgcgtcaacaccagctacgcccctcagccccggcagatcccggtctacccagtggtagtcgaggaagctccagcgaatctccctcccgtccgagtagagaatgtaatcaacctggaggacagctcggaggagcagctgccgacccccaccccgttggccgagtccttggccttcgcagctgggtcatcgacgtcagcatcgtcggcaccagccttccaagcacctgcacctggaggcaacgaccccgacgactccggagacggcgatgacgaggacgacgacgacgaagacgatggagaagacggacacatcaacgaggaagctgactacgcccagcaggaccacttcatggggattggtccagttgtcgaacattatacatcaatgttcgagacaggacacttccccaacctgctgcaggcagtgctgcacgagctaggagcctacgcccgccccctgtacgagacgaggcgagtgagcgagcctccccgggcttgctattacatcactcgcatccatgtcagggtaatggatgcaggtgacaggggattcaggactctttctgctcacgagtccctgataccgctgtccacctacgctgcctcggtcagcgatgctgcccgtcggaccctgtggtcgctcagccacacctaccggcaacagctgcagaacacgagattcaggcaccttcctcagcgcctgcgtggagagagccagaccaacattgtcccaggtgaacctggtgaggatcgcctcaacaccctagctggtgtagtggccggtctcaacaccgacctggacagtgccactctggacctctacagtgtgcacttggagctggagaatgcccatgccaggattgcagccctggaagcccaactgcaaggactagatccgccagaagctcaggtccccgtcgtggcgctgtctcctccccgcaagaggatgcgctatggagagcccggatcagtcactaggctgctttag

SEQ ID NO: 32573 - DNA, 246 bp, Zea mays
  Peptide Sequence Number=SeqID_75948
atgacgaagagcaagccatcaagctgcatcatcaaagatgaagatgcttgcgctccctatcattgggctccatttttgaacccagcaacaaaaagcaaagaaaagaaactcaaagaagggtgcagcatgtgggacgagtgccctagtggccagggtgtcacgctccacaagatcgtgacaaccataggaggtggtgtatcggttgctaaggtgcagcatctttggaaggctgtagtcgggccgtga

SEQ ID NO: 32574 - DNA, 153 bp, Zea mays
  Peptide Sequence Number=SeqID_75949
atgcgagctcggattggaatgtgcaccctggacggaaaggacgagtgccctagtggccagggtgtcacgctccacaagatcgtgacagccataggaggtggtgtatcggttgctaaggcgcagcgtctttggaaggctgtagtcgggccgtga

SEQ ID NO: 32575 - DNA, 348 bp, Zea mays
  Peptide Sequence Number=SeqID_75950
atggagatgggaggatttggtgccgcctcacggccaagcagagggagctgcgggccgtcaccttgggtcctcggccacgtggccaattggatcgtgcttggtgacccagggagagcagaggaagccaccgagaacaaattccagggatcaccctcattcgaggtcaagcccgtggccgagggggtctcgccctatcctggcggatgtgtccggcgtgctgtcaatggaacaaacagagagatgggaggatttggtgctgcctcaccgccaagaagagggaggtacgagccaccaccttgggtcctcggccacgtggccgattggatcgcgcttggtgacccagggtga

SEQ ID NO: 32576 - DNA, 360 bp, Zea mays
  Peptide Sequence Number=SeqID_75951
atggatgctcttaacttcgaatatccagattacgaaaggcttgacgaaggggtcagaggagcaaagaaaaagagggttgtaagtattctgaaaatgcaagccatgcagtccattgaagaagatcagagggccagtaaaaaacagaaaatttcagcggagccgaaggattcggctcccaagaaacgaaagtctaccaagatggctcatgccgagacaaaggtacaagatgtaccagaaaagactgtcggtacttctctgtcttcctctgctggtgttatagaaatattgaaggtggtggacttccggatcatacttagggatttgcccaaacttccggtacttgatacatgttgtgaatga

SEQ ID NO: 32577 - DNA, 2835 bp, Zea mays
  Peptide Sequence Number=SeqID_75952
atgtcgtcctcttcttcttccgctgccgctacgccaccgaccgattcctcgccgccggccgccgcctcgtcggaggagacgctgagtagttcgatggcggaggagttgcgcgccggcgattctgttgattttggcgtgtcgcggatgttgtcggtccgcgtgcaagatatgcagcggttgggttacttcggcggcggagtcgctcgtgccccggggacggaggaagtccccgagccggagggtgagttggttgttttcaaggcgttcttcgccgccggtctcccgcttgcctgcgcaccgaagaggatgattggggacgaagtcgctcagtttgggtccagcacattcacgccgaagaccggcaagaccacgatgcaggtggtggagctggtgccttgcgcccgcaacaagtggggcaactggaatgaattttggttttacgttgctgagggtaccgtcaaaggccatgagggactccccgtgtccgagatgtgttctcatttttactcagcgtacccgccttttgaagtggcagaggaggatgtggacgaaggggcccttcggtgcgccgccggactcagcagtgggcgcgatttggtcgaagagtttgtctcgtacggggtgtggcccttagcgcatggctgggcgttgggcgaagtatgccttcgccagatgccttttcacggtggaagggaggtgcgaagtcctgccttcgcactgaatctgcgaaaccgcgacccgaccgcctttgtgcgtgaggcggaggatggggcggtgcggctcgttggacgttatgtgccgaggacagagggccagcgcagctttgatatccgcgggtcgaatgaccgtttgaacagggtttttgaattgaatcaattgccgtatgacggctatcctggtcaagacgacgcggaccgtcgtgggaagaaaccggtggtggatgctggagatgaccctgcgccggcggccgctccatcctctaaaaggagaaaattaggtactgctatgggaggacttggggtttctgatagttttgctagagagttgatgaggacgtgcgcggccccggggggaaggatgtctttgcccgagctccgggagtcttcggctcggatgctgagggttaccgggggttgttggcctaggaatgttcctatcccccgcgcggctggcgaggacttgtttacatctcgcatggttcgtgaatggagagtttttccttacgggcggaatattgctgctgttgtgtcggcagtgatggacaaggaccgccagggagcggcacaaaagcgccaggcggttgtcaggctcgttgaggctaggccgaagagacagcgggggtcggcgaaggctgcggcccccggcggaggcaagccaccgctggcggcgaagtcaggcgcccctacgtctagcagagctccggaggcgacggcaggcgccgggggctccaagtcgacgaaggcggtgccgccggccggcagagtgccggaggctgcgaaggcagcccgatcgttgccgtcggcgggcaagcacatcgccgacttcgccaccgatattagcgtggatgactatcttggtgggtcggacgaaggccaacttgctatagttgcgcctaccgcggtgacaacgacgactgccgtagcgccgaaggcgaagggcggggctcttagctccggaggcgaggtggtggccctcgcggtcgtcagggatgaggcgggcgctgcgtcccgccggctgaaggaggtggtggagtcgctaagtcaggtggctgacttcgccaaccgcacggcgtcgggggccatcacgggtgttgtgtctgccgaagtcgagagacttcggacacaacatgctgacgccgtccgagagaaatcggccgccgacagcaagtgccgcaagctggcggacaaggtggccgcgctggagggagagaaggctgacctccggcgccaattggcgggggagaggagggagaccaacgaggcccttgccaaggcgctggctgcgcaggcggaggccaacctggcacgggcggagggcaaccttgccagggagcgcgccgagcagctgcaggagcggctcattgccttggagagtcgcgtggagcggaccgaggccgcggcgcgcgcggaggccgaacggacgcgcactcagcttatggatacatatcgtgagctgggtgcgcagactggtgacttcgaagtgccggaccgagaggccggacttcgctgtctggaatgggtgcaggaggagctgcaggcactccccactgttgtggaggggtttatgtcgtacgcctctctggtcacctgcgagggggcgatgaacgcgctctcccgtgaagggtgccggcactttgaggtcttcgaccaggccgatgaagattttgaacgagatatctataaggttgaagaccccgtagtgaaggactccgccggggccatctacgaccggatgtggggtccgcacggtcgccaggtggtcagggagcgggccgagacggcgagggctcaggcggcgcgcggagagcgagtggacgacttcggggcgttgaacatcgcgctgcctgacccggagccgaccccggcggaggccgtgcctggggtcgccctggagccaaccccggagactgcggaaaacgcaccggatgcccccgcatccgccgtggccggcgaggacctgctcccaaagatggccgaaggcgcgcccgatgcccccgcagctgccgtgccgagtgctgaagatcccgcggtggtggcggcggaaacaacagcggaggcagcggcggagccgacggcggaggcttccgcaacgtcagggccttcgcaggtggcgtag

SEQ ID NO: 32578 - DNA, 1347 bp, Zea mays
  Peptide Sequence Number=SeqID_75953
atggccggctcggccgcccccgcaccctgccccgtgcccgcccggcctcggccgcccccctggccggttcaaccgccctggccccagctcgcccgcccgttcccccgtcccggcctcgcccgaccgtatcttcgctcgcccgcgctcgcgaacgatccggttgaagagcccgaggaactcgcaggagaagcccctgagcagcagtcggttggtggaggcaagtgtcccttgacctatctctgtcctattcattctttaattcacctcccgctttacatatttatacctaaggtggttatgagattgatggttttggttatgactatggtgctgatggctcgacttagacacactgcacgaaagtcagtcatccccttcttaccctcccgccttgctgagcatccgcttcgctgtcccgtggccggacagtccagccacttggagagactgcaccaccgcctgcatgaggagcaggaacgtcgacgacaggagcagcagggctcttctttctcgctccaccaggagatagagtctgtgaggagctgctcccctgtgcttcctctggagccgccccctgcaccaccactgggcgtcccagcttctggagtagctgctggaggagacccagacgacggaggaggcgacgacagctcaagccacgacaccgacttctctgctaaccttgagccggaaggatgggttgctcgacccatcactcgcgacgctgctcgcgggtgtcacttccacgatgcgctcgacaccctgctacgtcgggcatttgaccggcatacttggtccgtcgagtatcgctgtgtggtctaccagcacagtcgcggggtctacccggaccgctgggaggcaacctgcttggtgcgctgtccggagaacagtctccagggtgctgaggtctgctcagagcactattctatctctgagcgggactcagctgaggcagccatgcaagatgctgcacggcgtgcgctttcgcactactgctcggttttcggtggggcagctgacggtctcgacctgaagtattacccccgctgtccatccggcagcacaggaggcgtgattgtctcacctgtcggtgagggcaatcctaggttgagcagcacagtcaacctagccgccgtgctaaacacggagctggaccatgcattagacgagctgagtagggctcgtgctgagatcgccctgctgcgggctgagcgcgcggaacgtcgtcacctggacggtggttcccccgctcccgtcgggactcagcacccgtaccgctcacctcagcgtggacaccagtcttatggcaaccccgactgcaagaccaagataactctagaaccatag

SEQ ID NO: 32579 - DNA, 222 bp, Zea mays
  Peptide Sequence Number=SeqID_75954
atgggaaatcaattggaggaaaaatctttggaaaacgtcagagtggtgtgtgaatacccagacatattttcggaggaattaccaggtcctcaaggcaaaaacaccttcggcaagacagtacaaaggcagcatttgagaacaagtgaccaacattggcgcccacctccggtgaactcacttccacagttgcgaggatggcttcgcaacacaaccaagttgtag

SEQ ID NO: 32580 - DNA, 213 bp, Zea mays
  Peptide Sequence Number=SeqID_75955
atgggggcggctggaggacaggcgctggtgcgagattgggaaaggaagcgagaaaacgcagctgctgcagggcatcacggcggggacgaccggctccaagagcagcgaagggaaacgacgaccggctacaggaagggcgtcgtcgaaggcagcgtcgcggccgacgtcgagggcggcccgcagctggcgtcgagggagaggccaagggcttga

SEQ ID NO: 32581 - DNA, 519 bp, Zea mays
  Peptide Sequence Number=SeqID_75956
atggctgaacctggaatcgttgtcgtgtccaccatgtcagagtcatttgggtccatgaaatgtaacttaaatggaatgctacaatgtatgcgtacagttctctcatgcaatgcgctgtgcatgtgcacatgcaactgcatggaaggcattcttgagcgttaccagcattactcatttgaagaaagagtagtacttgatccaactattgtagaccagaatcagctcatgttcaattcaatttccgagcttcagaaaaaggtcagctacaatataggttcccttgtacctcgcagtctgtgcagagaggaagatgccaactgtgacaacacacggacagttgagcaacagcagccctctgacgacagacagacagttgagcatgctcctcttcaggaaactgatccaggcaaagagacacatgttttagaggctaaaacgctcacagcagatgctgatggaaatttgagctcaagccagcaaactggggagtacaatgaattgctgagacaatactattaa

SEQ ID NO: 32582 - DNA, 645 bp, Zea mays
  Peptide Sequence Number=SeqID_75957
atggccgcgagcgccatggccccgagcggccgggccgagccgagcggcgggggcgcgaccggccgagccgggggccaaggcgggcggcgcggggaagggcgccggggagaggagagggaggagggagagggaggaggagggagggggaggaggagggaggggcctcaccggaggggaggacggcggcggcggcggggagcggcggcggcgcgggacgcgggggagggcgcgggggagggcgccgggcgttacatcactccaccttccagttttagcacccatggtcttgttaattatggaattaacaacaataacatcacaagagtgtcatcattgagccgagttaacgaaatagcaactagtaagcaaggcttgaaacccaagtttaatcaaggtatgggttggtggagaatgttcttgcgtcaatggggaagcatcgtcatacaagaactcctcaaaattgtatgcctcaagatgaaggtcgtcatgattgtgaccctagtgccaaaggtctctgtagttgtgttgctggttgtcatgctctttcggagagccaaagcatcttctcctgcacttctccagctattgatggatagttttaaggttgttgatctcgtgatcaagttcctcatctcgtggttctga

SEQ ID NO: 32583 - DNA, 501 bp, Zea mays
  Peptide Sequence Number=SeqID_75958
atgacggatccacaaaacaaggtgtcgcgtgttcctttgcttgtcacaactacatcatcatacacgttcaggaccaaagaggcagagtaccatcaatcagtcttgagggaacaattggagtaccagaggcaacaatctgaataccagagacaacaagccgagtaccagaagaagagggacgagtattatgcaagcctccaggcccaaaatcaagctcttctctcgcaactagcccaacaagcgggcgtcccgatgccgacatatgggatgccgcctccggactttgcactgccaatgccaatgttggcgcctccacctccgcctccgcctccgtcacaattccctatgggatttcagacaccactcgcttcagttgccgcacctggagatgggtctggtcaagacgacacaacacattcgtgggtgaacaaccttttcaacacgcagagtccagccggaggaggtggctactcgaaccatccagacgatggatatgattga

SEQ ID NO: 32584 - DNA, 606 bp, Zea mays
  Peptide Sequence Number=SeqID_75959
atgaattcacccacccccaccagtggaggagacactcgttttagctctggcttcctttctgacgatggctttccttccatcttgtgggaagttcttaactccgccggttaccctacgtcccctttgtacacggtgcagttgtacgaggagcatcgggtacctcgttgccgagtctggctgactttggaggctcatccccttcagccagattggcgttctcttgactctgagacgattggattcaggacggacgacaccactgaagcggcagccatgaagactctgacaactttctgtggctaccattctctggagatgttggtggagaaggacctacaggtggaaaggctgagccagcgcattgccaccttggagcagcaggtggagatccgagacaacaccattgatgtcttggagaaccagcttcatgatatgcagcgggaactcgaagaagctaatgaccaccaggacatgcaccacttagagatggaggccaatgaggccagaagcgagggagaagaggctcctgaggagttaggaccaacccctggtgccaatgggactacctccatgatgcccccttcacccgcatccagtgtcgcttag

SEQ ID NO: 32585 - DNA, 246 bp, Zea mays
  Peptide Sequence Number=SeqID_75960
atggctcgaactgccaccgacgtcatcgtcgtctctgtgaaggcggcctctcagactctacttcctgctgaggcgagggggaagagtcctgctgctcctgctcctgctcctgctcctggcatcggcgctcctgctcctcgtgcaggcgacgatgcagtctcactaggtggttggaccgacctggcactgtgcgacgcagtggacgctccgccaggcgagaaggcaaaaaggggatcacagatgtga

SEQ ID NO: 32586 - DNA, 150 bp, Zea mays
  Peptide Sequence Number=SeqID_75961
atgacttcaagcttcttgtttcaggacccaattattggaggaagtttattgttgacatacacaacgggcaatgttgcacgtcttcctactatagcttcttttgctagagcactgcagatttgtgtcgacacgagttatagtagcctttga

SEQ ID NO: 32587 - DNA, 879 bp, Zea mays
  Peptide Sequence Number=SeqID_75962
atgcccaaggagtatgactcgtggggctgggcccccgtgtcagaggctaggccgctgctttcggcggatatgaagaggcgcactaccgcaggcggtggcgtgctcctcacgcggcggttcgccttctctgcacacggaggccgacgcccaaggagtatgactcgtgggcccgggccccgtgtcagaggctgggccgctgctttcggcggagatgaagaggcacactaccgcaggcagtggcatgctcctcacgcggcggttcgccttctccacacatggaggccgacgcccaaggagtatgactcgtggcccgggcccccgtgccagaggctagccgccatgaccttgctagaccctcccgagcgcctccagcctgaggtggcactcaacttggtgtgcaacctgctcggatggggtgtgtcggcgttcgccggaaagatccgtgtcggcggccatcatcgcctatctctgcaagatgtccgtgggggtgacgcttcttcccacttcttcctccagcattcggaggaaaggatgttcaccagccatgtgaaggtggaaggcgggctgagctgcgcctccatccttcgcgcctccatctctttggctttgatgccttcagtgccgccttcaatggtgaccgctggcctggctgctgaagacgccacctgggaggtcgtacaagatgtcgtagagatggtggccgcgcgcttccagcggaccctactgatgtcgaaccaacaggccgggcttatgaggacggacctcatcgggctggcgtacacgtgcactcctgggtcggcatacttccgtcaccttgaagggtccttcccaactgggggagagtttgtggagcccttctcggttcagtactcatcgtag

SEQ ID NO: 32588 - DNA, 255 bp, Zea mays
  Peptide Sequence Number=SeqID_75963
atggcacaagcagcgtatcaaatgtggttggtgcaagttcttatttatacgctcggcgcgcctcgaattggagggtcccgtctatcattgactgttgctattctagcaaagggaaggattaaagacatatacgatgagaagggcatgattgtgacgaaggttgtcgttgctccgaagctatgcacaagggagctccggctcaatcactggaaaatgaaccgacttaaaggggaaaaggctatccagtcctcatag

SEQ ID NO: 32589 - DNA, 252 bp, Zea mays
  Peptide Sequence Number=SeqID_75964
atgccgaagctccctgaaaggtaccttcgacatgtaccatcgcactatatttgcttctatgctgatctgccgaaggtgtttcttcttgaaggaccttcggcgacgaagcagacccccaacacatacgatcttgaaaatgatccagaattgaaagatgtccttgctgaactcaaggtggtacacaaggcaatagacgaagctgttgataaaggtctcaatgaaattgtcaaaaaagttttgaacgaagactaa

SEQ ID NO: 32590 - DNA, 516 bp, Zea mays
  Peptide Sequence Number=SeqID_75965
atgccttcgcactttcctcatgtgtcgcgtccttccgccttccgagcccctggatggggagccccggctgcgttcccccaccaatgggcagtttggtggggagaagcgagtcgggctgcggcctccgccccgccctcagcttcaaggattttcgtcatccgggctaaggcggaggagcacaccgagtggggggttgcctccgcgtgggccggtaacccttttcttcccccggcgtttgggggagaaaggcatcctccagccccgcggaggctttcttcagccatgcgggggaaggtgaagcgctgcttcctggacaggggcggcctcggcgagggcgggagtgaggacctgccggtgcgctttggggaggccggcgcccgctggtgcggtgttggcggacaggtggacgccaccgtcagtgctgaggtggtagcagccggagaaggtttctctgccgacgagatcgccaactccgcctgcacccctggacctctgtcccctggcttgaatggctag

SEQ ID NO: 32591 - DNA, 924 bp, Zea mays
  Peptide Sequence Number=SeqID_75966
atgtcggggggactaagaaacggaagtgcttctaagcttgaaaaggttgaggttgcctcaacttcatcttttggtgcagatgttgatcctagggcaatagatcttgccatgagaatcgacgaaaggatgttcctcaaaatgaaggaagatgaggcgaagaacaagattgaagaagaagaaaatgatcgatggagaccaaatgacgaatccacctcttcacaaggttcgtctttcaaatccacttctcatatgtgctttgtcgctaatgggagtgatagtgaaagcgaaagtgaggatgaggaggagcaagaaagtgatagtgaagatggggaagatcttcaacaattcttcgctcagctaagcaagaaacatcgaatgagcttgctcaaactcatgaaaagagtggaagaacaaaaagaaatgcttcataagcaagaagacttcctcatcagaaaaatcaaagacttagagaagttgaccaaagagcatgagaagctaaagtgctctcatgatgatttggtccaaaggtattgtcggcgtttcgaccccggggggtccctggaccgacgacctcaccctggcgggtggcacagcagtcggagcagcgcaggcggcgctgttttcctgtcgggtcagtcagtggaggggcaaagtgactgcggtcacttcggccttgtcgactggagagcacgcgtcaggataaggtggcaggcgatccttgcattagatgctcctgcgatccggtcggctggcgaggcgatctggccaaggttgcttctccgtgaagcctgcccgaactgggcctcgggcgagtcgaagttgcatccgttgcttgaggagaccctcgggcgaggcgcgaatctaccttggtctaccgttcctgctcgaggctgggctcggatgaggcgagatcgtgtcccttga

SEQ ID NO: 32592 - DNA, 363 bp, Zea mays
  Peptide Sequence Number=SeqID_75967
atgccggttactatgtgtgaaaaactgcagcgccacttgtgccagcgccgcgccttctcgactacggaaccggtgccgcgactcgaggcaaccctgcgcatggcccagcagtgccaaccaggcacgccggtcacggggactgggaaagggggatactccgaaagggatccttctccgcgaaggaagcgggccccgagccctcctactgatcagaggttcgaagactggcccctcagaagggttcgacagccgcctcagagcactcgggctccacgcccactactggtcagaggttcgaaagctggcccctcggaagggttcgacagccgcctcaggccactcgggctccgcgcccactactga

SEQ ID NO: 32593 - DNA, 750 bp, Zea mays
  Peptide Sequence Number=SeqID_75968
atggcgcccgaggctggacttggctgctgtcagcctcaccctggcgggtggcacaacagtcggagcagcgcaggcagcgctgttttcctgttgggtcagtcagtggaggggcgaagtgactgcggtcacatcggccttgtcgactggagagcacgcgtcaggataaggtgtcaggcgatccttgcattaaatgctcctgcgatccggtcggctggcgaggcgatctggccaaggttgcttctccgtgaagcatgcctgaactgggcctcgggcgagtcgaagaaaataaaagagctcaaggaagaagttggaaggctaagaagaagcttaactcttttgaagggaaagtgtcatgctcaaccttctcaagataaccgtgataatatggtgaaaaagcttgagaaggggacaaccgtagcatgcacaaaaccccttcaaaagaataccaagctttccaagaagggcatgagcaaaattcatgaaagatcaaagataagcgatagaaggtgctatggatgcaaggagaaaggtcatgaaattgattcatgcccccacatgaaaaatcaagaccttgcactatcaagaaagatgaaagcaaaaggcaaatgcattgcaaggacaagcaccacatttgctacaattgccgtaaaaaaggtcatctattcaaggtttgtccaaaggccacataggaaaaatgaagcacttgagaatgaacttaaaagattttaccttgctttggaaaggatctaa

SEQ ID NO: 32594 - DNA, 732 bp, Zea mays
  Peptide Sequence Number=SeqID_75969
atgtccgacctccaccccaccggagcaccaagtcgccggccaccgcgcctccgccagcaagctgggcccgctcatcgacggctccggcctcttctacagccgctccaggccggtgactgtggggagcacgagcccggggagccacatccgcacctcgtcctcgacgacctcctcgcgggctttgaggcgccctgcgtcgcagacatcaagatcggcgccatcatgtggccaccgagttcgccggagccctacaacgccaagtgcctcgccaaggaccgcgggaccacgagcgttctgctcggattccgcgtctccggcgtccgagtcgtcggccccgagggcgccgtgtggtggacggagcgcccggaggtgaaggctatggacaccgtcggcgtctgccgcgtgctccggcgctacgtgtcatccgttgccgacgaggggatggactgcgtgctcgcggcggcatcccgcctccgttttggtcatccgtcggatgctgcccacgcccgcaaaccacccccacccacgctcagggaaagggggtctgggttgcgacaggcgaaaggcacgcgccgctgctgccgcgcgagcctctccgtccccatcgccgcacagatggatccgtcgtcgaagcctgtgtacatgccggtcgagccgtacgactctgggttcctcaaggtctctgatgtccacaccatcttcttcgagcagtccgagaacccgcagggccat

SEQ ID NO: 32595 - DNA, 887 bp, Zea mays
  Peptide Sequence Number=SeqID_75970
gagcaggagcaggacaggaccaggaagatcattatcaggagaagctaggcggggatatggcgaacgctggcggcggggcggccggggaaggggagtggctcaaggtcgcccagctcagggccctcgtccaggaggaccaccgcgccaagtcgtcgtcagtgctcgacgttcaatgtgaagtcgggagtctcagcattcgtggcctgcgacgtcccaacaaccacgaggtggacaacctgacgctgcgtcggttcctgcgcgcgcgcggccacaacgtggacaaggcggccgccatgctgctcaagttcctcaggtggcgggcggaggcggcgcccggcggcggcaccgtgcgggaggagcaggtgcgcggggagctggagcaggacaagatctacatgggcggcgtcgacaggaccggccgccccatcatcgtcggcttgctcgccaagcactactccgccaaccgcgacatggcggagttcaagagttttgtggtctacttcttcgacaagatctgtgccaggatccccagagggcaggagaagttcctcgccatcatggatctcaagggctggggctacgcaaactgcgacgtccgggcctacatcgcggccattgagatcatgcagaactactacccggagcggctgggcaaggcgctgatgatcaacgtgccctacatcttcctcaaggtgtggaagacgatgatctaccccttcatcgacgccaacaccagggacaagttcgtgttcgtggatgacaagagcctgcgggagacgctgcggcgggagatcgacgagagccagctcccggagttccttggcgggaagatgcctctcgtctccctcaaggactacgcccagcagcctcagcccgtttgcgagtga

SEQ ID NO: 32596 - DNA, 318 bp, Zea mays
  Peptide Sequence Number=SeqID_75971
atggcgcctcccgttgacgtggccgacccgcgccctaggttgggcgatgcgaaggctcctccgaggttgaggtctagtccgtcttccgtggccgaggtcgagtccgagcccctaggtcgggcgaggcggaggccgttggctgaggccagggcggagttcgagtcctggggtcgggcgaagcggagttcgtcgtcttctggggttgagcccaagtccgagccctgggtcgggcggagcggaattcgtcgtcttctggggctgagcccaagtccgagccctgggtcgggcggagcggaattcgtcgtcttctggggctga

SEQ ID NO: 32597 - DNA, 180 bp, Zea mays
  Peptide Sequence Number=SeqID_75972
aggggtgcatgcagaagcactccccatgattgtttagagcagaacactacttgggacttggtagctgacattgagaagctcagggagcatcttggcatcattcaagcaattatcttctttttcaacaacactgattactcactcttcagtgctggaactcaatgcttccagccaatgtag

SEQ ID NO: 32598 - DNA, 696 bp, Zea mays
  Peptide Sequence Number=SeqID_75973
atgtcgccgcgcacgaggagaactgcgcgcaagcatactggcccaattggtgtgccatgtcatcaacttgccccaagacacgaggatagcagtagtgggagtaatgatccgatcagggatcttgaagcgcaggttaaccggtttcaagcggaactccgccgccggactgacatatgggtcgcggatggtgacagaatcaatgaattgagaagcgacatccgccgcctgcgagatcagctcgcggatcaagatttagcgctcgactgggtggttcaatctcgttcgcttgcctgggctaaggaggcaaaagctcgagcccgagtagaagagcttagctcagccattgataacctgcaggcttattgcaatactctacatgaagaagttcatatgccttcccggactcgtgctcaggatggggctagtacctcccgtgggagggaggcaacaccaaacccacctccagtccctcccacacttgccgaggctatcgccgccttggtaaacgcgacagcagataatacccgtttcctacgggagatggtgggtcaacaactccaacaacaaggcgggcggggctatccacaaggcccccgtgagacatcttatttggacttctccgaaatgcgcccaccgttgttcgtcaaggcagaagaccctttagaggcgaacgaatggatccgcgtcattgagtag

SEQ ID NO: 32599 - DNA, 405 bp, Zea mays
  Peptide Sequence Number=SeqID_75974
atggcataccatctgtaccaatacagggaaagagataaagacaatgatgggaagctcaatttccaagagttcttcaacggattattttactcaattcgacactatgatgatgaaggcttaacagatgacaccggtggctctgatgcaccagctaaaaagtcattttcacaccttgatctggataatgatgggctcttatcagcagatgagctaaagcctgtaattggtaatctccatccatcagaatacttctatgccaagcaacaagccgactatgtaatatctcaggctgacacgaacaaagatggacaattgagcatgaatgagatgatcgagaacccctatgtcttttacaatgctttattcacagaagatgattatggctttcatgacgagctccgttag

SEQ ID NO: 32600 - DNA, 408 bp, Zea mays
  Peptide Sequence Number=SeqID_75975
atggggaggcggcggagggacatgcccgactgctgcagcgacgacggcttcttctttgtttattgggtttgctggctcaacttgatatcttggacgagcggaggtagccgagttttaaaggaaatcctgcgaagatctcggccagagcgacgaccaagaactccatcagatccggtggcagctttgctctggtttgttacgcgggtgggagaagaaatagctgacgcccgggacccattcgacagcgagggaaggagggagcacggctgcgcggagcgtctggccaggtggggcccacctgcagtggcccgagcgtgcaacgcggaggaaaaaaagaaacggctggcgcgcggaatagaaatgggccgaggggagtccggcggggttgaggtagtgggccgcaattag

SEQ ID NO: 32601 - DNA, 219 bp, Zea mays
  Peptide Sequence Number=SeqID_75976
atgggtggggccgccaaaccgcagcgcgccatggccggtcccctccacgttatcagcaccagtagtttagggcacaacttcggggagtcattgctctccggcgtggccgccgtcgtgtctggtgtgcacgccgtcgaggcttggagcaagggggaagaagaaagtactcgcaccattggatctctgaccgatggaggagatttgatcccaaggtgctaa

SEQ ID NO: 32602 - DNA, 525 bp, Zea mays
  Peptide Sequence Number=SeqID_75977
atggcacgcaggccgtcgcgggtttcggaatcatgccgccatgattggcgcgaagggccacgcctcaagtctgaagacgaggccagaaaccatgcgcccgtgtcgctcaccaactcagaagctaacaagacgcgcagaggtaacaacaacagggtagttatgcggcggcagttgaagtgcgtcggcctgctgctcctgctgagcctcctgctgcccgcgctcagccccgtcgtcgtcgtcgccaccgcgcgcagagagctgctgccgctaatggccaccggcgacgaagggcggccgcaagacgtgagcagctcaggaacttggatgccaccgggagccgcggaggaggcggtcgtcaggaggaaggacgaggcgatgaagacgaacggccgtcgttttagaagaaccagcagctggaactggaagaagatgcctgccgctgcctcgcaggttagcttcggtggccggatacccttcaccgccgactaccactccgtccacaggcacccgcccacgcacaactag

SEQ ID NO: 32603 - DNA, 327 bp, Zea mays
  Peptide Sequence Number=SeqID_75978
atgtcatcttacaccaatgagaaggaacctcttcgtgttgcactatattctaatcttcggaatctcattcagaaccttatgagcggcagtgaaactatcgagcaacttattcacacgctaatcaatgataacttggatcttggttgtgccatcattgaggttgtggcaacacgtcaggcaaggatcatcaagtttgacgtcggcaacgtggtcatggtgactggcgggaggaacaccgggcgtgtaggagtcatcaagaacagggagaagcacaaggacagctttgagaccatccacgtgctgcttggagctttttgctatgtctag

SEQ ID NO: 32604 - DNA, 261 bp, Zea mays
  Peptide Sequence Number=SeqID_75979
atggatgagctattcaacaatattaagtctaccgagattaaccaccagacccgggtcaagatcgagaaccctggtgcacccactacgaccctggagcaggtggagagccatggggatgaggagctagcgcttgtggctagttggttcacgcggttccataacaaccacctgaatctatggtgtggtaggtccaaggacggatgcttcaactacggtgaccccaaccacttcattgctagctgccccaagaagggcaagtag

SEQ ID NO: 32605 - DNA, 465 bp, Zea mays
  Peptide Sequence Number=SeqID_75980
atggatgttttgatgattaggtaccttggagaggaccagcaaggacttaggaaaggccaaggtgttgaggaggagcagcaagggcggccacaacaggaaggagatcaagtccgactcgactgcgactccatctcggggataagccttcgtggcgaggtcattcgtgtcacgggtgataaccaacggagtcgtggtgtagtgattgcgaggaaccgtttgctcggagttttggatcatcaacgccgagatctccactcaatcaagttatcgtatctcacggaagatcggaccgcgtcttctatcatggagtgtaatttttatgaaaagaggatggaagctgaagagaacatggatccgtcagcaactctccctgtgacgagaccttacactgatgactacatgttcaggcaaaatggccccaacatatacgtacagcttgcgtacccatttatatatcgtcactag

SEQ ID NO: 32606 - DNA, 435 bp, Zea mays
  Peptide Sequence Number=SeqID_75981
atggacgagagttgcactcaactcctctcaagtgatccaatgatcaacttgaataccacgaaatggcccaaggcacatttccctttcaatcacgacttcgacaagttggcctcttcttcgagtgatgaggagcttgagaggcgctttgaggaaaagctcaatggactctgcttcatcgccgatactgcaggaggcctttacaccatggcccttggtgatgatgcggtgggcggcgatggcaagtacattggtgacgactctgcttctgaggtatcacattccaatgatgatcttgtcactgaggtagaagagttgaacgctgctttggaaaatcaagacatgttgcttaagcttgctgctcgtgagaggaaagagtttaaattcaagtatgagagcacacttgtgaacttgagtctgctagagcttcagttgtga

SEQ ID NO: 32607 - DNA, 462 bp, Zea mays
  Peptide Sequence Number=SeqID_75982
atggagcgaccacccgggaaaacagtgctaccacaagggtggtatgggacgctgtgggggacagatatcccccggtacctccaccctcaaaggagaacagaaagaagctcgccacaaagacagttccattctaccccggcgtcctcttcatcggaggaagagtggaatcaactcccatctccgacgatgaaccaaccgtgccaggagaagaacctcttcagcgggaatctagccgacgaaggaaccgacgtcgaaatattcggcgacatcacgaagccggagagcgagacccgacgcaacccttgtctcgagatgaggtctcagagatgggagagactccagaagaacgggtcttcagggaaaggaggaattcccgatgacgtgatcgtcggcaagctcaagagcaggctgagcaggaagcaagacaacgccgagagaaccctcttttcggatgaaacctga

SEQ ID NO: 32608 - DNA, 693 bp, Zea mays
  Peptide Sequence Number=SeqID_75983
atgtccaattatgtaatcgttgtgtacatggcccgtatcaggtgcactgcacgtaagtctgtgatctcctttttgccttctcgcctggtggggcatccactacatcgcatgatggcaggtcagtccagtcacgtggagagactgcatcgtcacctgcacgaggagcaggagctccgccaccagaagcaagagcaggaccaggagctgcaggactcttccccctcgcctcagcaggcggtggagtctgagaggccgccttcccctgcacctcagccagagatgccccctgcaccaccacagggcatcccagctgctggaggagaccctgatggagacggagacagagacgacgatgacgccggtggcagttcgagccatggcacggagctctcggaggatccagagccggggagatggattgctagacccatcactcgtgatgccgctcgcaggtgtcacttccacgatgctctcgacaccctgttgcgtcgggcattcgaccgacacacttggtccatcgagtaccattgtgtagtctaccaacatcttcgcgggttatacctggaccagtgggaggctacttgcttggtgcgccgtccggacgatgatctccggggtgcagaggccttcttagagcactattctattactgagagggatactgccaaggcagccatgctagatgcagcatga

SEQ ID NO: 32609 - DNA, 264 bp, Zea mays
  Peptide Sequence Number=SeqID_75984
atggtacagtgctctgttgaagatcagaccgccagcgtcaaaaatctcaccgccgatgacctcttcgccgggattcgtgccgcgggcgtgtggaaaaacgaagaagagagtgaggtgactgaagagaagacaccaccacctttggaatctcaggcagagacttggctctacttcgacaactgcgagtccgagcctgactcacctactaacgaaggcgtgctgaccgaggaccctttaactggtcacatgcctcgtcatgggtaa

SEQ ID NO: 32610 - DNA, 270 bp, Zea mays
  Peptide Sequence Number=SeqID_75985
atgaacgtatctgagctcactcttgctgtctcacacccaacaggtcaagagcaggtatcgcctatcagaggagtcagaaggttcggagtcaagggcaagctagcaccccgatatgttgttgaagaaatgtctgcgtgtgccagaggagcagttgccagtggaaggtctggaagtccaagaagacttgacctacatagagaagccaacgtagattctggagactgcagacagggtcacctggaggaacactatcagaatgtgcaaagttag

SEQ ID NO: 32611 - DNA, 870 bp, Zea mays
  Peptide Sequence Number=SeqID_75986
atgacttcccacggatcctcagacgacgggaatgcactgtcccacactgacgggcttgcacgagagggctttccccgcattttgtgggaggtacttcagggggccggatacacgacacctcctcagtacgcggtgcagcagttcgagaagcaccgagtgccccattgtagggtgaggatgaccttggagcctcatcccctgcagccaggctggcgttcgctggactctgagtcctttggataccgggctgaggacacgatcgaggcgattgctctgcacgggttgaccacgttctgcggattccatcccttggagctgtccacccatcccattggcttgttccccatggagaaggaggatgacccaatgtggaaggatcgagtggagcatgccaaggacatctgggctatctacctgggccagactgctcacttgacagtgcggtgcatgaatgcactgtaccgtctgcaagtgatgcatggtgaggcaatgtcccatttgatggcactattggaagcaacaaagatcaccctggacaacagagaggagcttgtagttgatttgtccactaagatggtggaaaaggacttgcaggtggagcagctgtcaaatgagatccatgagctggaagaattagtggggaccagggagaacaccatcgaggttctcgaggatcagcttatcaacacccagcagcagcttgccgaggctaatgagcacctggatatgcatcaccaggagatccaggatatggaggccaacgaggacgtcgacattgagggaggagaggagcctgcctccagcttggacactgctggctcagggagaccaccttcccccgagtcgagtgttgcctcgttcgctcactag

SEQ ID NO: 32612 - DNA, 435 bp, Zea mays
  Peptide Sequence Number=SeqID_75987
atgggcaagagcaagaaaggcggaagctcctcgcaccattctggcgacaagcggaagcgcgagctgactcctccctcggaggacttcggcgattccgagtactcagaggaggagttctcctccgagtccgaggggtcgtcggtccacgcctctcccccggcgtcgtctgacgattcagacgattcccaggggattgctgcagaggtgtggacatacatccgggcccttgagcgcgctgggctcgagggctcggatgagtcggaggtctcctcggacgaggggaactcctctgactcgtccgaggaggggagcgacggtgacgacagcggcgagggcgacggcgacgacgggggcgacggcgatggcgatggagacggcagcaagggcgacggcaagggcgtaggcggcagcggcagcggcaaggccagtggctag

SEQ ID NO: 32613 - DNA, 210 bp, Zea mays
  Peptide Sequence Number=SeqID_75988
atggaggaaagggcggtgaggcttaccggcggcgatctagctccggtgaagtgtccacggaggtcagggaggtcacggcggtcacgtcgatggttggctcgtcgctggcggtggtcggagtcggtcggacctcgtgtgcaggcgggggagctcgtcggcggcaaggagctctacatggctctggggaagctagccgaggcactggattga

SEQ ID NO: 32614 - DNA, 270 bp, Zea mays
  Peptide Sequence Number=SeqID_75989
atggggaagcctgtcccgtcactcctcatgctcctcctctgccgaggtttggggtttttgcctaagaaaaagggattaagacttggatggccacttaaatgttttagtaggcactcaaggggttttgctggtttggttaggaactccacctcgagtgatattaagattgctcgcatctttttcttgttcgttcttcgattgcgcacaggatatgatcttcgtgatcaggccgatctcgcatcagcaaggagcttgttgacaccattttga

SEQ ID NO: 32615 - DNA, 456 bp, Zea mays
  Peptide Sequence Number=SeqID_75990
ccaataaaaagatcaagttttggattcaacaaaggagcaaagaggcaaccgaaggccctctggtctgggagcaccggactgtccggtgtacaccggacagtgtccggtgcgccaccggacagtgtccggtgcaccagaggactccaactcgaactcgccaccttcgggaatttctcaggctggcgcgctataattcaccggactgtccggtgtacaccggacagtgtccggtgcgccaaggaagaacggcctcaggaactcgccagcttcgggaatctccaacggctagtccgctataattcaccggacatgtccggtgtgcaccggactgtccggtgcaactccggagcaacggctattcggcgccaacggctacctgcggcgcaattaatgcgcgctctgcgcgcgcagaagtcaggcgcgcccatactgggcgcaccggacaaggaacagtag

SEQ ID NO: 32616 - DNA, 1002 bp, Zea mays
  Peptide Sequence Number=SeqID_75991
atgaagactctaacgaccttctgtggctaccatcccctagaggtggtgatgcaccccttgggactcttccctgctgagaagaaggatgaccccatgtggtgcaaccatgtgagccatgtgaaggacgtctgggcgatgtatcccaacttggttgggagggtcactattcagggtatgagtgcgttgtaccgccttcaggctcagcagagcgacgctatggcacatcttgctaacctcgctcaaaccaccaagctccccctcgacagccgagaagactttgtggtcgacttgtcctccgagttggtggagaaggacctgcgggtggaaaggctgagccagtgcatcaccacctgggagcagcaggtggagatccgagacaacactattaatgtcttggagaacaagctccatgatgtgcagcgggaacttgaagaagctaatgaccaccttgacatgcatcacctggagatagaggccaatgaggccggaagcgagggagaagaggctcctgaggagttaggaccagcccctggaaccaatgtggctgcctccgcgatgcccccttcacccgcatctagtgtcgcttccaccgctcaggaggatccgttagatgccgacgtgtggctacccgtcatggaatccaagtttcccctcctcacgggagactgccctgatgataccaagactcgcttcgccataggacaccatatcccagctggaattcttgatcgcaagttgaatgaatttctggcactcaatcaaggaactcacacggtattgcacaccaagctgcgggaacatctcaacattgtctgggctgatagcttcaatgagttggtcaacctggccatctcccataaggactgtattgtagctcaccgggcagagaagaagagaaaggcaccaatggcagcaccatctgctcaggcccagaggttcaggattgtttctcacaaccagagtaggggatttcagcacagcagcaggcaggcagatgggtga

SEQ ID NO: 32617 - DNA, 378 bp, Zea mays
  Peptide Sequence Number=SeqID_75992
atggtacccgatgctcctcgtacagctgcaccgtgtacaaaggggcgtagggtaaccggcggagttaagcacttcccacaagatggaaggaaagccatcgtagaaaggctgagccagtgcattaccaccttggagcagcaggtagagatccgagacaacactattgatgtcttggagaaccagctccacgatgtgcagcgagaactcgaagaagctaatgacctggacatgcaccacttggagatggagaccaatgaggccggaagcgaggaagaagaggctcccaaggagttaggaccagcccctggtgccaacgagactacctccgcgatgccccgttcacccgcatccagtgtcgcttccaccgctcagggttga

SEQ ID NO: 32618 - DNA, 105 bp, Zea mays
  Peptide Sequence Number=SeqID_75993
atggcgggcggaaaagagctcgccggagctaaggaggggcgtctggccggcaatggtgagcacgaggtgaggcttgcaggttttgctgactggatcaagagatag

SEQ ID NO: 32619 - DNA, 276 bp, Zea mays
  Peptide Sequence Number=SeqID_75994
atgagctcttccacccccgtgcgtggccagagcgactccgaccacctccaaccgctatccgaccatcgacgggttcgccaggacctccccgacctccgagaccccttcgctggagctagaccaccgctgaggcacaacaagaagaagctcgggaaccagctcccgaactcgtcgccgaagaacctcccgctgcacccgcatttgaaggcaagccccggaggagatgctggcaacattgaggactttgaggagtttcaggactatgacgagttctag

SEQ ID NO: 32620 - DNA, 183 bp, Zea mays
  Peptide Sequence Number=SeqID_75995
atgtccttgcaggccatagagctgctgtgtggcaaagcgagtctttgcaacgtcagggcaagctcccgtgagaagtggaaacttagactccacaaccctgagccacatattggcatccagcgggtcttccgccttggtgaacagtggtggctgggtgctcaagaactcctgggttccaagtag

SEQ ID NO: 32621 - DNA, 513 bp, Zea mays
  Peptide Sequence Number=SeqID_75996
atggcgctccctgttgacatggcgggcccgcgcccgaggccgggcgacgtgggggctcctccgaagctggggtcgagtctgtcttccgttgccgaggccgagcccgagcccctgggtcgggcgaggcggaggtcgttcggcggaggccagggcggagtccgagccctggggtcgggcgaagcggagttcgtcgtcttccgggtcttagcccgagtccgagccctggtcggagtggcgcaggcggcgctgtccttctgtcagactggtcagtggagcggtgaagtaacggcggtcacttcggctctgccgggggggcgcgcgtcaggacaaaggtgtcaggccacctttgcgttaaatgctcctgcgactcggtcggtcggcgcggcgattcagtcagggttgcttcttagcgaaggcaaggcctcgggcgagccggagatgtgtccaccgttaaaggggggcctcgggcgagacggaaatccctcggggtcggctgcccttgcccgaggctag

SEQ ID NO: 32622 - DNA, 381 bp, Zea mays
  Peptide Sequence Number=SeqID_75997
atggcggcggaactccccctccctcgccgtgatgcgatgatgagctggggttcaggaggagctgggtccgcaggttcgtgcggcgggtacgggaaggccgttgcagtgggagttcggctgaagcgcccgcaaggatacgttggcgaaaagctcggcaaggagctgttacgggtggggagcgatgaagtcggcgcgtgggagaagatctacaggaccccgggtccatctattagtggcgccatggggagtccacactgcagcggggcccgatcgtcagcccgagtccgcgatataattgtggacattactccacaactcatcacacccaatcaaagatccaaatcagacaagtatcataagaacaagcaatcaagtgtatag

SEQ ID NO: 32623 - DNA, 483 bp, Zea mays
  Peptide Sequence Number=SeqID_75998
atgcagggttcttgcctaaccgccatcgcagcaaaatcaaccaaggacctccctacactgaccactcccctactgcccttgcccctttcggcaatagcaaactacccaagtgattcaggggtaaacaagtcctcggacagcgcgcgtcaatacacagaaaaccagggggctagcgcaaaaagtacccaagactcgtcacctacccgcggtggacggcgggtttattataacaaaaccgaggggctctttagaaagaaagccagggcgaagaggtatcgtccaatcatagccattggatcaattcctacgcctaggattaaatctaaaccccccgtgaacaggaaagcatctgtagccgcacagatcaagatcaacgacccagactacatcacaacgagatcgagttcgagccgcccgctcaccgatcgatggcctggatttcatctggccaaaccagtacggagacgcaatcctgagcgttga

SEQ ID NO: 32624 - DNA, 540 bp, Zea mays
  Peptide Sequence Number=SeqID_75999
atggcggcggaactccccctccctcgccgtgatgcgatgatgagctggggtaagcgctgggtttatatagtatggggcacgagggcaggaaaagtccgatcccgagaatcccgccaggttcgtggtcgagacggtgctatccacgacgagggcaattccgcggcagaggaggagcgcggggaagaaattgccgtcacaccgaaggcaccgagtgcccaagtaggagcgcgcgcagacaccacctgttggcgagccccaagttcttctctggtgacaccggaaggagcaagaggaggaaagcgagggtggcggcgttcggataactcgcaatgggagaaggaggtaagagcagaggaggatgtcgcgcctatgattcttatggggaggttcaggaggagctgggtccacaggttcgtgcggcgggtacgggaaggccgttgcagtgggagttcggctgaagcgcccgcgaggatacggttggcgaaaagctcggcaaggagctgttacgggtggggagcgatgaagtcgggtttactttaa

SEQ ID NO: 32625 - DNA, 609 bp, Zea mays
  Peptide Sequence Number=SeqID_76000
atgtcttctgaagatttctctaattgtttggcttacacacacctgaaggccgggtgtaaacatctgaaggttttcaccgaccttgactttagagtttttgctgaccacgtccgaagatcaatcatcgaagctttggagtggtctaagaaattcttgtgtgatatatggaagaagggcgggaaggaaaatagtatcgaagaatctataaagaaggaaaaagctgctgaaaaggctctagatattagacagaaattgcaaggcaaaaaagtcgaagaagtctctacttcacaggtgatcattgatgtaaagcataccgaagccgaagctagggttgctgctattgaagccgaagaagtagctgacagggctgcaaagcaagccacatatgatgttgttctcaaaatttgtgagcaaatctatgacgaagtgatgaaccttggagaggaccatcaaggacttgggaaatgcaaagaagtcaaggaggagaagctaggacgttcacaacaagagaaagccaagtctgactcaacttcgtctccacctcgtattccaagaccagtctgcactaaaatggacgtccaggatgcatcagaactccaattgggttga

SEQ ID NO: 32626 - DNA, 483 bp, Zea mays
  Peptide Sequence Number=SeqID_76001
atgactcactggattgctcggtccacgcacgcaagcgggcgaccgaagtcctgtgaggacgatcttgggtctccggtgaagttctaccgggttcgagcgcttggaaagcttcacgtgccgccggcgaagctaaccaaagggcaggcgcgacttggaagcgactggagtgggctggccacggtggccaaggcttgggcagtgatggcgggcgaaagagagctcgccagagctaaggaggggcgtctggccagcaagaccgaagttaaggatgataaggccgaagagccaaaggtggaaaaaacagtgaaaatgccaaaaattatgagccctccagcagaggcgaacctgtcgaaggtgcaaaaggctcctgccgcaactcctaagaggaggaggatggccaacgttctggatgctgtgttggagactacaaaggccttgagcctcgcttctactatgaaaattgctaaagctaccaaagtctaa

SEQ ID NO: 32627 - DNA, 822 bp, Zea mays
  Peptide Sequence Number=SeqID_76002
atgagcgcaatctcgaagacggttggtggtggagatgaacaggggaaaacggagcccagagctatcatttatagccacgacaagctcgtaggagaggcggccttaatggactccgagaagcgtggcacagccgggatctcccgagtcgcacggcgaaggaaagggaagggtctgatgaggcaggcccgcgtggcggacgacaccactaaagccgcaacactaaaagatttgacaaccttctgtggataccacccactggagatgttgatgcacccacttggactcttccccgctgagaagagggatgacccaatgttgtgtaacagagtgagccacgtgaaggatgtgtgggccatgcatcccaaccaggttgggagaatcaccgtgcagtgcatgagtgcactgtaccgcctgcaggccttgcaaagtgacgccatgacacacctcactgggctcgctcaaatagcaaaggtcaccctcgacgatagggaggacttcatggtcgacctgtcttcgcaattggtggagaaggatctacaggtggaacagatgagcaaccacatccaagcattggagcagcaggtggaaatcctagacaacaccattgaggtcctagaaaaccagctccatgatgtgcaagaggagcttgcggaggccaacactcaccaagaaatgcatcaccaagaaatgaatgctaatgaggcaggccgtgaggaagaggaggatcccgaggaaatagagccagcttccggtccgaacacggcctactccggagtgccccctacacctgtggccagtgttgcctctaccaatcagggttag

SEQ ID NO: 32628 - DNA, 386 bp, Zea mays
  Peptide Sequence Number=SeqID_76003
agacaaccgatcaagccaaggatggaggcaagaagagctttgaggtaccgagtgcacgggagaaggtcaaggagaccaggaacccaaagccaatggtgaagaagaagacttgcaaagtcaaggttgatcgagttaagagttatgagtccaacttcgacctcaaacatgccaaattgagtaaaacgatgaaaaaggttaaccacggcatcgttgtaactgacatcaacatagtggaaggctctatctgtcacagtgacaaatctgagcaaacagaggaaggagttgaaatagactccaagccaagggtatttaaagactggaacttctattccgctgcaacctactcaaagggtctttcattccactgcgatccagccttcgagtag

SEQ ID NO: 32629 - DNA, 1434 bp, Zea mays
  Peptide Sequence Number=SeqID_76004
atgtcgtcttcttcctcatctgctgcaaacatgccaacgtccgaggataccttgagcaatgtggcggcgacggagctatatccgggtgatacggtggagttcagcgtttcgaggatttcctcggtccgcgtgcaggatatgcagcagctaggatattttggcagcagagttgggcgtattccgggggcggaggaggttcccgagcccgagggcgagttgattgtccaccagctgacacctaacgtcgtggtggccctggcgaagtatgtctgggcggcgacttcgtatggcgaggatgatgaggatgaaggggcccttcggagcgctgcccgcatgagtagtgggtgtgatttagttgaggaattcattgggtatgggcgagtgcgaagtccagccttcgcgttggatctgcaaggccgagatcctgccgcattcgtgcgtgaagcggaggatggagctgtgcgtattgtggggcgttatgtgcctcggatggaggcccagcggatttgggatatccgcagatccaacgctcgcctgaatagggtcttcgagctgaatcgcttgttgtatggtggctatcccggggatgacgctgtcgaccgccacgggaagaggccaatggccgtggctgaggaagacccttcgcaggaggccgccccagccactaagaagagaaaactagccgtcgagggaaggatgtcttcgcccaagctccgggagtcttcggcgcggatactggaggttagcgggggtcgatggcccaagaatgttccgatcccccgtgcggctggcgaagacttctttacttctcgcatggctcgtgacttgaaggtttttccttacggacggaatattgctgctgttgtgtcggcagtgatggagaaggaccatcaagacgctgcgcagaaacgccgggtggtcgtccggatcgtggatcctatgcgcgaggcgaacaaggcattggtgagtgcgaaggctgccgcctctggcgggagcaagccacccctgggcggacccgcgaaaggacgagtgttgccttcgccggcgcgacgagttgccgacttcggcacaaacatcagtgtcgaggattattttgttgggttgggtgaggggcaattggttgttgtcccgcctccggtggcaaccacgtcgccaacggtggtggttggggcgaagggtgtcgcgcgggacccgtgggccgctttctgcgcaagcggcgagattctgtcggccgctgccgctaaggacgtggcgggctccatgtcccagcggctgagggaagcgtcgcagcagctgccactgcagctgaagcgacatgcggatgctgtccgggagaagtcggctgcggaaagcaaaaaccacaggctggcggagaaagtggccaccatggaggccgagaagacggacctccggcgccactggcggaagagatga

SEQ ID NO: 32630 - DNA, 918 bp, Zea mays
  Peptide Sequence Number=SeqID_76005
atggggatttcgacgaggttcggccgggtggagagcaaggctcgactacggacggcgagtgcgtggctccgggctcggcaatggccgctgcgcagggcggtgcgcgcctgggtgctcgggcacgcggctgggaacgcgcgcatcgcacggctgcccggcagcggcttggcgggcccgcagccagggtcgctggtcggctgctcgcgctcggccgcggcgctcgggacggacgcggggctggctcggtcctgtgcgcgcgtgaaggcagagaaccgtctcctcagacgacgcgtcggccggcggcataacgacagcagaagaagaagaggtcggcatcgctacgtaccgtcggcggcggcgggcggtctgcttcacacgggccagatctccgacgaacaagagcaaggagggcagacgagcagcgagaggtttgagaaggcggttagggttttcgcggagcgtggaaagataaagttcaaaactcgccgccccccgtccccttttatacacagggcgcggcgcttcggaaaacccgcaaaccaacagtacggcgtcaatcaacggtcatgtcaaaaacccccgcggaactacttcgagcgagggcaacgtctccgccatctagcgacgtcttcggcaccagatgacttagtcgaactggtccctcggagggcaaatgttggggcgaaggcgaagacgccacccttcgctcatggccttcgccgtcctcgctgcaccaaagaagagaagacaacgggcagacttacccttcgtctcatgcgccaccggacgaagacctgtgacgaggccgtctcatcttgcgacctcgtccagcatggaggcctgcgtgtgatccggcccattgacgctgggcactcagatacctatacatacccccgcacagtgcccttgagaggctag

SEQ ID NO: 32631 - DNA, 624 bp, Zea mays
  Peptide Sequence Number=SeqID_76006
atgcagtacaaggaatcaagcagtctcattagctgcgagaagcagacgattcgaatcgagtttttaaccttgcaaggcctcaccgccttggcatacaatgctccactgaccccggctgccgccgtgcataaccgcggcggaagaaagggcggaggggcttaccggtggcgagattgctccggtgaagtggtcgaggacgtaggggaggtctcggggatcacaacggtgtgcgggtcgccgtcggagagaggttcacaggatgccagagaagatatgggtgcaaggaattggtcggagactcactggatagctcagtccacgcgcggcggcggaagaccgaagtccggtgaggtagatctcgggcctccggtgaagtctggctgggtccgagggcttggcaagcttcacgggctactggcggagctagccgaagcactggctcgacttgaggatggctggagtgggctggccacgatggccgaagctctggcggcaatggcgggcggaattgagctcgccggagctaaggagagggggctggccggtgaggagatatggagccaggaaatccggtctgtctccctgcccaaacccgaggcaaatccaaggttttgtcgtgtctag

SEQ ID NO: 32632 - DNA, 78 bp, Zea mays
  Peptide Sequence Number=SeqID_76007
atgggaacaaatgggcatctcgacctcgacatgggaggatgtaaatttgacaagaagagcacatcagggactcgttag

SEQ ID NO: 32633 - DNA, 1059 bp, Zea mays
  Peptide Sequence Number=SeqID_76008
atggatcctggcacacatatgatggttcgcactctccaaactacccgcgtcaacaccagctacgcccctcagccccggcagatcccggtctacccagtggtagtcgaggaagttccagcggatctccctcctgtccgagtggagaacgtaatcaacctggaggatagctcggaggagcagttgccgacccccactccgttggccgagtccctggccttcgcagctgggtcatcgacgtccgcatcgtctgcaccagccttccaagcacctgcacctggaggcgacgaccccgacgactccagagacggcgatgacgaggatgacgacgacgaagacgattttgaaggcgaacatatcaacgaggaagctgactacgcccagcaggacaacttcatggggtttggtcctgttgtcgaacattacacatcaatgttcgagacggggcacttccccaacctgctgcaagaggtgctgcacgcgctaggcacctacgtccaccccctgtacgagacgaggcaagtgagcgagcctccccgggcttgctattacatcactcgcatccacttcagggtgatggatgcagtcctagatgcaggtgacaggggattcaggactctatctgctcacgagtccctgataccactgtccacctatgttgcctcggtcagcgatgctgcccgtcggaccctgtggtcgctcagccacacctaccggcagcagctgcagaacacgaggttcatgcatctttctcagcgtctgcgtggagaaagccagaccaacatcgtcccaggagaagccggtgaggatcgcctcaacaccctagctggtgtagtggccggtctcaacaccgacctagacagtgccaccctagatctctacagggtgcacttggagctagagaatgcccacgccaggattgcagccctggaagcccaactgcaaggactagatccgcccgaagctcaggtccccgccatggcgttgtctcctccccgcaagaggctgcgctatggagagcccggatccgtcactaggctgcttaagagttttgagtcatga

SEQ ID NO: 32634 - DNA, 525 bp, Zea mays
  Peptide Sequence Number=SeqID_76009
atgccttcccgtggtgggatgcaggtgcgaagtcccgccttcgcactggatttgcatagccgtgatcccgccgcattcgtgcgtgaggcggaggatggggcggtgcagattgttggtcggctgcctgaggcaaggccaaagaggttgcgggggactgcgaaggctgctgcccccggcggcagccagccgacgctggtggcgaagtcggccgcccctgggtccaccagggtgccggaggctgtgaaggcggccgccgccggcggaaccaagtctgccccggccggggccgcgaaggcccgagaattgcctccgcccggcaagcgcgttgccgacttcgccaccgatattagcgtggacgattatctcgttgggtcgggcgaggggcaacttgttgttgttccgcctgaggtggcgaccgcggcggctgccgtggtgcctagggcgaggggtagcgctctctgtgacaccccagtgtcacctagggtttctctcaaataccaacccaagaaccattatttcatgtga

SEQ ID NO: 32635 - DNA, 177 bp, Zea mays
  Peptide Sequence Number=SeqID_76010
atggcgggcggaattgagctcgccggagctaaggagagggggctgggcccggtgaggagatatggagccaggaaatctggtctgtctccctgcccaaacccgaggcaaatccaaggttttgtcgtgtctagggctcgcgtcccaatgccatcttctggcacacgacagaggggttag

SEQ ID NO: 32636 - DNA, 384 bp, Zea mays
  Peptide Sequence Number=SeqID_76011
atggtgggtacaagtgcggtcactgcacggcggcagccggggtcagtggagcattgtaccattcaggaaatggttgatggtgtgacttggcctaccaccctgccatcgggttggacggtcgagtgggatgttgctccggcaggagaggagcacaaggagtacgccggtggtgagattccggcgctcactgccgtcaaggacgaggcgggtgctgtgtcccgccggctgaaggaggcattaagtcaggcggctgacttcgctgaccgcgtggcgtcggaggcccttatggcggttgtgtctgccaaagtcgagagacttcgggcgcaacatgctgacgccgtccgggaaaagtcggccgccgatagcaaaacgaatcaagcttga

SEQ ID NO: 32637 - DNA, 1248 bp, Zea mays
  Peptide Sequence Number=SeqID_76012
atgtcttcgcgctcccttatgcatcgtgtctttccaccttccgagcccccggatggggagcatccgcaatctttctgccttgtcgttggaggaacgcaacttcgtggaagttggtacctttcagccatcgttcggcttcaaggattttcatcacgcagcccggctgcatcccctcgccggtggtcacccaagacggtgaccaccaacccctgggtggggagaagcaagccgggctgcggcctctgcccctccctcagcttcaaggatgttcatcatccttgctggggcggagaacgaggcgagccggggctctacctcccgcacgggtcggctggccacctcctcttccagcttctggtggtggaaaccatcctccagctctgcggaggaggcgtcctccagccatgccaaggagggcgaactgttgctgcccagctaggatgcaacattccgtcctcctcctcgctttcgtggcaaggacgggagcgaggacctgccggtgcgctttggagcggcccgcgttcgccgcgccgcctacggaccggcctccagctctttggctttaatgtccggttcgtgtcccttgagcggggacgcgaacgagagccttctggtggctgcgtccgtcctgggaccatagctgctgctgcagaggtcgctgactcgcctgtcggctatctgaaccgcttcaccaagcgtgagtcgcctcgtgcaaaggtgacgagtgagttaaatgaacctcggccgctcttcgatgagccgaagcaggaggtagcggtgtcagcacgaacagaggcagagttggcccgaaaagaagatttggtcggccggagcctggccgggtcgtccactggcgggaccgacgccggagttgagttgccgaggccacgggccgggctgatgtccccgggggacagatggctgaggcttcggggtggccggccgagccgtctgctcgagccagattcctggagaagaccctggcggcgatgggccgggcatggtgctgatgtcgccattcggagtggagatcctccaaccgcgtcgccgtccaaggctaggtcagaccccgttgaaggtgtagacgacgccgagggtgctactgctcccttcgactgtcaaggtccgagcctgcaggatcggaaggtgatgagtgagaaggggttccccccttttagcccccgagggagggtcggggtttgccgaggcaaggctgacccttccttgatgactaaactttgcgtgtga

SEQ ID NO: 32638 - DNA, 510 bp, Zea mays
  Peptide Sequence Number=SeqID_76013
atgcaggtagcatgcaactgcgccaagtgggcgcacccctccgactccaacgcgtccagcatgaaggcccaggcccacacgtcatgcaaccggcgcgccggttgctacgtgcgcgcaactgcaccgccactcgcgccactaccacgcctcctcgactgcggaaccagtgccgcgactcgaggcaaccctgcgtatgacccaacagtgccagccaggcacgacggtcattacggccaaaaatgggccggcagtaatggcggtggcaggcgggcggaagcagcggtcacgtcgacaggcggcacctttggcaggagaagcgggcgacgcttcgccttcgccataatgaccgcatcaaaaaagggaccgggaaagggggataccccgaaagggatccttctctgcgaaggaaacgggccccgagcccccctactgatcagatgttcaaaggctggcccctcagaggggttcaacagccgcctcagagcgctcgggctccgcgcccactactag

SEQ ID NO: 32639 - DNA, 366 bp, Zea mays
  Peptide Sequence Number=SeqID_76014
atggcgccgctgagcatcccggctcacacgttcggcgccagaggccgcgtgcgccacaaggccgggctcccaaaaaacctcgtcggacgccgatggaaggcgtcccgggcatccaaaaatcgtcgacatcgggggaggatcggcgaggctgggagtttctgcgtgtgggggagggcatcggggatcgcggatcgccggacgggacagtgggcgagggttgcgtcgggtgggggcgcggattgcgggcgcggaggcgcggattgcgggtgcggaggcgcggtggggccggacgcggacgcgcggtgggaggaggcagaaccgtggtgcacggattgtgaacgtctacggtactgtcttatagagtag

SEQ ID NO: 32640 - DNA, 933 bp, Zea mays
  Peptide Sequence Number=SeqID_76015
atgctcagcggcgccatctcccgcctcggtgctcgcctccgcctccacgccgacccctctccgacctctcctcgcctccgcgtcctctccacccgccgcggtaaacgctcctcccccaccctgtcgcccgcggactgcgatgacgagggacccctgcgctgcctcttcgtgctatcccacgaccccgagtgcccaccgtggctgctggtggtgcagccgcgcctccgccccggaagcctcctcgagtccaagctcgccgaggcactcaacctcgccaactccctcgaggagcgccgcgacggcttctaccacagcgagttcggcaccaagggcgcgtcgccgcacctcgtctgggggcagctccggcggatctacaacgggcccgccccgctcgcggacctcgccgtcggcgccgaccacgtcgcggcctacgacgcctccgggaaggtggtcctatggtggcgcggcgggggccggttccccgcgcgggccgacggcgcgttccgctccctcgtctccggggacagcttctcctacgccgtccaggccaacgcgtccgccgccgtccgctgctggggtccgcagggtagcgccgtgcaggagggcctcgccaacgcgtccgctgccccgtacctcgccgcggggggcacccgcgcctgcgccgtgctcgcctccggcgccgcgctctgctcgggctcggacgcctccgccgacgcgctgccacgagacctcttcggctacggcctcgccgtcggcgactcccacgcgtgtgcgctccgccggcccggccacaccgcggtttgctggaccctcgggggacccaccaccaccctgtacgagccgaccatggggatctccttcggcttcctcgtcgccgacggcaacttcacctgcagcaactccagaaaaaggcgcattcagacctgtccttag

SEQ ID NO: 32641 - DNA, 264 bp, Zea mays
  Peptide Sequence Number=SeqID_76016
atgaaggtggaggaaatatcacagaccattgattccaagaacttcacagtgcaaaactgtatcaagttttcaggacctttggctacaacctcagtttccaccaatgcaaaatttgaaattagaagccccaagcgcgtgcaggtgcatgttcaatcagatcctgctggatgtctggttatcacaggggatccagagcagcctgataatccttgggggatcactccgttcaagaaggtggtggtcaacttgctgaaagtcgcctag

SEQ ID NO: 32642 - DNA, 501 bp, Zea mays
  Peptide Sequence Number=SeqID_76017
atggaagaggcagtagaatcggcgcggcggctgcgcacgccctcgacccctaccacgagttccatttccgcgaccctgggggggatattcctggcgacgaggggcgtcagtggcggggtgctggttggtgatgttgtgcacttgctgctgattgcggccgtctcgaccggagtctggctgcggagtcctcgtccacgtgcggctggactgtggagcatctttgggtttccgctgcgactcaaccttgcgctggtggagctcttcggatttggcatattttcaaagagctgctgcttgcagagtgagagcttggccaaggcgtcggtgtctgggcggtacccttggaagttgagcaggaacttatcccggaggcttctccaggaatcaatggacagcggaggcaacctagtgaaccaggtgagagctgggccctctagggcgatgatgaaagacttcgccattgtggcgtcgtcccctccggaagatgcaacggctacctga

SEQ ID NO: 32643 - DNA, 144 bp, Zea mays
  Peptide Sequence Number=SeqID_76018
atggaggtgcgcaccgtgcctcacatggccgacacggacaacgtgatggtctacgctgctgcctcccccgctctcgccgtaggccgcttcagccccattgctggtgtcgcagaaggtcccaaaacaatttcccaggcagattga

SEQ ID NO: 32644 - DNA, 1374 bp, Zea mays
  Peptide Sequence Number=SeqID_76019
atgtacctctccgatccccgcatgatgcaggtgctcagcctcatgcttaatgtcaagatccagagacccgaggcctccgagccatcgcagtctaccccaccgccgccgccgccgcagcagcagcagacatctcctcttcagacgaaagccagagaggtggagccggagcccgagccagagccgatggatttcactgatgaggaaaaggagcgcaaggagaggaaagctgctgctcagaaggagaaggagttaggtaacacagcttacaagaagaaggacttcgaggcggcgatccagcattacaccaaagccttggaacatgacgacgaggatatttcttatttgactaaccgggcagcagtttatattgaaatgggaaagtacgatgaatgcatcaaggactgtgataaggctgtggagaggggaagagaacttcgtgctgatttcaagatgatctcaagggcactgacaagaaaaggaacagctctagtcaagcttgctaagacctctaaggattttgatattgccatcgagacctaccagaaggctctaactgagcatcggaacccagacactcttaaaaagttgaatgaggctgagagagcgaaaaaagagttggagcaacaagagtactatgatccaaaattagcagatgaggagagagagaaaggcaacgagttcttcaaggagcaaaaatacccagaagcaataaaacactacacggaggctctcaagagaaacccaaaggatcctagggaggtggttgcacaagcttcggcgaacgtgccgcggaagacggagctgccgttgagcgctgccgcccctgtcgagaacccagcgccccctggcctccgctctccgtctggaggaggcaccaacatgcctagggttgtgctggccggctgtgaggtttacagcaatagggctgcctgctacaccaagttaggagccatgcctgaaggtcttaaagatgcagagaagtgtcttgaactagaccccaccttcactaaagggtacacaaggaaaggtgcaattcaattcttcatgaaagaatatgacaaggccatggaaacctatcaggctggcctgaagcatgacccgaaaaaccaggaactgcttgatggtgttaggaggtgcattgaacaaattaacaaggctaacagaggtgaaataagtcaggatgaattgcaagaaagacagaacaaagctatgcaagacccagagatccagaacattcttaccgaccctatcatgagacaggtgctaaatgatttccaggagaacccaagggcggcccaggagcacctgaagaaccctggagttatgcaaaagattcagaagcttgtaagtgctgggatagtccaaatgagatga

SEQ ID NO: 32645 - DNA, 936 bp, Zea mays
  Peptide Sequence Number=SeqID_76020
atgggctgtgggctccaacgggccagggccgaagatgctgccgtgctgggcagcatccgcgaactgcgcgctgtcctgtgcgacccgcagctgccgtgccggtgccgctgccacccgcccacccgggcggcttactgtttcctcgtggtgaacgtggggccggcagcgcccgccgtaccgggccggacaccagccaaaggacagggacacgagcttttccgccgtagcagcgtcaacgcgtgcagggcgctcgagcgggtggccctggactccccttttttagaggcaaggagagagtccaggagcacaactggcagcgcggcgaggaccctgctgacgtctccttgctatcgtaaggggctgagagccatcagcgtcaggtcgcacgcggggcacaatcattacccgtcaccggggccggggtcgggcgaggacgcgattcctcccgagaccggagtcgaggccgagcctaggggtcgggcgaggcggagacctcctcccgaggctggagcttactgccggtccacttttgaccatgccaaccgtcgtgcctgccccgcggctgatcgacccgtggccatcgccttaaattggcactgttgggtcatgcgcagggctcgtatgcagtgtgggtcccagcccccgtgtcgtggggggagaaccctggaggttgttagtggggacttcgcccgtgacactaagggggtgcaagcgaggagcgtcgccttgctcttgctatcgttggaggagcgtggcctcgtggagatcggtatctttcagctatcgttcggcttcaaggattttcgtcgtgcaacccggctgctttccctcaccaatgggcagtttggtggggagaagcgagccgggctgcggcctccgccccgccctcagcttcaaggatcttcgtcatccttgctgaggcagagggagagctga

SEQ ID NO: 32646 - DNA, 819 bp, Zea mays
  Peptide Sequence Number=SeqID_76021
atgacggggaaacttcggaccacgtcattgtcgcccaacgtgaacatgaaaattgaagcattctgttccgcagtgcatggctcagtcgtcagaactcagaacgtcggcggcgagagacggaacaactccagcctccagatcgaggagaagcacgcgcaggagcggcaggccggcagccgctttctatccccgccggtggccaatgcagtgctgccatgggcccatgcccatggcctcgaatcccttcctgtcctcggttcgcttgctgagcgctccaggcagccatggcgcgccggaccaaccacacctccacggcagcggcggcgacaacaacaatggtcgcctcctcgccgtctccccccgcggccgccgcctcccgccagcgcgggagcgtgggggccctacgccagctcccgcgccttcttctccaacgtagccaccatcctcatcatcctggcatgcgtctccctgctcgccttcaccctccacgccgccgcgcgcttcctcctccgctgcctcgcgcgccgccgcgccgcgcgggaggaggcgcaggcgccggggcagcagcccaagctcccctccggcgccgccgccgccagcgccgccgccggctcggagcgcgccggcgccaccggtgcgggcgtgtgggcggaggcggagtgcgccatctgcctgtccgagctgctggaaggcggcgagcgcgtccgcgtgctcccggcgtgcggccacgggttccacggcgcctgcgtggagggctggctcgcggcgcgagcgtcctgccccacctgccgcgcgccgtcgcgggcgggagagccgtag

SEQ ID NO: 32647 - DNA, 723 bp, Zea mays
  Peptide Sequence Number=SeqID_76022
atggcacccaacctcagccccgacggccccaagttcccctccaagccgagacgcggaggagaggccgacgacgtcgaggctgcggcgccggcggcggccgtccacagaccgccggtcggccgcgtcgactacctggcccgcgcgcagtggctgcgcgccgccgtcctgggcgccaacgacgggctggtctccgtggcgtcgctcatgatcggcgtgggcgccgtcaacgacggcgcgcgggagatgctggtgtccggcctggcggggctggtggccggcgcctgcagcatggccatcggcgagttcgtgtccgtgtacgcgcagtacgacatccaggtggcgcactcggagcgcggcgcccgcggcggcagcgacgacgacagcagcagcagcgacggcgagaggctgccgagcccgacgcaggccgcggccgcgtccgcgctggcgttcgcggtgggcgcggcggtgccgctgctgtcgggcggcttcgtgcggccctgggcggccagggtcgcggcggtctgcgcggccagcagcctgggcctggctgggttcggcgccgcgggcgcgtacctcggcggcgccagcgtcgtccgctccgggctccgcgtgctcctgggaggctggctggccatggcggcccacgttcacgatcctcagctcttttggcttggcgttcaagacgcacgtcgtgtccgcataacccatgttcgtatggtgtga

SEQ ID NO: 32648 - DNA, 1221 bp, Zea mays
  Peptide Sequence Number=SeqID_76023
atggcgagcctgtcggactcggcgggcgcgggcagcggcggcggcggcggcgcggagctgatggtgccgcagttcctactcaaggtgctgcacgccatcctcgccgcgcggtcgccgcgcccgcacgcgcccccgcccccgcccccggcagcgtcggcgttccggaggcgggaccggtggttccacctgccgctccacctgccgcccgcggcggagcacctgccggagccgtctcccgccgagccgctcgtggtggacgtgtacctggccccatcgggcggcggaccagaggaggtgctcgagaggtggaccgtggcgtgcgagccctggccctcgcccgccgccgcgggggaggggctggcggtcaaccgcgcgtacaagcgctgcatcacgctgctcaggtcactctacgccatgctccgcttcctgcccgcgtaccgcgcctttcgcgcgctctgcgcgtctggccaggtgtacaactacgagatgggccaccgcgtcggctccttctcgacgcccttctcccgcgccgaggaggcgaccatgcgcaccgaacgcctcgcccccgtcgagacccagctcggccgcctcgtcgtctccgtccagtacctccccagcctcgccgccttcagtttcaacgccacttccctcgcgtccgccgcgatcatcacggattacgtcggcagcccggcggcggagcctatgcgtgccttcccagcttcgctcacggaggccgccggctcgccctctccgcagccctcgcggcgccccaacagctgggcgtcgccagcgccctggccgcacacgatgaggcaaccggccaaattctcgcctccgccggcccattacgcgtcgcccacgccctcgccgccgatgtttggctatctgcactcgcggtttagcggcgagactgcaccaatgagcataccgcaggcgggaggtggcaggggccctatgcaccagcaccatcagaacctgtcggaacccagtagggccttcatgtttcctccaccttcgccaaaatatctgcgaggggaggcagggaggcaggagtcacctacagagactaatcgatcgttcaagagggcagatggcatccgcatgggagatctctatgcaaacttgccgtctggttataagatgaaaacacagggttatgcagaagtatcatatctgaactacttcgtactacttagtaagaccttctatcagtttatatga

SEQ ID NO: 32649 - DNA, 444 bp, Zea mays
  Peptide Sequence Number=SeqID_76024
atgtcacttattcctctaaatttacaacagccccttctcgaggaagacgcctggaagagagagaagaaaaggggtgaattggggttcatccttgatggctttcctcgaaccatgagacaagcggagatacttgaaggagtcacaaatattgacttggtgatcaatctcaagctccgagaagaagttgtggttgcaagatgtcttggcagaaggatgtgcagccagtgtggaggaaacttcaatgtggcctccattgatattgagggagaaaatggtggagctccaatgcacctgcctccactattgcctccgccacagtgtgaatcgaagctaataaccagagcagatgatactgaagaagtggtaaagaaccggctacgtgtgtaccatgatctgactgaaccagtggagggattctacaaagcgcgtcaaaagctcttgtag

SEQ ID NO: 32650 - DNA, 717 bp, Zea mays
  Peptide Sequence Number=SeqID_76025
atggcgggggtctctcgcgcgatcagggcctgcgccgccacgtcccagcgcaccctggtcgctgcttcggcggtggcgctgccgaaggaggcgagggtgaaagcggcaacggtcgggcgcagggggcggggtccggaggacgggaggcgcgtgcagtgggcgttcctcgggtgccccggggtggggaagggcacctacgccagccgcctctcgcagctgctcggcgtcccacacattgccaccggcgacctcgtccgcgacgccctggcctcccctggccccttctcgaagaagcttgctgagattgtcaatcaaggaaaactggtgtctgatgagatcatcataaatctgctgtcaagacgcctggaagagggagaagaaaagggtgaattggggttcatccttgatggctttcctcgaaccatgagacaagcggagatacttgaaggagtcacaaatattgacttggtgatcaatctcaagcttcgagaagaagctctggttgcaagatgtcttggcagaaggatgtgcagccagtgtggagaaaacttcaatgtggcctccattgatattgagggagaaaatggtggagctccaatgtacctgcctccactattgcctccgccacagtgtgaatcgaagctaataaccagagcagatgatactgaagaagtggtaaagaaccggctacgtgtgtaccatgatctgatcagctag

SEQ ID NO: 32651 - DNA, 984 bp, Zea mays
  Peptide Sequence Number=SeqID_76026
atgcaggcggcatgcaaccgcgccaagtggacacgcttctccgactcccaacgcgccagcatggaggcccaagcccacgtgtcacgcaaccagcgcgccggatgctgcatgcaggcaactgcaccgccacttgcgccaccgtcgcgcctcttcggttgcggaaccaatgccgcaactcgaggcgacccagcacgacccagcgacgccagcctggcgcgacggtcaatgcggccaaaaggaccgggaaagggggataccccgaaagggatccttccctgtgaaggaaccgggctccgagccccccctactgatcagaggttcgaaggctggccctccgaggggttcaacagtcgcctcagatcgtgtgggccctacacccactactggtcagaggttcgaaggccggccccccgaagggttccacggccgcctcaggctactcgggctccgcgcccattactgatcaggggttcgaaggctggcccccgaagggttcacagtcgcctcaggcgccgagcgagggatgaccaggggtacgttcgatacataaccaaggctcgggctgcgctcccgagggctcggactcgggctaagccccggaagacggcgaactccgctccgcccgacccagggctcggactcgggctaagccccggaagacggcgaactccgctccgcccgacccagggcttggactcgggctcagccccagaagacgacgaactccgcttcgcccgaccccagggctcggactccgccctggcctctgccgaacgacctccgcctcgcccgacccaggggctcgggctcggcctcggcaacggaagacagactcgaccccagcttcggaggagcccccacgtcgcccggcctcgggcgcgggcccgccacgtcaacagggagcgccatcatcaccctaccccgagccgactcgggccgcagagaacaagaccggtgtcccatctggcttgctccgctagatag

SEQ ID NO: 32652 - DNA, 906 bp, Zea mays
  Peptide Sequence Number=SeqID_76027
atggcggggatctctcgcgcgatcagggcctgcgccgccacgtcccagcgcaccctggccgctgcttcggcggtgacgctgccgaaggaggcgggggtgaaaccggcaacggtcgggcgcagggggcggggtccggaggacgggaggcgcgtgcagtgggcgttcctcgggtgccccggggtggggaagggcacctacgccagccgcctctcgcagctgctcggcgtcccacacattgccaccggcgacctcgtccgcgacgccctggcctcccctggccccttctcgaaaaagcttgctgagattgtcaatcaaggaaaactggtgtccgatgagatcatcataaatctgctgtcaagacgcctggaagagggagaagaaaagggtgaattggggttcatccttgatggctttcctcgaaccatgagacaagcggagatacttgaaggagtcacaaatattgacttggtgatcaatctcaagcttcgagaagaagctctggttgcaagatgtcttggcagaaggatgtgcagccagtgtggagaaaacttcaatgtggcctccattgatattgagggagaaaatggtggagctccaatgtacctgcctccactattgcctccgccacagtgtgaatcgaagctaataaccagagcagatgatactgaagaagtggtaaagaaccggctacgtgtgtaccatgatctgatgtttggtgtggtgccatcatatatcttaccaagtgggttgtcctctttacagactgaaccagtggaaggattctacaaagcgcgtcaaaagcttttggagttcaatatacctggtggaatacccgaatcatggcgaaagttattggaagccttgaacatagaagactccgacaatatgagatctgcagtagcatga

SEQ ID NO: 32653 - DNA, 1434 bp, Zea mays
  Peptide Sequence Number=SeqID_76028
atggcgggcgatcccccgacggccgcggagaaggagaccctggtctcctctttcctcgagatcgccgctggccagacccctgagactgccactcagttcctcctgatgacgagctggcacctggaggaggcgctgcagctgttctacatcgacggcgagtccgccctcaccccggcgcatccggtggccccgccgcccacgtcggcggccgcgtcggcgttggcggcagcggccggggcggaagaggcgatgaggttcgctccacccccggcggctgcactgggcgatgcaatgttgcatggatttggggtcggggaggacgacgacgtccgcgcgcctctgcctgtgaagagggagactctgtacggcgagggcatcgtatccgtcatgcgacctaatgcatcagctgcatttcgtaactttgaacaagaagcaagacaatctgctgtttgggactctgaccagaatgctacatctagttctggtgataatcttgcttctttataccgtccacctttttctttgatgttcaacggaccctttgacaaggcaaagttagaggcttcttccctggacaaatggctattaatcaatttgcagtcgacagcggaatttagctctcacatggtttattatgacaccagtgaggggaggaaggtatgcacctactaccatttggtgtccatgcctgctattctcctaattgaccccgtcactgggcaaaaaatgcatgcttggaatggaatggttcacccagatcgtttacttgaggatttactaccttacctggataaaggtccgaaggagcaccatgcagctcaacctcaaaagcgcccaaggaaagttgatccggaagcttctacgggcaagcaaggcaaaatagctgtagaggatgaagatgaagagctagcacgggcagtagcagcttctctagaggagagtaaagaagtcattgaagcatcagacgccagtgatgacatggttgaagctgaacccgaggaggaaaatgagcccaccctaaacaccaagcctgattaccctcctctccctgaagaacctacaggaagcagggaccttctctgcagggttgcgattcggctaccgaacaaccggaggatccaaagaaacttccttcacacagatcctatcaaggttacacctccgtcacatataaaattttcttttcgtggtcccattttcttggctcccatcctcactggtgctctctctgttatcgcagctcttgtggtcattctgcgctcctcaggtcgaggacggggagaggagggctttccacttcgtccaggcaattcctggggcatcccagaaactggagttgggaagcgacctaacattcaaggaagccgggctggccaactcgatgatcaacctcttgttggactgagccgcccgctctctcaacctgcactttga

SEQ ID NO: 32654 - DNA, 471 bp, Zea mays
  Peptide Sequence Number=SeqID_76029
gagatacttgaaggagtcacaaatattgacttggtgatcaatctcaagctccgagaagaagttgtggttgcaagatgtcttggcagaaggatgtgcagccagtgtggaggaaacttcaatgtggcctccattgatattgagggagaaaatggtggagctccaatgcacctgcctccactattgcctccgccacagtgtgaatcgaagctaataaccagagcagatgatactgaagaagtggtaaagaaccggctacgtgtgtaccatgatctgatgtttggtgtggtgccatcatatatcttaccaagtgggttgtcctctttacagactgaaccagtggagggattctacagagcgcgtcaaaagctcttggagttcaatatacctggtggaatacccgaatcatggcgaaagttattagaagccttgaatatagaagactccgacaatatgagatctgcagcagcatga

SEQ ID NO: 32655 - DNA, 888 bp, Zea mays
  Peptide Sequence Number=SeqID_76030
atggttcagaagaagaagaaagcggccgcggcgcccaaactccgcaagcttccgaagcgcgacgcggataagaagctcgggaagaagggtgacatggcagagttcagggcgcagctggactcccttgggctgaagatagtccaagtcacggcagatgggaactgcttcttcagggcaatgggtgaccagcttgagggcgatgaggaagagcacatgaagtaccgagatatggttgtggattacattgtgaaacaccgtgaggagtttgagccatttatcgaggatgaagttccgtttgaagaatattgcaactctatgctaaaggatgggacttgggctggccacatggagctgcaagccgcttctctgctgacaagaagaaatatatgcattcacatgcttaattcaccacgttggtacataaacaacttttctggccgtgaagctactaacatggttcacttgtcttatcatcatggtgagcattacaacagtgtcaggctgagagaagatccatgtcaaggtcctgcaatgccagttgtcatcaagttacagactgattccaatatatccaacacaaacaataacgctcaaacaaaagcaaaggaggtgaagaaatcttcacacaggtcaacctatgacgacacatcagttaaattggtcatggctggaactggatgttctgacattgccatagctgagcatgttctcggagaaatggatggtgatgttgatgctgctattgagtacctgatagcggagcgacttgcagtcagtactgatgatgcggaggtagacctttatataaaccatgcatttaacgtagcgtttttgctaaaatatggatgttggagcaagaaaattccttggttgtacagagtatggtga

SEQ ID NO: 32656 - DNA, 309 bp, Zea mays
  Peptide Sequence Number=SeqID_76031
atggagaggagctccttggcaatgctcagatggagccctgaactcttgcggtggcccaaacgcggaggtggaggcgacgacagtgttcggctgggccctgacggggagagatgcggccccggcggcgtgtgcggtggtactcagggcgatggtgcggtgggggaggagaagcggcagcggcggtgcagcgtgttgggtgtggcgggcgaggcgccgagatggatgtggccacaggccgggatgccatgtgggccagcaatggtccgtgggtacgctagggttttcctgctctgcggtgggatggcctag

SEQ ID NO: 32657 - DNA, 615 bp, Zea mays
  Peptide Sequence Number=SeqID_76032
atggcgggggtctctcgcgcgatcagggcctgcgccgccacgtcccagcgcaccctggtcgctgcttcggcggtggcgctgccgaaggaggcgagggtgaaagcggcaacggtcgggcgcagggggcggggtccggaggacgggaggcgcgtgcagtgggcgttcctcgggtgccccggggtggggaagggcacctacgccagccgcctctcgcagctgctcggcgtcccacacattgccaccggcgacctcgataccgtgcccccgcccctatggtcactgcgcgctcgagacaccgcccgcaccctaggccatcccaccgcagagcaggaaaaccctagcgtacccacggaccattgctggcccacatggcatcccggcctgtggccacatccatctcggcgcctcgcccgccacacccaacacgctgcaccgccgctgccgcttctcctcccccaccgcaccatcgccctgagtaccaccgcacacgccgccggggccgcatctctccccgtcagggcccagccgaacactgtcgtcgcctccacctccgcgtttgggccaccgcaagagttcagggctcctctagggttcgagatcaaatccggccagtag

SEQ ID NO: 32658 - DNA, 540 bp, Zea mays
  Peptide Sequence Number=SeqID_76033
atggctgcagcggcggcgtggaccggcgccgcatcccccaactcgctgctgctctcgcgctcgcctccccacgccgccgcgctcgcgccttcgccgggaagctccatgcggaggcggctcctcctcggcgtcggcaccccggccgtggcggcgctggcggccgcggcgccgccagcggtgctgcaggacggagcggtcactgtgctcatcaccgccggcgcctactctcttgtgcgcgtcttcgacgagctcaccgagcggcggctcatcgaaaaggcagagcttgagcaggaaggttgtgcacgtgctatccggcgtcctgttcatgtcatcttggcccctgttcaggtattccctgtccctagcatgcatcgaggttctcagattcataacgtttcacactgcaaagccaccaccaaagcatgctctgcccgcagcaattcgacagaagcacggtatttcgccgcggttgtcccgttcctgaactccatgagggttctgatatatggactccgtctctacactgatcaacctctttaa

SEQ ID NO: 32659 - DNA, 120 bp, Zea mays
  Peptide Sequence Number=SeqID_76034
atggcctcgtgtcgccggagacttggggcgccgagggtcatggtgggagcaatgcggaagtgtaagggcgagaggctccaagttgtggagattcctcgcaagtgggatatagtaaagtga

SEQ ID NO: 32660 - DNA, 159 bp, Zea mays
  Peptide Sequence Number=SeqID_76035
atgaaggccgccgtcgacctgaggcttcactgtgtctcgccgccattcaagcgtcccagagccctctctcaagagtcagagcaggcgccagaaggcgcaccggactatccggtggccccacttgtcagagctccaacggtcgaacctgagagcacctag

SEQ ID NO: 32661 - DNA, 450 bp, Zea mays
  Peptide Sequence Number=SeqID_76036
atgtccaaaccggacaaaacattccccctccttatcctcccggtgctccccagccttcataaccctggggttggaccgggacaatccttctgctcacgcctaaaccagctgagccaacaccttaggccctccctaaaccagggagtccctgatcatcccactcccaaggagaaaaggctgaaaaaggaaaaagaaaaggatttaagatctggaggaggccgggagggggctgaccgcggggaggtggcggagctctgcgacggaagtcgccgccggtgggcttcgggcggggattggggtagcagagtggtgtcccaagttcgcggcggtgtggcgaagctgataagcctttctaatttctcactgaaccaccagagggagagggaaaggagggggaagggcttaccggaggggaagaagacggcgacgcttgcacgattgctcgggtga

SEQ ID NO: 32662 - DNA, 539 bp, Zea mays
  Peptide Sequence Number=SeqID_76037
atggcggggatctctcgcgcgatcagggcctgcgccgccacgtcccagcgcaccctggccgctgcttcggcggtgacgctgccgaaggaggcgggggtgaaaccggcaacggtcgggcgcagggggcggggtccggaggacgggaggcgcgtgcagtgggcgttcctcgggtgccccggggtggggaagggcacctacgccagccgcctctcgcagctgctcggcgtcccacacattgccaccggcgacctcttgagaactggatcgattgactcgatctctggccttcctgtggtgattcttgctggttgtgattggaagaaagctgtagctggtgctgcgcacgtgcagcaacggttccttgtgcttttcttctgtgctctgacgcctgtgtggtgctgttctctgatctttgtccaccgtggcctggtgtttgggctccctactgcgcggtgttcctcttctcgggctggtgccgaggacgtctccctcggctccggcagcggctccagtatctccgtcaacctcccgccgtgcag

SEQ ID NO: 32663 - DNA, 372 bp, Zea mays
  Peptide Sequence Number=SeqID_76038
atggctggccaaactggtggtagtgaggctgttgttccttcaacggagcccatcaacatagatcctgacattgctgtggccgatgctgaggaggcagacacacctactagttctcgggtaagaaatagagcttccacatctgatgtgtggaatgactttgacaaaatatataaggttgttgatggtgtgagggtcaggtctcaagctaagtgcaaagttttgctagattgggagtacaatgctgatgttgctaggtctgagatgtgtcgtttgatatgtaggcttgatctacctatttgcttggctgaatcatctgcttttaaagagtacattaaaaaggctgaaagtcgcctagagggggagggtgaatag

SEQ ID NO: 32664 - DNA, 317 bp, Zea mays
  Peptide Sequence Number=SeqID_76039
atggtgttgggccagcctatctggaatgacatggaggagtttcttcctgctagggctggcagtgtgctagaggatagcctggagaaggagcagaaagctaaagatcaggctgctgttagtaaagtggaagaggttggcacaacggctgaaaatgctgatgctactggagttggcggtattttctctcaacttttggctttggaatcaaccgttgaatttaatggtgcagggagctccgaggctgtgaagcagatcttgaaggagttggcagaatgcttctgcccggtagcatctctcgagagttcatcagtagcagg

SEQ ID NO: 32665 - DNA, 654 bp, Zea mays
  Peptide Sequence Number=SeqID_76040
atggagataccaagggtggttccaagccgtggccaacgcacggtcgcaccacgcttcgccgcgagggagttccgcctcaccgtcgtcctcctcttccgaagctgggaggggctcaagttctcctcctcgaggttcaagtaccgcgccgagctgcgccgcatccgcctcctgttccggccggacaataacgcggcccttctggcgttggagacgtgccgcgccgcggacttctctcgtgatgcctgtcgggacggtggacgcggctcgccaagaacgacagctgcgaggacgtcgacgcagcggggcggtacatccgcgagatccacctccgcgacggcgacagaggcgtctgcgccagcggcaagcggcgacgcggcggggcagagccacccgttcccgtggcaagacgctgccatctcggagccctactacttcctgcacctcctcgccttcttctcttactttgcggcccgcagcacgacgctctccgccgacgacggaggggagctccatgaccaccttctccgtagggagatccaggcagtgctcgtgttcctgttgctctttgagtcttcgtacagaagacgccctctgccgcccctgacaccggccatggggtgccgcccagtagcggcaatgggtcgccgcccctga

SEQ ID NO: 32666 - DNA, 912 bp, Zea mays
  Peptide Sequence Number=SeqID_76041
atgggagggattgaagaggaagaagtcaatgctaataacgctgatgatggttgggatgtctggccagttcaacaagttcaacctcctgagccagtgccaaatgataataatgtggaggaccaattcagttatcagctctcaggccttgaagatctgccctctgatatgaatctgtgggtctcttcaatgacatcattatcccacaagaggtccacttccctcaggtggaagccccagaacctgtggatgcagttcttgctttgccagcctttcccccagcggggggaggagaacatgcaagtggaagaaaacatcaatgtgggcttcatgcaacacttggagcagcccaaccatgatcctgcatatgaagattacctggctagaaaacgcctttcttcttgggctgacttgttccccaccaactcagaattagttccagtcccaaaggtgtgggatgctttcttcatgggcctactgttgaggccggactcttttgaatgggccaagaaatttttattgtccggtgctatctctgccttcgttgagcccagcatggaaactgtctcgatcaagattccctccaagtgcctgccccctcctagtcaggactcccatgtggaacctcagtctcctttgcctgctaaacccgtcaagaggaagaaacagtcaatcttggtcgacactgaggtcagaaggagtgccagacttcgagagaaggctaggggttttaaaagatgctctgggattgggaaaaaatgctcctgttgtgctcggatctctccaccctccatttatcacaagattatcaagaagctgggagctgaattctgcaaagttgatccttcgaagttatgccctgaacagctccaggacttccagcattgccattcaaaggccaagtgcttcctctag

SEQ ID NO: 32667 - DNA, 705 bp, Zea mays
  Peptide Sequence Number=SeqID_76042
atgatggcacacagtggcaacgggacggctcggcagacggtggtgatgggatggctcagggcaggcgcaaggggacagggacgcaaggcgccaaaccttggtggtggtattggacgttttcacctcttagttaggttggtggcttgtggtctctattataaatcccatgtgaaggttgtgcatggctctgaagaaggctttcggagggaggctttgggaggggcatcatgctcgtcccatgggagtcctaaagagaaacactgtcttcatagaccaaatggaagtaaggaacatacaaaagacacttcgctaggacaaagtaacgttcacgtcctcgcaatatcatatgaagacaatgaagaaatagaaagtgcaaaacctcaaccgaatgcaaaatcgatcaaagagatcaagacaatagcactagactcatttgttctagacaagaaagtaacaattgaaaatgaattgctaacaaacgaagaaactgaacttattgatttccttcatagtaacaaggatgtatttaaaaggttatcaaaggtcctcgaaggcatcaatcaaaatataatcaagcacaagctaaacattgaccaaaagaaaaaaataggtaaagccaaagccaagggcaaggaattaggagcggggctctcgggcgatggaggagcggcgcttcggctaggctgccctcgttgtccggtgtag

SEQ ID NO: 32668 - DNA, 477 bp, Zea mays
  Peptide Sequence Number=SeqID_76043
atggaagctcgagccataacaccgtgctttctaaggagcatgagctggaaggatggatcgctcggcccatcactcgtgacaccgctcgtggattctaccagcatagtagcgagacgtacccggatcgctgggaggctacttgcttggtgcgccgactggaggataacctctggggtgcagagcggggtggctggcggtcttaacgtgaattattaccccccgctcgactggcagtattggaagtgtgattatctcaccaagttgcgagctgagcgtgtggagcgccttcatgaggattatggttctcctgcctctgctaggactcagcacccgtaccgctcaccgccacaagggtaccatgcttatgatgatgtttccattgcggagagcaaggcccattgggcgatgcagtgcctgaagaagatggctcagcagcagtcagctcctaatgccctagcaagactggatgcaccttag

SEQ ID NO: 32669 - DNA, 210 bp, Zea mays
  Peptide Sequence Number=SeqID_76044
atggaggtgatgagtgggcgtctgacgtctcgcactcccacgtccgcgctcggtgcttcttggcgatatgggcagactgagattgttagagttgtcatatctctcaacaataagattgatgcaatccaaatgccaacacgtggtcggtccgagcccaaggccgggcgaggtggtgactcctccgaggtcgaggttgagtccgagccctag

SEQ ID NO: 32670 - DNA, 291 bp, Zea mays
  Peptide Sequence Number=SeqID_76045
atgtatgacaccgtcaccaaggacaagcgcatggttgttcatgccggtgcgtgcagacgaagggtgcagtggcatgcagaggacgcaggttgtggaggagcagtgcaaggacaggatagggaggagatgaagaaggacgcgagcattgtgccgatgctggtggcggcaatgatgaagggttcgcgtggtgtagcagatcgtggagctccggcggtcggagcccggcgagcagcagcaggcaccgccagcagcggggaggcacggggcgtcagcacgacaatggggcaatag

SEQ ID NO: 32671 - DNA, 510 bp, Zea mays
  Peptide Sequence Number=SeqID_76046
atggcgaggttgtgtgtcgaagcgtcgacgaccacgacggtgaaggacagaggcgtggatgggaagaatgcaaagcgtgtggcgatggtggacatgaaaccacccatgcatgtcatccgtccgtctgtctatctgtatctctctcccctgacagatcaagtggggtggtcagctatagcattgtcgcctcgtcgcgtgcggaggcatgcggcgcggtgcgaggaggagggtttggttgcatcggcgcagagggaggagggagctcacttctaccaagaggagcgaacagcaaagcattttatggccaccttaatattcttatcgagagaggagaaatttgcaaaacctgccattatcagaagtgggtttcgcctagggatggcagtgggtaaggtacccagtgggcatacgaagccatacccatacccactaggaaaaatttacccatacccatacccactacccatcatgggtacaaaattatgccatacccatacccaccatgggtag

SEQ ID NO: 32672 - DNA, 147 bp, Zea mays
  Peptide Sequence Number=SeqID_76047
atggcgatcattgctctcttaatcagcaatgtggcagattaccttattgagaaacaggaggttggactgattgacagaaaggagaatttggtgctaggtgagagaatttgtatgcaacccggtgttgtgtggtcaaaagtttgctaa

SEQ ID NO: 32673 - DNA, 399 bp, Zea mays
  Peptide Sequence Number=SeqID_76048
atggatttgcaccccactaagtcatgtttcttccagctaaataaatatcgtgtgccctgcatgtctcgggccaccttcgaggccatcttagaggagctgagcgctgccatcgccggtaaggacaccatgttgtgcgccggcgtctacatatatggtgctgctgatgcagacgaccatgtgatggaagcacatggtgggggtggcagggcccgcatgtccgtgcagcaggattatgagtattcaagcttcaacccagttgcatatgacattgctaacatttctttttctaccttgctcatttgcctattctatgtgacagatgttgatgagcagaagtgttttgttaagccctacctaaacatttctggtaattataagctcattgttgacatattgtag

SEQ ID NO: 32674 - DNA, 1524 bp, Zea mays
  Peptide Sequence Number=SeqID_76049
atggcgcccagcagccgactgcccctggcgatggcgcccagcaaccgatcccactcccagcttgcagccacgcccacgaccagcacgccaagcgcggatctcgcccaactccgagcaaccacactcccagcgtgcagccgcgcccacgaccagcacgccaagcgcggatctcgcccaactcccagcaaccaaatgcccccgccttgtcctcgcccgcacaaccgtgctacgcctccgcagccgctgatggcggcatggcgcccaacagccgaccccactcccagcggccagcctcgaattccactaggcggggatctcgcagatcacgtcgggcggggatctcggccactcctgaacagccgtagatcccgtgctctgcccccacgttcagcaggctcgctaacgtgcagttgtcgtggcttgcaggggaagggtacgggcagcttcggcaactcggcaagcgccggaacaagacgcacacgtctgcatcctctgcggccgccgcagcttccacctccacaagagcacctgctcctcctgcggttacaccgccgcccgcatccgcaagttttgtttcactgggtaacagaaggacaagcctccacgtcaatagaagcaaatcaacctatttcgtttgacaagggcactcttcttgttatggatcagataggatacaatgctggtcgcacaccattcacagacatctcaaacaccatcattacagccttttgtaaatgggtgatatatgaagaagacgttaatacggaccaggcatgtgaggtggttagctttccagatgactatagcaccattgatttcacaaatttgtcaacacaagacattgcaggtggagacgaacaagtaaatctggatgcatatgatgacaacgattggttgcataggaatgagacattccaggcaaacaacattgtcacaagtgaagaccttctgacaccagcatactatgaaaagggccgcctacttttagttgagcggtacaaaaacatgacccccgtcgagagggagtctagacgtgtacgccttaggttgtataataagacaccaagacggaaagatgctaacaaagagtgcaacagaaaacgtagagcactacagggtgacactttgaatcaggagtccatcaccatggaggacccagtatatacccctgaggttgtacgtcctacaacatatggaattgaaccatatggatcctcagttaccacttgcgactgggttatccctgaattcatcgtgacacctttcctgccaacttcaacacagactaaggatgttggttcactcgatatgtctactgagccactaagacgtagacatcatgtgctatctgggacaagaccagctaccttaggccatcgaaaccaacaatttgaagacgacattggaaggaatgtggctacaatgaccgaggatactatttgtgatgctatggaaggagacgattggacacagccccatccaactgcagagatccacaccaatggtaattacaaccaattttaa

SEQ ID NO: 32675 - DNA, 175 bp, Zea mays
  Peptide Sequence Number=SeqID_76050
atggatgaacaaagtgcaaatcaagagcaaagccaaggggctgtttcggtctggggcaccggactgtccccggtggtgcaccggacagtgtccggtgcaccaggctgcctcggccgaacaggccgctctcgggaattcgccgacggcgtacggctaaaattcaccggactgtccg

SEQ ID NO: 32676 - DNA, 813 bp, Zea mays
  Peptide Sequence Number=SeqID_76051
atggctctggtgcggaagtttgggaaaccagacatctttcttaccatgacatgtaaccccaacaaggatgagataaggacggagcttctccctgggcagacaccgcaagatcgtccggatcttgtagtgcgtgtctttcacgcgaagctacaagagttaaagcataggctaactaaacatgatattctcggcaaggtctgggcatacgtctatgtcatggagtttcagaagcgggctttgccccatgcccattttctactaatcatgcagaggaagtacaagctcgcgtgccctgagcagtatgaccttttgatctcagccgagatcccagacaaaaagtaccctgaactacgaaagatggttatcaagcatatgatgcatggctcgtgcgggtcgctaaatcataactgcccatgcactaagggtcatgcatcgtgcaaaaatcattacccccgacctttctgtgacgcaactttgcaagggaaggattcatatcctgtttacagacgtcgtgacgatgggcgtaaggaaaaggttcgagggttcgaacttgacaatagatgggttgtcccttacaacccttacctccttcggctcttcaactgtcacatcaatgttgaggcgtgcgggagcatcaaggctgttaaatacctattcaagtacatatacaaaggccatgatcgtgtgtctgttgttatgagagatgcgagcaaggcaaatgatgatgtagatgagatcaagcagtacagagatgcaaggtgggtgacccctccaaaggccttatggaggatatatggctttgagcttagttag

SEQ ID NO: 32677 - DNA, 450 bp, Zea mays
  Peptide Sequence Number=SeqID_76052
atgggcaagaacaacaagcgcaagcgtgagccgactcctccatcggaggattttggtgactcggagtactcagaggaggagttctcctctgagtctgaggggtctccggctcccatccccctgcgtgagtcgtctgacgactcagacgactcccaggggctcgcggcggaggtctggacttacatccgggccgtcgagcgctccgggctcgctggctcagatgagtcggagtactcctcggacgaggaggactcatccgaggagggcagtggcggcgatggcgatgacgacgatggtggcgacgacgacgacgaaggcggtggcggcgacgacggtgacggcggcggcaggggcagcagcggcggtggcaagggtgacgacggcggcagcagcaggggcggcagcggtggcggcggcagcagcaagggcagcaacaaggccagtggctaa

SEQ ID NO: 32678 - DNA, 150 bp, Zea mays
  Peptide Sequence Number=SeqID_76053
atgtatggtttacaggtggtgatgaggaggatggttatgattatgcctatggtaatagttgcctttggtgcaatctatgctcaggtaaagaagaaggcgtcaaggcggatctccaggagttccagggacttcgacgagtttgaggattag

SEQ ID NO: 32679 - DNA, 117 bp, Zea mays
  Peptide Sequence Number=SeqID_76054
atgggcattgataaaggcaatacagataacagttacccatacttggggaaagcaaatttgattggtgagatcatcagttgttttgagaagaagggcttcaatctcaagattctgtaa

SEQ ID NO: 32680 - DNA, 612 bp, Zea mays
  Peptide Sequence Number=SeqID_76055
atgtctcaggtcgctgtaggggcaaagtctgctgccaggttcaatcagccctcggtctactattcacatgagtcactgaccttacgcataacccctggacttatcctatatctaacccgcgatccttggctggctggaacagtaaccggggcaaagatcacggcggcgaggcttaccggcggcagtagagctctagtggggtggtcggtgacgtcggggaggtcacggcggtcacgccggtgtgcgggtcggcgtcggaggtggctggagctgctctggccacgagcgcaggcggcggaggtcgtcggcggcacctgctccagccaaaccacggcggtagggttcaatcaaggtgcacgaggagctccactgggtgatgtagaggctatgcgtgcaaggaatcgagaaatggttcagtggattacacggtccacgtgctccggcggggtcacaaacttcggcgagcatgatctcactgttccggtggggctggtcctcggctcaagcttgggaaagtttcacggcctcccgaggaagctatccgcgggctcggatcgagcggaggtgggcgggaatggtttggccacggcgggtgcccttgggcggctctag

SEQ ID NO: 32681 - DNA, 186 bp, Zea mays
  Peptide Sequence Number=SeqID_76056
atgaccctcaggacctcccctacattctcgaccacctcaccagagcagtctcgcctccgagagtacgtgctcatccccgagcaaggagctgtccacgaggaagaccagaagcaagctcccgagactgccatcgcggatctccccgcagccccagctattgaagacaagccccggttttatgcataa

SEQ ID NO: 32682 - DNA, 420 bp, Zea mays
  Peptide Sequence Number=SeqID_76057
atggctcaccggattgcttggtccacgcgcggcggcgggcgactgaagtccggcgagggtgaatccgcctctccggtgaggcaatgcctcggctcaagcttggagaagcttcacgacttcacggggaagcggtccaggggctggggtgaggctggggggccaacagaaggggctggccacaatgatcgtgctcgggcagtgatggcgagcggtggtgcttgctttccacggcgaattccggcgatctctggctcgggcggggctttgggtgtgcgagtgcaaacggctaaggcctctaggggcatttataggcgagggcgaggtgcagacgcgcggggcgctcgctgccgcggccagtccgcgctcggccgacatgacacggtgtcgagcacgtggctttttgcttctgcccgggtttaa

SEQ ID NO: 32683 - DNA, 318 bp, Zea mays
  Peptide Sequence Number=SeqID_76058
atggacaccattatgccgcaggaaaaccagaataggttgctggctgagcggtggttagcaatgtgtgtcatgaacatcgtcgtgtgtgagggtgtggactgggtgttgcggcctcacaactacaagcagtggcaggtgagaagcaaacgagcagggctgaggcagcttccattggatccgaacattgttcagatgttcaaagacaaggtgaaagaggaataccacaaatacatagtgatcaatgaggatcacgagtggctcctcactggatggaaagggcaagtgctctctgccttctccacgtggacggcagatgat

SEQ ID NO: 32684 - DNA, 348 bp, Zea mays
  Peptide Sequence Number=SeqID_76059
atgggccagctgtgtacaggttcttcctaccattataggtcggcatataagacaagaagaaaaaacatgtacatgcacagtgttggaaatagtagaatgtacctgggcaaggtgagcccaacagtcaaggaacaattgacttatttggcaaagttagaggcggtctgtgccgaggacctggacatagatcccgatgaggtgcttgtcgtcatctcccatttctgtttcaaaaacttgatggatgagagtgtcactgtcgacaggccaaaccccagagacacggtgctcaaaaacatcgccaacatgaggccgaaagtgttcatccatgacatcctcaatggatcatag

SEQ ID NO: 32685 - DNA, 525 bp, Zea mays
  Peptide Sequence Number=SeqID_76060
atggcgttgtatgtagcttcacaaagcagagtggaacccgcagagttgctacgaaaatcatctctcattatctgggacgaggcttctatgactaagagacaagctgtggaggcactagacaatagcatgcgtgatataataggtcggcccggactgccattcggtggtaaaaccattgtcttcggtggggatttcagacaggtcttgtctgttattcgtaaagggtcaagggctcaagtggtcgcttctttgctacggatgtcttacctatgggagtctatgtcccacttaaagcttgttagcaatatgagggcaaaaaacgacccttggtttgcgaagtatttgttgcgcgtaggtggtggaactgaggtcacaaatagtgatggcgacatccgtcttcctgacgagggtctcatggggataagaatggcaaataaggcgatcaatgagggggaagaggttgctgacatgtcctcggcgctggctatcgaaggggagtgctacgagcagctgctttacacgtag

SEQ ID NO: 32686 - DNA, 243 bp, Zea mays
  Peptide Sequence Number=SeqID_76061
atgactgtctcactgaacgtgctcttttccagatgccatcgacgctacgatgactttttgcaacaatattggtgtacttcaattggaaaggacataaagacattccctcttccacctatcatcgacgcgtatgacgatgttataggtactgctagggaggtttacgaggaggaaagtatcgaactggcatcggcagatgtggttctcaaggactctcttaacgaggaacaaatggccgcctag

SEQ ID NO: 32687 - DNA, 825 bp, Zea mays
  Peptide Sequence Number=SeqID_76062
atgtggagacttggagacgtgcgctatccgggcaagtcgtcgggctcgcgcgggggtgaaaaatccgagcgcgctgtactcccgtcgctggcgacttcgatccatctcggcgagggggcctcgttgcgctgctcgtcggcggagccgggcaagctgggctcgaagaggccgtgctcgagcgggtccggtggcggaccgctctcggtggttggaggcaaggaggtggcccgcgaggagacaaagatccaagggtccggtgcaaccgtcggtgttcgtcgccgtcgaaccgccatcgcgaagaagctgagaagatccacggcgccgacgaaggaaggtgcacagaaacgcaagcgcatctcgtcgctgccatcttcatcgtcttccactagctccggtgctccagatccgaagagaaaaagtcacaacatttcattgccctgtgtattgacaaaaacatatcgactgaccatggattcggagaacgcaaagctccgaagagcactcgctcatttaatcagagtagtggaggagcgttgtgccgacatcgtcgatgtcgtccacagtgccttccaaccagttagcagaccagtcttgaatgaaatgaatcgtgcattagttcagatcgaggacctcgccaacgaccttgatcagcttgcactggaaaaagactgggagatggagcacatggccccttcactaattgctgaatcatcacaaacagaggatgagcttctgattgattatgattcagagttaaacaatgacgatatcgtcggctacgacgacggccgtgactactccaccgacgacacctatccctactag

SEQ ID NO: 32688 - DNA, 675 bp, Zea mays
  Peptide Sequence Number=SeqID_76063
atgtggaggctcctccgaggtcaaggtcgagtctgtcttccatggccgtggtcgagtccgagcccctgggtcgggcgaggcggagaccgtcggctgaggccagggctgagtccgagccctggggtcgggcgaagcgtgttcgtcgtcttctggggctgcgcccaagtccgagccctgggtcgggcggagcggtgttcgtcgtcttccgaggctgagcccaagtccgagccctgggtcgggcggaggggagttcgccgtcttctgtggcttagcccgagtccgagccctgggtcgggcggagcggagttcgctgtcttccggagcttagcccgagtccgagccctaggtcgggcggagcggagttcgccgtcttccggggctgagcccaagtccgagccctgggtcgggcggagcggagttcgccgtcttccggggcttagcccgagtccgagccctgggtcgggcggagcggagtttcctatggtgcttgaggtcgggcctgactgcctgtcagcctcactctgtcgagcggcgcagcagtcggagcggcgcaggcggcgctgtctttctgtcaggccgctttgtgctgatgagggttaccagctgagaattaggagtcttgagggtacccctaattatggtccccgacaaaaagagacccctaggcgcatgtga

SEQ ID NO: 32689 - DNA, 813 bp, Zea mays
  Peptide Sequence Number=SeqID_76064
atgggcgacacctttggcaggcgaagcaggcgacgcttcacctccgccgtaatgaccgcgtcaaaaaagggaccgggaaagggggcactccaaaaggtatccttctccgcgaaggaagcgggccccgagccctcctactggtcagaggttcgaaggctggcccctcggaagggttcgacagccgcctcagagcactcgggctccgcgcccactactggtcagaggctggcccccgaagggttcgacatccgcctcagagcacgcagagcgagggatgaccctgggtacgttcaatacataaccaaggctcgggctacgctcccgagtccactcaagggacacgatatcgcctcgcccgagcccgacctcgggcaaagacagccgaccccggaagattcacgcctcgcccgagggtcccctcaagcaacggacacatcgtcgactcgcccgaggcacaactcggggtttggcccccgtctcggcctcggaagatggacttcgccttgcccgaccccagggctcggactcaaccacgacttagaagacgacgaactccgcctcgcccgaccccagggctcggactcaaccttggctccggaagacgatgaactccgcctcgcccgaccccagggctcggactcagcctcggctccggaagacgatggactccgcctcgcccgaccccagggctcggactcagcctcggctccggaagacgacgaactctgcctcgcccgacccagggctcggactcagcctcggctccggaagatgatggactctgcctcgcccgaccccagggctcggacttaa

SEQ ID NO: 32690 - DNA, 1173 bp, Zea mays
  Peptide Sequence Number=SeqID_76065
atggcgcctcttgttgacgtggtcggtccgcaccctaggttgggtgatgtggaggctcctccgaggtcgaggtcgagtctgtcttccgaggccgaggtcgagtccgagcccctgggtcgggcgaggcggagaccgtcggctgaggccagggctgagtccgagccctggggtcgggcgaagcggagttcgtcgtctttaggggctgagcccgagtccgagccctgggtcgggcggagcggagttcgtcgtcttcgggggctgagcccgagtccgagccctgggtcgggcggagcggagttcgtcgtcttccggggcttagcccgagtccgagccctgggtcgggcggagcggagttcgccgtcttccggggctgagcccaagttcgagccctgggtagggcggagcggagttcgccgtcttctggggctgagcccaagtccgagccctgggtcgggcgaagcggagcttcctatggccggtcactggagcggcgaagtgactgtggtcacttcggctctgtcgactgaagggcgcgcgtcaggagaaaggtgtcaggccacctttgcattaaatgctcctacgatttggtcggttggcgtggcgatttggtcagggttgcttcttggcgaagacagggcctcgggcgagccggaactttgtgctgatgggggttaccagctgagaattaggagtcttgagggtacccctaattatggtccccgacatgggtgcgcgcgagcgtacccgccgggtgtagcccccgaggcctcggaggagtggtttgactcctccgagggcttaatgcctcgcgcaatgcttcggctggcctgcccccgagcctccgcacagggcaagaggacggtcagggacagactcgacttttttacatacgcccctgtgtcgccttttcgcaaggtggagggggggaaagcgccatgttgccctcagagggcgccgaacatggtgtttccggtgagctgctggcaggtaatccgagcggacgtccgtgccccatttgttaggggtcggctagaggcccagaggcgcgcccaaaagtacctgcgggtgatctgccggacccggtcccctgtcgatggggtccgaggcctcgacgcctccctctgtagggattccgttacaagatcgttcccgctggtctcggaaatgtcctag

SEQ ID NO: 32691 - DNA, 381 bp, Zea mays
  Peptide Sequence Number=SeqID_76066
atgaaaaatggcacagagtgcgtggcagatgaggcaaatattgtggagacttatgataccaacgaagccaattcaatgaagttgccatcgatgttgctcaagctcaaggaagacaagttgcgctctttagctgcactatctccatcggcgtctagccggctcatcgccctgttgaacatgcctggcaagaagctgctgattttgtgcactcgcgtgccttcgttgacgcttcggattagtgccctcctctacggcttcgatcacgtccagctcaacctcgcctacttcgacactaaggggttatcgtctgcatggtctacttcagtcgtagcttacgcaccggcgttccgactatgggagaatatctccattgttctctag

SEQ ID NO: 32692 - DNA, 852 bp, Zea mays
  Peptide Sequence Number=SeqID_76067
atggaggtggccgcagcagcgagctacagctactacggcttggaggcggccgacgacgacgtcgacaacctcagggccacggagctcaggctcggcctgccgggcacggaggcggcggaggaggaggaggaggcccggcaggcccagaaggtggcggcgccgccgccgtccacgcccaggggcaagaagcgcgacggcgtcagcggcgggatcgacgccgcgccgccggccgccaaggctcaggtggtggggtggccgccggtgaggtcgtacaggaagagctgcttccagcagcagcaggcgggcgccaagggcaagccagcggcggcggatgagggtgctccgggtccggcgggcggcggggtgttcgtgaaggtgagcatggacggcgcgccctacctcaggaaggtggacctcggcacgtgcgggggctaccgccagctgcgggaggcgctggaagccatgttcctctgcttctccgggccgggctcgggcgacgcgtccggcggcggcggcggcggcagcccctccgacttcgccgtcacctacgaggacaaggacggcgacctcatgctcgtcggcgacgtgcccttcagcatgttcatcggcacctgcaagcggctgaggatcatgaaggggtctgaggccagactaggcctcggggtgcacttcgtttggcagcccaaccaagagtcatcggtactcgtcatgtcgcgtgcgttcgacgactactatatcgaggattgtggcgtcaacttggcgcaggaggtgacacagaggaggatcgacaacagtgaccagttcgtcatcctcgccaccgtcagggtagcttttgtgtcggcctgcctttaa

SEQ ID NO: 32693 - DNA, 1312 bp, Zea mays
  Peptide Sequence Number=SeqID_76068
gagcgccgcggtgttcggccacgtgggcacggcggcgcgaggcgcgcagctactggagcacctcgtcggccccacggaattcgatgcggccgtagggctcaccgcgctggccacgagggagaaggcggaggctgccctcgagaagggaaacgcggacgaagcgacctgccggcagatctcctctgccgcatcggagaccggctcgacctcaagtggtacgccagcgcgcggggcgtctgcacggcgtggcgatacgctcccgccgccgtcgcccgcgctcctcgtggtcgctgacgacgctcgctgttgcccctacgctgcctccctccccacgcggaggtcattcgagctcaccgccatcgtcttgggaagccgctgcattggctccagcaacggctggatcgcgctctccgtcgtcctcttcaacggcaagaccgtcttcgtgctcctcaaccccatcgccgctgtggagatcctcctcccgccgctgatctatgagagccgctgggtttccaaggtcgtcttcaccccgagccccgccaaggatgacttcgccgccgcggcaatctgcgatatcgacaggatcgcgtacgtcaccgccggtgccaggaggtgggccgtcatggaccccgtccgcctcacctgcggggaccagctcatcgacgtcgtatacaccgacaaaggtaaggtctattgcctcaccaagtgcggggacgtgcatgtgctccgtcttcctgagcgccggcgccggaagcctgccaacgctgatgaagcaggatcctcggagccagagttctctgttctctaccggctttccaccctcgctgttgacgtcgaaatgaattcagacgacagacaagaacatcgacgagcagcagacccagagctcgaccggttcatggagatctactgtcacatgttggtgaggtacagacaggagctcacaaggccaatccaggaagccgacgaattcttcaggagcatggaggcccagatcgacgcattcttgttattaggtgattttgactcactttggatttcattttccttgattgcaggtttgactcttggctcaggtgtcactctgccagcgcgatcaatattagtagttcctctgcatctcgtgcaaatggatgcttctgtttggggtgatgatgctgaccagtttaatcctcatcggttccttaaaagggacattgatcttggaggtctgctcactgctctcactcccaatattgaggtgccggtctatgtcaaaggaaatatattaacactcagttttaattgtgtattgctgcattgtgagaagtag

SEQ ID NO: 32694 - DNA, 282 bp, Zea mays
  Peptide Sequence Number=SeqID_76069
atggcgcaggcacaactcgggcctcggggacggggacgacggacggcgcagctcgggcctcggggacggcggacagtgcaggcgcgtaggccgcggctcggggacggggacgtgggatgccgcaggcgcgcagcttgggggcttagccgcgcagctcggggcaggccgcagggcgggaccgtgggagcggccgagcggggcagcgagctaggcgcctgcgcggctggcggctgggtggggcgctggcggcctggcggctgggaactgggatttgggaattag

SEQ ID NO: 32695 - DNA, 849 bp, Zea mays
  Peptide Sequence Number=SeqID_76070
atggcgggtggcggcgccggcgacgacgacgtggtggtggtgagctgcggcggcagaggcggcggcgaccccggcgcatacgccgcggtgctcaagaggaagctcgacctgtactgcgccgccgtcgccaaatccatggaagctaaatcacaagaacattcgttgggctaccccaactcacaagcttcagatgcttcgcaattgatttctcaagcttcctttgatggtgacatagatggggcaagcctagttacaaactctaatgtcatagaagatgatgattttcaaggcaagccaaccaacagtggcacatcaaaggaactgtcagacgatgatggtgaccttgaagagaatactgaccccgctaacgccaagaagatgaggaggttaacgtctgagaatgcatctttgctgaagcgactggctgatatgactcagaaatacaaggacgcttccgttgacaataaaaatctaacagttgatgttgagactatgaggagaaaggtgaacatagccgaggaagctgtcaggaggctaactgggatcaccctcatgctaccgaccgcttttgagaagcccacgagcagcgcgcccctgtcatcatgtccatctgatgcagcttctgcttctgcttctgccgccattgaagacagcgtgaagcatttcctccaggcgccacttgaaaacagtgggatcatcccaaacgcagcagtttttcagaccaagccagcttctctgcaccgtgttgctagcctggagaacctgcagaagaggatcgtcggggatgcaatgtattccgagaccgcgtcaacgacattctcagatcctgaagctcttgccgataggtaa

SEQ ID NO: 32696 - DNA, 450 bp, Zea mays
  Peptide Sequence Number=SeqID_76071
atggggaagacgactcggcgaactcgatggcgggtttatggccacgagaccggcgttagagaggggaaaacagcggggggaaagctccgggcgcaaataggaaaaaccaagcatgggggcgggtgtctcacctcgaggcagagctcggggtcgtttggcgtggcctccgacgagctagatgaccggcatggcgggcgtgggtcctcggcgagggtgagcggcgtgggcagagcacgagagagggcgaagctgagcgaaatgggacggggaagtgagtgcgggcgcgggcggtgctcaaaaaaggggatgggggcgtgggcgagcaacgtggccgaggattccgacgtcgtgcgcgagtgcgcgcgcgctggtccacggcggggcgcggggaaggcgaaagtgatagggaggcccacggcgcagtgtaacaccctgaatttgggggtatag

SEQ ID NO: 32697 - DNA, 234 bp, Zea mays
  Peptide Sequence Number=SeqID_76072
atggtggtgcagggggcatctctggctgaggtgcaggggaaggcggcctctcagactccacctcctgttgaggtgtgggggaagagtcctgctgctcctgctcctgctcctggcgtcgacgctcctgctccttgtgcaggcgacgatgtagtctctctaggtggctggactgacctagcaccgtgcgacacagtggacgctccaccaggcgagaaggcaaaaaggggatcatag

SEQ ID NO: 32698 - DNA, 129 bp, Zea mays
  Peptide Sequence Number=SeqID_76073
atgaccctggctggggatgctagcttgcaagtcagtttgagtgcatttgcattcttgttctctgagttggttcagtacaaccagactcaagttgacaacattactgagctagaacggaggctagaatag

SEQ ID NO: 32699 - DNA, 1167 bp, Zea mays
  Peptide Sequence Number=SeqID_76074
atgggcgccgcgcggggagaggaggacggggaggggcgctgcggcgagcggtgcccgtcgtggtacgtgagccgggaggagatcgagagcggctcgccgtcgcggcgggacggcgtcagcgcggccaaggaggccgagctccgggccacctactgctccttcatccgcgacgtgtgcatcagactccgactgccgcagattacaatggccacggcgatcatgctctgccaccgtttctacctccgccagtctcatgccaagaacgagtggcagactattgcaactgtctgcatatttcttgggtcaaagatagaagacacaccttgtcaattgaaacacgtggtcattgtgtcatatgaaacaatgtaccataaaaatccggatgctgctaagagaatccaccaggagcatgaagtgcttgcgaagcaaaaggcactgattttggtgggggagacactgctgctttcaacaataaggtttgatttcaatatacatcatccttatgaacctctaaagctcgcgctgaagaagctgggcattgccgagacggaactgagacaatctgctatgagtctcattaacgatacgcttccgtcaactctagtcatccagttcaaaccacagtatattgctgcggcatcactgtggtttgctgccaaatttcacaacgttaatctttcccagaatgggacaatatggtggcatgtgttcgatgttgctccagatccgttgagagttgttgtgcagcaaatgtctgagctctttgagaaaagagccccatgctccgtgggtcctgttaccaagccagtaccagcttcaagcgcgacggataaacaccagatcaagccggccccaactcatactccaatggataagcatcagatcaagcaggttccagctccaatgaatagacatcagatcaagccggtcccaactccaactccaatggataagcatcatatcaagcagatcccagctccagctccaacgtgtagacatcatatcaagccggttccaactcccatcccaactccgatggataagcagcagaacaagctagctccaactccgatggataagcagcagaacaagctagctccaactccgatggacaaacagcagaacaagccggctgcagctccagctccgacggacagatgtcagaga

SEQ ID NO: 32700 - DNA, 456 bp, Zea mays
  Peptide Sequence Number=SeqID_76075
atgcccgaggggttcggccccgaggcttccagaaaaagtctttctgccagaacgtctttcgcgcttttcgactgcttcgatagcgggatcctgaaaaacgacgagagtacacaacgattttcgtgccttctcgactatatcgataacagaatcctgcgaacgagtaagagtgcacgtaagcggcaaggccgaccgagccgagtgactcctacgcctccaggatacggatacctcactcatcaccttccgcaaaaagttcagacatcgacagagggagcagcagcaccctcggcatcgtttccaccttcggcggaatctggcccggcctcgaacgacgacacgggcggaaggatctccacctcgaaggaggacgccagcaccgcgcttgggccatcgccgccaaggtctccgcaagggttccggcccgagcggacgcctcggctggccgctccgtag

SEQ ID NO: 32701 - DNA, 570 bp, Zea mays
  Peptide Sequence Number=SeqID_76076
atgggcaaagtcttcaccgacgtgctccggggtcctcccctacgacacgggggctgggtcccacacgtcatgcaagctgacccaaaacagaagaagctaaaccgccgcacgcggagcgtgcgcgccggttactacgtgcaagaaaccgcaccgccacttgtgccaatgccgcaccttctcgactgcggaaccgacgagcggaagcagcggtcaaatcgcctgcaggctcgtgtcccctcctggagcggcagggcaagcgacacctttggcaggcgaagcgggcgtcgtttcaccttcgccataatgaccacgtcaaaaaaggctggcccctcggaagggttcgacagccgccccagagcacgcagagcgagggatgactctgggtacgtccgttacatggccgaggctcgggctacgctcccgagtcacttcgccctttcgctgaccaatctgacaggaaaacagcgccgctcaccccgctccgactgctgtgccagccacccgggcaaggctgacaacagcaagttcagcctcaggcgcaacaggaagctccgcctcgcccgaccttag

SEQ ID NO: 32702 - DNA, 912 bp, Zea mays
  Peptide Sequence Number=SeqID_76077
atgccttcgcactcccctcatgcatcgcgcacttccatcttccgagcccccggatggggagcacccgcgttgccttcgtcttgctgtcgttggaggagcacgacctcgcgggggttggcacccttcagccatcgctcggcttcaaggattttcatcatgcagcccggctgcattccctcaccaatggtcatccaggatgatgaccaccagttcgacggtggggagaagcaagccgggctgcggcctctgccccgccctcagcttcaaggatcttcatcatccttgctgaggaggagggcggggcaagtcggggcctgcctccgcgtgggtcggcgacccgcttcttcctccggcattctggggagaaaggcatcctccagctctgcggaggaggcgtcctccagccatgcgggggaaggcgaactgctgcttcctggacagggtgcaactgtccgtcctccacccgggcgacggccgtgccacgcgtgggccggctacgtccaggtcctccctgtgccgtcggctgcccaacacgtcgtacgccgcgagggcggtactcgtgttttggggtggtcccgttctcgtggttgtggcgagaacaggagtgaggacctgtcggtgcgcttttgggtggccgccgctcgctggggacgtgaacgagggccttccatcggtagcgttttccctggggctattgctgttgttgtcttgccgtccgagacggaggtcgttgtcgcgttgttggtgcagcggtcaccggcgagccacccggagtttgttgtcccgcaggccctctggtgtggaggttgttcatacccgtgggagtggaaccggagttccgtttgtgatggcaccctgagtatgggtgtttgttcattgtggctgtcgaggcctgaacatctgggtatttga

SEQ ID NO: 32703 - DNA, 459 bp, Zea mays
  Peptide Sequence Number=SeqID_76078
atgctcagcgacgagcaacaacgtcctcctcgaccgtcctccccttccttgcggagcatcctcctcggtcgttctccccttcctcgcgattgtaggggtctagggtttggcggcgggggtggggcggcaagctcggaggatggatggaggcaacatctggaggtgtcggggctggcggcaggcacaacgtggctcctgcggcgggggacgcggacgggcgtggagctgcatctcagccgctcagggggaggcggcgactgctgcaaatcccgggcatcacgggtgaggcgaaggcgtgttggtggggagtgggaggttgctcatgactcccggatgaggctggcgatgttggacatgtgtggcatgtggcggatgcggatggggcgcgaggtcggcctgcgcgacattcggccaccggcggcggatgcggatggggcgaggaggaccgatgacggatga

SEQ ID NO: 32704 - DNA, 552 bp, Zea mays
  Peptide Sequence Number=SeqID_76079
atggcaccccaaccgttgaactacattgactccaaggaagatattctggtctatgctacaaagttgattaaagctgaaatgcctatttctttgagattgatggacaactatagtaaagaggctgtcctaagcgacccgttaggtggaacaaagtcagatgatgtgtcttacagtgcaaagcacgtgaaacttgcttttcataaggttacgcccactacgaagttggatgaacctgatcccttggtcagcccgaaggctgtgtcttcatcaagtaaacctgaccagcagtcatggattgatggctacatttgttccatctgtggatttgaactgcctccgggcttcgaggaggagaggctggaacattcagattttcacctggctgaaacactccagcaggaagaagcagtggacggcacaagacacatctcaaacgagaggtcggctgggtcgtcgagcccaatggcaccacctacctcaaggtatgccgctgtcgttcccccgctggcagatctcgtctcttcccgcaatcacgaagccacaactttctaa

SEQ ID NO: 32705 - DNA, 447 bp, Zea mays
  Peptide Sequence Number=SeqID_76080
atgtctgacagagaggtgcctgagccctgtgtacatgccaacgtggctgttggagaggtgctagagccctgtgtacgcggtaacgtggccgtcggagaagtgccggagccctgtagaagcacagctatcggtgctgctgggatcttgctgacgtctccttgcttccaaagggggctgagaaccaccgtcgtcatggacgcacgcggggagccatcattacttggtaatgatgtatcccccatggcgcggtcggtccgagcccaaggtcgggcgaggcggagacttctctcgaggccggggtcgggcgaggacgcgattcctcccgaggccgaggttgaggtcgagccctggggtcgggcgaggcggagaccaccttccgaggccgaggttgaggccgagccctggggtcgggcaaggcggagacctcctcccgaggccgaggcctaa

SEQ ID NO: 32706 - DNA, 1938 bp, Zea mays
  Peptide Sequence Number=SeqID_76081
atgtcgtctgagcctccacccgcctcctctgccgccgccggagaggaactcgctgctgacctttccgccgctaccctcagcaagaagcagcagaagaaggacgcgaggaaggcggagaaggcagagcagcgccagcgtcagcagcagcagcagcagcagccggcggacgccgaggacccgttcgcggccaactacggcgaggtccccgtcgaggagatccagtcaaaggccatctccggccgctcgtggtcccatgtcggcgacctcgacgactccgctgcgggccgctccgtgcttatccgcggagccgcgcaggccatccgtccggtcagcaagaagatggctttcgtcgtgctgcgccagagtatgagcaccgtgcagtgcgtgctcgtcgccagcgccgacgccggcgtcagcacgcagatggtgcgcttcgccaccgccctcagcaaggagtccatcgtcgacgttgagggcgtcgtctccctcccaaaggagcccctcaaggccaccacacagcaggttgagatccaagtgaggaagatctattgcatcaatagggctattccgacccttccaattaaccttgaagatgcggctcggagtgaggcagattttgagaaggctgaattggctggagaaaagcttgttcgcgttggccaagatacccgcttgaactacagagctattgatctacgaacaccctcgaaccaagccatattccggatccagtgtcaagttgaaaacaaatttagagattttttgttgtcgaagaactttgtcgggatccacaccccaaaattgatttctggatctagtgaagggggtgcggctgtattcaagcttctgtacaatggtcaacctgcttgtttggcacaatcccctcagttatacaagcaaatggctatctctggtggttttgagcgagtatttgaggtcggccctgtgtttagagcagaaaattcaaacacacacaggcatctatgtgagttcgttggtcttgatgctgaaatggagattaaggagcattattttgaggtctgtgacattatagatggcttattcgtatcaatatttaaacacttgtctgaaaactgcaagaaagaactcgaatcaataaacaggcagtatccatttgaacctctgaagcccacgagattgacaaatcactttatgcagtatctagacaaaaccttgaagctcacttatgaagaaggaattcaaatgttgaaggaagccggaacagaaatcgagcctatgggtgacctcaataccgaagctgagaaaaaacttggtcggcttgtcagggaaaagtatgacacagattttttcatcctgtatcggtatcctttggctgtacgtccgttctacaccatgccttgttatgacaacccagcgtacaccaattcttttgatgtcttcattcgaggcgaggagataatatctggagcacaaaggatacacactcctgagctgctggccaagcgcgcgacagagtgtggaatcgacctatggcgtgccgccacacggcggtttcggggtgggtttggagagggtggtgatgctgttctgtgccctgaacaacatcaggaagacctccctgttcccgcgcgacccgcagaggctcgtgcccacaagctccagatgggcacgattcaggtcaaggcttcgtctacccaagggacacgatctcgcctcgcccgagcccggcctcgggcgggaactatagtcccggacgaagttacgtctcgcccgagggcctcctcaggcagtgggcgcaccctcggcacgcccgaggcccaactcgggcaggcttcgtcgagaagcaaccttggccaaattgcctctccaaccgaccgtatcgcaggcgtattcaatgcgaggatcgcctcacaccctatcctgacacgcgcgcctcagtcggcaaggtcgaaatga

SEQ ID NO: 32707 - DNA, 852 bp, Zea mays
  Peptide Sequence Number=SeqID_76082
atggaaacacatgtctctgctctacgtcagatgatctccggtgccaagaagaaggaactcttctttgggatgccttaccgccagggcgaccagccagatccgggcgcgggcaccgtcgagagcatcccgcacaacccagtacacttctggagcggcgacccgaggcagccgaacggcgaggacatgggcaacttctactccgccgcgcgcgacccgctcttcttcgcgcaccacggcaacatcgaccgcatgtggtcggtctggaacggcctccgccccggcaacagcgacttcaccgaccccagctggctggacgccagcttcctcttctacgacgaggaggcccgcctcgtccgcgtgcgcgtccgggactgcctcgacaccgctgccctgggctacgcctaccaggacgtcgccctgccgtggctgaacgccaagccggccaaggaggccgggtctccggcgcccaccgcgggcgcgctcccggcgacactgaaccagaccgtgcgggtggccgtgacgcggcccaagacctcgaggacccgcaaggagaaggacgccaaggaggaggtgctggtcgtccaggggatcgagatcgctgaccactcgagcagagcgggggcggcatgccggcggcggcgcagtgcgcggggagcgtgggcgctgacgccgcacgcggtccggcctgggaagggcaagggcacggtgaagaccgtggcgaggttcggcatatgcgacctgctcgacgacatcggtgctgacggggacaagacgatcatcgtgtcgctcgtgccgaggtgcgccggggacatggtaactgttggtggcgtcgggatcgagtatgtcgggtga

SEQ ID NO: 32708 - DNA, 756 bp, Zea mays
  Peptide Sequence Number=SeqID_76083
atggaggcaccggacatgtccgatgcgccaacggctccaagactgccaacggtcggcttccccatagaaggaaagaaatcgggcaccggactgtccggacattttgagacaggatcttccattccgctgcaacctactcgaagggtcttctcattccactgcatgctaagtcttcgagtagaattccctggtggggttacacattccttcactgactcaacagaagatcaggataggctactttcttttgagaagatgtttatcggtgttaatggttcctctctgaaaactaaccgaaatcttgaggttctacgaggcattcctgtcgagaggttgatgatggaaacatattctccatattgtgacataataaatactcatgctggaagccagtatgtaaaatctgtctggccatccaagaagaaagaaaagtatgagccagattcaacagtaaaaggtcgcaatgagccttgtttagtcagatttaaaagggatagtggggaaacaccattttccgttggtcaagcaattaactcgcctaagttagtgtactttgagaaacaatttgagttggctgaagcagtaaaactgcccatgtttcttcacatgcgtgctgttggtgaagacttatgtgaaatcatgacacagaatttgcacagattccctggtggggttacacattccttcactgactccgcagaagatcgggataggctactttcttttgagaagatgtttatcgaagcatccaagtaa

SEQ ID NO: 32709 - DNA, 568 bp, Zea mays
  Peptide Sequence Number=SeqID_76084
atatgccgaaaggtaccgcccaggcgccaaggccgcccgtgtcatcctgctactctgcgagagcggagagcccagcccaccatctcaccggggggtccctgagccgacgagtgagtgtgccgcgtgccccagcccagatgggtcgagcgcgtgggcgagcgcgaaggggggaagcgaggcggccggagacgggcgtgagagaggtggaaatcccgcggccttcgtgttcgtcccgcgcccaggtcggctgagagccaccgtcgtcacagggctagcggggcgccatcattgtctatctggcggagctggccagatgggacaccggtcttgttctctgcggcccgagtcggctcggggtagggtgatgatggcgcttcctgttgacgtggcgggcctgtgccctaggtcgggcgacgtggtggctcctccgaagccgaggtcgagtctgtcttccgtggccgaggccgagcccgagctcctgggtcgggcgaggcgaaggtcgttcggcagaggccagggcggagtccgagccctggggtcgggcgaagcggagttcgtcgtcttctag

SEQ ID NO: 32710 - DNA, 801 bp, Zea mays
  Peptide Sequence Number=SeqID_76085
atggctgggaggaccgcgcccgcctccctcccctccttctccctcacgcccgactccctcgctgcccctttatcctggatctcgtcatggacgctaccacgaccaacgattgatatcatgtccaagttcttcaagctgatggtggttctacaattaatgaatgatttgaacgaagtgttcaagatgccgctatctcttgtattgaggcttatagtgtgcttgaggttcttcgacctctctataattcccctaagatactggaacaaaagcactgggctgttaatattttttgtaccatgtgtcataaagcatgagatgttgcctgtagagtaccaatgctttattgcagtcttcctcctcgtctgccccaatgtcggcaagtcagccctcttcaacaggatcattgcgtctctgcgagctaatcagttctgtgagcgtctccctagccccaatggcgagtcaactgttgattgtcatcagatctcaaagatgccaaatcttgcattcaccattgcaaacaagactttcaccttaacaccagagcagtacatagtgaagttggagcaagcaggacaaactatctgcatcaatgggtttatggcatttgacgtaccgcctcctcgtggtcctctctgctacgctaaacatatctgtactactcttaagtgtgcaatgagggcgtccaccgagggcatcaccgtgcccccgctcgccccctccacgcccgcgcctgtctgcatccgcccccttcgtctccccgcaatggccgcgtccctacctcatgtctacgacgacaactag

SEQ ID NO: 32711 - DNA, 300 bp, Zea mays
  Peptide Sequence Number=SeqID_76086
atgagcgccggcggcgccgcaacagcgtttggtggaggagcagcagccgagctcgacgcgtcgtcgtccgacgaggagtcgtcggtggaggtggacttgtggacggccgtccgcacgggcttgaggccctcggtgaagatccggatcgcctcctcctccgtcttggtgctcacccaaccggcacaccagccactaaccaccacggccgcaagaaagcaggcgtccaagaggaaaaagccaaagcttccacaaatgctgaatgactcagagggtttgtctagctacgtaggttctatttag

SEQ ID NO: 32712 - DNA, 1797 bp, Zea mays
  Peptide Sequence Number=SeqID_76087
atggcgtcgaattcaccggcggcggcgttctttggtgttagggatggggaccagcaagaccaccagattaagccgctgatatcaccgcagcagcagcagcagctggcagcggcactgcccagcgtggcgtccggccaaggcgcgccgacggcggcggcgcagccaccgcccaagaagaagaggactatgcccgacccagacgctgaggtgatcgccctgtcgcccaagacgctgatggcgaccaacaggttcgtgtgcgaggtgtgcagcaaggggttccagcgagagcagaacctgcagctgcaccggcgcgggcacaacctgccgtggaagctgaagcagaaggacccgctgcaggcgcagcggcggcgcgtgtacctgtgcccggagccgacgtgcgcgcaccacgacccggcgcgcgccctgggcgacctgacggggatcaagaagcacttcagccgcaagcacggcgagaagaagtggaagtgcgacaagtgctccaagcgctacgccgtgcagtcggactggaaggcgcactccaagatctgcggcacccgcgagtaccgctgcgactgcggcacgctcttctcccggagggacagcttcatcacgcaccgggcgttctgcgacgcgctcgcgcaggagagcgcgcggctgccgccgaccagcagcctcagcaacctcaccagccacctctacggcgccgccaccaacgcgggcaacatggcgctcagtctctcgcaggtgggctcccacctcacctccactctccaggacggccaccaccaccgcccgtccccggagctcctgcgactcggcgctacggccggcggcggcggtggcagcagcatcgccgcgcgcctcgaccacctcctgtcgcccaacggtgcctccgccttccgcccagcgcagcctccgtccttcttccacaacgcgggggcatcggtcggccaggactttggggatgacgcgggcaatgggccgcactcgttccttcagctgcaggccaacaagcctttccatggactactcatgcagctgcccgacctccaaggcaacggtgctgggggccccggcgcctcaggcggacccagctctctcttcagcctgggtttctttgctaacaatggcaacagcagctcggggtccagtcacgagcatgcaagtcaggggctcatgaacagtgaccagttcagcggcggcggttcggaggcacaggcggcggcagggatttttggcgggaacttcgttagtgctggtggagatcaagttccaccgccggggctctacagagaccaagcctccatgctgccgcagatgtcggcgaccgctctgctccagaaggcggcgcagatgggcgcgaccacgagcgccaacggcgccagcgcggcgtccatgttccgaggcttcgcgggctcttccccacaacacgtgcggccagcgacgccgcacatggaacagagcgacgcgaacctgaacgacctgatgaactcgctcgctggaggcggtggcctcggtgccggcggaggaatgttcggcggcggcagcaacggcgccggccacgcgggcatgtttgatccgaggcagctgtgcgacatggcggagcgcgaggggaagttcggcttcggccagggtggtggcggagacatcacgcgggacttccttggcgtcggcggaggcggcctcgtgcgcgggatatcgacgccgagaggagaccaccagagcagcagcgatatgagctccatggaggctgagttgaagtcggcctcgtccttcaatggaggcaggatgccatga

SEQ ID NO: 32713 - DNA, 672 bp, Zea mays
  Peptide Sequence Number=SeqID_76088
atgacggcctcctcctcccgcggcggcgccgccgccgtcgctgatgacgacgacgagccctacctcctgggcttcatcatctccaagatcgtcggtatgctctactaccgcggcaaggtcgccggccgcgagccgctcaaccggtacgacaacaacgccatcgccgtctttaacgcacgcaacgaccaggtcggccacctcccaggcgtcctcgcggcagtgctcgccccactcctcgactcccacctcctcgtcgcggcgcagggcatcatgccccggtcgggctcgaagttcaaccccaacgcctacagcctcccctgccaggtccacctattcgcgcgcccggccgccgcctccgtcgtcgaggccgcgctccacgaggccggcatcgacctcatccacgtcgaccacctcgagttcatcctctcccaagcgagcgcggtcatggagcagttcaagaaaccggaccgcgaccgcgacgtcgataagctcttctcgcttgtggggaaagaagggaagaatcagactcagcgcatggacccgcccggggatgtcgtgcatccgagctcttcggacaccagaaggaggcgctggggtggatggtgcaccgggaggagtctgccgacctgccgcccttctggcaagaaggtgaagatggggggttgccgctaa

SEQ ID NO: 32714 - DNA, 3066 bp, Zea mays
  Peptide Sequence Number=SeqID_76089
atggtgaggaagaagagaactggccctggtggctctggagaaacttctggagagtcttcaggagcctctggacaaggttcctcacagcagcctgagcgaactcaacaacctgggggaggacgtggctgggtgcctcaacagggtggccatggtggtgggcaacaccagggtcgtgatcgacattatcagggacgtggaggaccagggccacatcaccttggtagtggggcacctgagtatcacccgcgtgaataccagggacgtggtggtgaatatcagggacatggtggtgagtaccagggacggggtggtgactaccagggacgtggtggtggccgctccagaggtggaatgccacagccatactatggtgggcataggggaggtaatgttggacgcaatgttcctccaggtccgtccaggacagttcccgagctgcaccaagccccatatgtccagtatccagccccggtggtttcgccctccccatcgggacctggctcatcctcacagcctatggcagaggtgagctctggacaagtccagcaacagtttcagcaacttgccgatcgtggtcagagttccacgagccaagaaattcaagtggcaccagcatcaagcaaatcggttcgattcccgttacggcccggcaagggcacttatggggacaggtgcattgtgaaggcaaatcatttttttgctgagcttcctgacaaagaccttcaccaatatgatgtatctataacacctgaggttacttcacgtggcgtcaatcgtgctgtcatgggtgagcttgtaacaatatatagacaatcccatttgggtgggcgtctacctgcatacgatggaagaaagagcctgtatactgctggaccattgccatttacttctatggcatttgaaattaccttgcaagatgaggaagatagtcttggcggtcgccaaggtggacataggcgtgagagagtatttagggtggtgatcaaatttgcagcccgtgctgatctccaccatctggctatgtttctagctggaaggcaagcagatgcccctcaggaagctcttcaagtgcttgacattgtactacgtgaattgcctaccgcgaggtattctcctgtcgatatgtcctctactgcatttatcgagcctctccctgtgatcgattttgttgctcagcttcttaacagagatatctcagttaggccattgtctgattctgatcgcgtgaagattaaaaaagccctaagaggtgtgaaggttgaggtgactcacaggggaaacatgcgcagaaaatatcgcatttctggcctcacctcacaagcaacaagagagctatcattccctgttgatgatcgtggtactgtgaagactgtggtgcaatacttcatggagacttatggttttagtatccagcacaccactttaccatgcttgcaagtgggtaatcaacaaagaccaaattatctgcctatggaggtttgcaagatagttgaaggacagcgttactcaaagcgactcaatgagaaacaaatcactgctctactgaaagtgacctgccagcgccctcaagagcgcgagctggacatcttacagactgtgcatcacaatgcatactatgaagacccctatgcactggaatttggtataagaattgatgaacgtcttgctgcagttgaagctcgtgttctgccaccaccaagacttaaataccatgatagtggccgagagaaggatgttttgcccagagttggccaatggaacatgatgaataagaaaatggttaatggtggcagagtgagcaactgggcatgtattaacttctctcggaatgtgcaagatagtgccgctaggggtttctctcatgagttggcagtcatgtgccaaatatcaggaatggattttgctcttgagcctgtgctgcctccagtgactgcaaggccagaacatgttgagagagcgttaaaggcacgttatcaagatgcaatgaacatactgaggccacagggaagggaacttgatctgctgatcgtaatactgcctgacaacaatggttctctttatggggatctcaaaaggatctgtgagactgaactcggattggtctcccagtgttgtctgactaaacatgtttttaagatgagcaagcagtaccttgcaaatgttgcactcaaaataaatgttaaggttgggggaaggaatactgtacttttagatgctttgtcaaggagaatcccccttgtcagtgacagaccgaccataatatttggtgctgatgttacccatccacatcctggagaagattccagtccttccattgcagccgttgttgcttcgcaagactggcccgaggtcacgaaatacgctggactagtgagtgcgcaagcccatcgccaggagctgatacaggatcttttcaaagtatggcaggacccgcagagaaggacggtaactggcggcatgataaaggaacttctcatttctttcaagagggcaactggacagaagccccagaggatcatattctacagggatggtgtcagtgagggacagttctatcaagtattgctgtacgaacttgatgccattagaaaggcctgtgcgtccctggagcccaactaccagcctccagttacttttgtcgtggtacagaagcgccatcacactaggctgtttgcgaacaaccacagtgatcagcgcacagtcgatagaagcggaaacatactgcctggcaccgtggtcgattcgaagatttgccatcctactgagtttgacttctacctgtgtagccatgctggcattcagaacaagttcacagctgacgagctgcagaccctgacgaacaacctgtgctacacgtacgctaggtgcacccgctccgtgtccatcgtgcccccggcgtactacgctcatctggcagccttccgagctcgcttctacatggagccagacacctctgacagcgggtcactggccagcggcccgttcgaggaggctactttctgctttttcgcatgcccaatgcaccaaggcccgtcgttcccaggtgggccgggctctgtgctgtaa

SEQ ID NO: 32715 - DNA, 483 bp, Zea mays
  Peptide Sequence Number=SeqID_76090
atgatgatgaagataatcaaccatcaacatcatcctccgaggacaaagaaacgatctgacgcgtcagaaaggtcgagaatcttctctttaacattgacaggaaaaggcaaagaaagagaggatgcttcgcatgcgggtagaagggccacttcagggacaactatgcaaatatggccaaacccacaaaggggaggagcaaagacaagtgtcaaaacttgggatgactcttcaagtgaagatgaacctcctaggccacgcagccaccgatcctcatcacgctcatcatggtcatcacacaagtgccttatggcaagagaaaattttgaaacatttgcaaatttcaattatgagctaacaactaaatttgagcaattagaatctaatggtccatcctcagctaccgatgacatccttatgaaaaaaaatgaaaaacttaaggctaagttagctagctctcaacctgggagcgtgaagatgatctga

SEQ ID NO: 32716 - DNA, 458 bp, Zea mays
  Peptide Sequence Number=SeqID_76091
cagcccatgagatagagatagcagaggagcgtcaacaggcagagtaccatcaatcagtcttgagggaacaattggagtaccagaggcaacaatctgaataccagagacaacaagccgagtaccagaagaagagggacgagtattatgcaagcctccaggcccaaaatcaagctcttctctcgcaactagcccaacaagcgggcgtcccgatgccgacatatgggatgccgcctccggactttgcactgccaatgccaatgttggcgcctccacctccgcctccgcctacgtcacaattccctatgggatttcagacaccacccgcttcagttgccgcacctggagatgggtctgggcaagacgacacaacacattcgtgggtcaacaaccttttcaatacgcagagtccagccggaggaggtggctactcgaaccatccagacgctggatatgattga

SEQ ID NO: 32717 - DNA, 168 bp, Zea mays
  Peptide Sequence Number=SeqID_76092
atgtcactatgccgaagctttatgggtgatagcttcgacactacttttgagaggatctgccgaaggcttccgagagccgaagatccgaaaaacaccttccctgagctcgttgccgagaaacgatcacaaaatttcgagcgcgagatggtcccaccatgcagcgggtga

SEQ ID NO: 32718 - DNA, 366 bp, Zea mays
  Peptide Sequence Number=SeqID_76093
atggggaattcggcgtggttggtcggcgtgacggggcatcgtgcggcgggtggccgatcggtcggtgagatcctggcagggggggcggggggcagcgggcgtgcttcccgtggtcggatccgtccggtttcatccgagctgggggtggtggttggtccgcggtgggtaattcgtgggattaagccgggggtaggtttcatcaccgtgctctgctggagttatagcattttcagcaaggatatggagtacaccccctgcacagcaagttcctttgtatcccacatctcgctgctcgaggaagttcttggctggaggttttgtctttacggagacttcctggtcatctcttttgtcaactgcacttga

SEQ ID NO: 32719 - DNA, 1248 bp, Zea mays
  Peptide Sequence Number=SeqID_76094
atggacaacagctatgggcctacgggctacggctgtgctgctccgcctcttcaagattgcgagacacgatcacacgagcaagcagggatgtatctggacgggcagtggacggagatcttggaacaccagcgaggagatcttcctcaaggcagtgatggagaactcaatgggagtggcagcagcgccaccaagcatggagatgctggggttcaaggccatgtcgcaaggaggaggtatgctgcaatgcaaactaatatgacaccaataactataggaagcattgaagcaattaaccagttaaaacaagattttacaaccacgacaaacagcatacctatgagcaacacacctgttcagacaccaaattttgcatctccttcaagttcatcaacatcccatctggataatccacatatggcagcacaagatactgttacctcagtggtgagcatgctcaaggacacgctcgagcgcaagaagcttggtagccatgctaacaaagacacctcagtaggccatccttttggattctatgatactcagcagtttcaacagaacattcttggaggaacggatttctttcccatcatgacaactgcccaggctcaggattccctgatgcttcccaaggtcgagaggcccatggaaccaaacaatggtagcttcgttccttctacaaaccaagtttggttcggtgcagcttctcgagagccttcgcacagtggatcttctactgctatgaccacttattcagctgggttcgaaatgtgcgatgagctaccacctgcagggcaagcgatgtctatttgtgagagctccagaaaaaacgctgcaaatggaacaaccatcggcagatcgaaaggcaaagaatacagagagagggtacaacaggataatttgaaagatgagagaaagatgagctcaactaatacttctggagcatcgaaagctgataatggagatcctatgaaaaagcgcagggttgagcgctcccgcaaaatggcagaagcgaaggaaagaagctctacaccagtaataccgtccgacatgcaggccgttcttaagcgctgcgaaaccctagagaaggaggttcggtcgctaaagcttaatctgtccttcatgaacaggaaagattcagagcagaccaagcagatcgaggagcttcaacagaagaacgaggacttggccgaagagaaggagcggttgctggaagagatcgagagaattgtctccgaccccaacacttga

SEQ ID NO: 32720 - DNA, 561 bp, Zea mays
  Peptide Sequence Number=SeqID_76095
atggatgatctgcggttggaagttgggaagatatccaagcattgggagcgcgccgtggtggacaagtcgacctccatggcgggcgttctctctcatgtgcctacggccaatgaacgaccgttggtcggatcttcggccaactcgccccatgggcatcactttgagacaagatggaaggattcttatcgctctttgttgtgtgctggatccaagactgaaccattgcggaaatctgcccttcaaaaatttgtagggcatgctaatgtcaatgacattctcatggcatggcttgaatctttattcttcacaatttaccaagaggttataatcactcctgagcacaacgaagaagggatttacacagtcagattctacattcagcgttttgttgatggtttacgtgatgatctccacactggtgttattgtacaacgtccatcttctctggattctgcttgtgcgccctcctttttgcaggaggaggtggccggttcgttcaagcgtgtggagatctggcaccctagggtgcgtttggttgaggagtggggaagcatagaatga

SEQ ID NO: 32721 - DNA, 423 bp, Zea mays
  Peptide Sequence Number=SeqID_76096
atggtggcattacactccattacacgaggtgaagaaacggacggtcggcgcgagcgtttctgtcgcgggcgcggcgccggtcgggttgcacggctcgggtcgcctgggcttcgcgcgatcgtcatcggactcctgagcgcggacgtcggggtggttgagtcgcgcaggctccaggcgcggtgctgctggcgttgggtctgtgcaggcgtcggggcaagtcgcgtggggatgggatgggcgtggtcggcgcggctggccggggttgcgtgctcggtcctcggcgcgtcgcggtggggtgaggcgtggcaggggcgcgccagggacagaggaggtggccgggtggggccgcttggaagtgagagaaaagggagggaggtggagagagaggaagaaatgatattcaatattcaaaaatacttatga

SEQ ID NO: 32722 - DNA, 390 bp, Zea mays
  Peptide Sequence Number=SeqID_76097
atggcgaaggcttggcacgacgagattggcgaggcttggacggggttcgggcacgtctccggcgaggcacgacggcgagcggtggtgttgctgtgcgagcggacatggtttcttgacgtcggacggagctcagacgaggtgctgtgcgaaaagtccggcgatgaactggacacggcgtgggcaggggctccaggcgcggtgctgctggcgttgggtctgtgcaggcatcggggcaagtcgcgtggggatgggatgggcgtggtcggcgtggttggccggggtcgcgtgctcggtcctcggcgcgtcgcggaggagaacatcttcttctcccctgtcatgtggtttgtgcacccgctatcgatgatccaacttgagcccccggatgcataa

SEQ ID NO: 32723 - DNA, 288 bp, Zea mays
  Peptide Sequence Number=SeqID_76098
atggcgtcggcatcaatggagggaggagtaacggcggcattgaagttcctttacaccggagaaaaaacggacgggtcggcttcatggcacggtcgtcgcgcggtcgaacttcctagtgtctgttgcgggcgcggggaggctgcaggggctctcggccggtcggggtcggggtactgcgcaggcatcgaggcttgctggcgtggtgcttctggcagcgtcgggcacgtgcaggggcactggtcgcggtcgcgctggttcctggcgcggctagcgggcgaaggggcgtag

SEQ ID NO: 32724 - DNA, 441 bp, Zea mays
  Peptide Sequence Number=SeqID_76099
atgtttgaccatttccagcatttgcgtaatgaggactctagggagaagcctcgtagtgagaccccggccattcacctcggaagtgaatacggatggcccgtctcaggtgcactgcaccgaagtgtccgttgcgtcgcacggtgccaggaggtggagtctgagaggccgccttcccctgcacctcagccagagatgccccctgcaccaccacagggcatcccgactgctggaggagaccctgacggaggcagagacgatgacaacgccggtggaagttcgagccacgacacggagctctcggaggagcaggagccagagggatggatcgctagacccatcactcgcgacaccgctcgcgggtgtcacttccatgacgctctcgataccctgttgcgtcggccttcaaccgacgcacttggtctatcgagtaccgttgtgtag

SEQ ID NO: 32725 - DNA, 450 bp, Zea mays
  Peptide Sequence Number=SeqID_76100
atgggtttgatggaggtaatttttaacaggcctgttgatattctaaggaaattgtttgatgggaacaccttgagatcacaaatcgaagaattctttaatcgctttggtgctggagaggctgctgcaatgtgcttaatgatagctgcgaagctactttatgctgaagatagtctcataagcaattctgtttctgagaaagccgttgaggcatttgaggaccctaggcttgttgggatgcctcaaattgatggtaccactgctttatctaatacacgaactcaggctggaggctttagtatgggccaagttgttcaagaagcagaacctttgttttcattaagggggagttttgtatttgcaaattcttttcaaagttcttttgcaaatagtcaaagggtggtggtgcggtccttttgctttgggctcatactttctccccctttggcatga

SEQ ID NO: 32726 - DNA, 462 bp, Zea mays
  Peptide Sequence Number=SeqID_76101
atggttgcactgttatcccgagttgtcactccccaaacaggtccttacggagaggcactcaggaaacagcctgatccccctaaaggcggtctggcggactcggccatgggcatcacgccggcgtgggagcaccagagggcgttgcacacggttgctcacctcgagatgaagcactggagtcacggggcaacagcggtggcgcagggacacgacggggcgacggtggcggagctccggctacacaggaagaactcctgtgagcgcggaccgggtggactagagggattaggggcgaaccgaggggtgttccaggtggcgggtgatagggcggagcttatcagggcaacagacgcggcgaggagttccacggcgaccgtagaacgggcggcgaacgtcggtgggaggtggcagggctctagtcacatgcgcagagcgagagagagggcgagggggttcggctga

SEQ ID NO: 32727 - DNA, 381 bp, Zea mays
  Peptide Sequence Number=SeqID_76102
atggagtccgcgggcagctttgacggggctcacccggagatccagcgggattctgttgacatcgcccccgcgaaggtcggcatggtggttgaagacgggcccgacatcttggccccacgccgagttgtcttcaaccttgggttttcgttcatgcgcagggatgaacgtcgacgagtggggttcgacgggcagggaacggcacgatcgtttgtgagcgttcgggtggagctccggccgggggacgtgaacgacgagtacgaactccggcgagtcacaacggcaaactcagcgaactacactgcgagagcgagggaggcgcgagaagagagaagttgctcaatcaatgcggataaccttgggagcaaactcaaaacaatataa

SEQ ID NO: 32728 - DNA, 414 bp, Zea mays
  Peptide Sequence Number=SeqID_76103
atgggcaagaacaacaagcgcaagcgtgagccaactcctccatcggaggagtttggtgactcggagtactcagaggaggagttctcctctgagtctgaggggtctccgctcccatccccctgcgggcttgcggcggaggtctcgacgtacatccgggccgtcgagcgctctgggctcgagggctcggatgagtcggagtactcctcggatgaggaggactcggacggcggcggcgaggacgaggacgaggacgacgacgacgacgacgatagcggcaggggcggcagcaaggacggtgacagaggcggcagcagggacggcgacggcggcggcagcaggggcagcaaccggggcggcagcagcaggggcatcaccaggggcggcagcggcggcagcaacagggccagtggctag

SEQ ID NO: 32729 - DNA, 900 bp, Zea mays
  Peptide Sequence Number=SeqID_76104
atgcataagggagcacgaagacatggtcaccttctagggggtcaccctccttttaaaggtgactccccttacttgcgtccccagccgtcgcgggctgagtcttctccaacacgctccaaggtcctcctcctacggcgcgagggctgggtcccacacgttatgcaagccggctcagagcagaagaagccgaaccgccatgcgcggtgcgtacaaccgcccagcggttacaagcgaccctccacttttgcccagaccagtaggcgaaagcgcgggcagccatgcaggcagcatgcaaccgcgccaagtgggcgcacttctccgactcccaacacgcccggcatgggggcccaggcccacgcgtcatgcaaccggcgtgccaaatgcctcgtgcatgcaactgcaccgccacttgcgccaccactgcgcctcctcgactgcggaaccaatgccgcgactcgaggcgacccagcgcacgacccagcagcaccagcctggcgcgacgatcaatgcggccaaaaatgggccggcagtaatgacggtggcaggcgggcaggagcagcggtcacgtcgtcagccaagctcacgtcccatccgggggcagcgagagaaccctctcccacgcgggacaggcggcgcccctggcaggagaagcgggcgacgcttcgccttcgccataatgaccgcgtcaaaaaagggatcgggaaaggggataccccgaaaaggatccttccccgtgaaggaaccaggctccgagcctccctgctgatcagaggttcgaaggctggcccctcggaagggttcgacagccgcctcatatcacgctactcgggctccgtgcccactactgatcaggggttcgaaggctggcccccgaagggttcacagccgcctcagacatag

SEQ ID NO: 32730 - DNA, 495 bp, Zea mays
  Peptide Sequence Number=SeqID_76105
atggggagaggcaagccgggctgtgatcttggtcccaccctcagcctcgagggtgttcgtcatcctcgctggggcggggagcgaggcgagccggggctctgcctcccgcgtgggccggcgggccacctcttcttccagcttctggtggtggcaaacatcctccagctctgtggaggagacgtcctccagccatgccggggaaggcgaactgttgctgcccagctaggatgcaacattccgccctcttccttgctttcgcggcgaggacggcagcgaggacctgccggtgcgcttgggagcggcccgctctttggctttaatagctggttcgcgtcccttgagcgggaacgcgaacgagagccctccggcggtcgcgtccgtcctgggaccatggctgctgctgcagaggtcgctggcgggtcccccggtgttcgtcgccccgcaggctcgaggttgttcatacccgcggggacggaaccagagttccgtttgtaa

SEQ ID NO: 32731 - DNA, 693 bp, Zea mays
  Peptide Sequence Number=SeqID_76106
atgtggaagctcctccgaagccgaggtcgagtttgtcttccgtggccgaggtcgagtccgagcccctgggtcgggcgaggcgaaggccgtcggctgaggccagggcggagtccgagccctgggtcgggcggagcggagttcgccgtcttccgggactttgcccgtgtccgagccctgggtcgggcggagcggagttcgccgtcttctggggctgagcccgagtccgagccctgggtcaggcggagcggagttcgccgtctttcgggacttagcccgtgtccgagccctgggtcgggcggagcggagttcgccgtcttctgggacttagccctagtccgagccctgggtcaggcggagcggagcggcgctgtccttctgtcaggccggttagtggagcggcgaagtgacggcggtcacttcggctctgccggctggggggcgcacgtcaggataaagctttatgctgatgggggttaccagttgagaattaggagccttgaggatcgcctgacaccttatcctgacacgcgcgcctcagtcggcaaggtcgaagcctcggcctcagcctcggcctcagaagaaggtctccgcctcgcccgaccccaggactcggcctcagcctcggcctcgggaggagtcacatcctcgccctacctcggcctcggcctcaggagaagtctccgcctcgcctga

SEQ ID NO: 32732 - DNA, 795 bp, Zea mays
  Peptide Sequence Number=SeqID_76107
atggaggccgagaagacggacctccggcgccagctggcggaggagaggagggaggcgaaccaggccatcgctgaagtgcaggctgcgcaagcggaggccaaagtggcgcgggcagagagcagtctcgctagtcaacgcgccgaggagctggaggcaaggttcaacgccttgtgcaaccccgtggacaaggccgaggcctcgacgcgctcgaaagttgagcggacgcacacacagttcatggaagcgtaccgcgagttgggtgcgcggactactgactttgaggtacccgaccgagaagcaggccttcgcttcctcgaatggttgcaggaggagctgctggtgctcccgaccattatggaaggtttcatgtccttcgcctccctcgtcacctgcgagggggccatgaatgcattgtcccgcgagggctgcaggcactacgaggtcttcaaccaatcagacgagaactttgaacgtgaaatcttcaaggccgaagaccctgtggtgaagcagtcagcgggggcactcttcgataggatgtggggttcgcacggtcgggaggcggtcagggaacgatctgaccgggcgagagagcagatggcgcgtgccgaggatgttggggaccttggaggtctggccggtgcgccgcccgaggctgtggaggtcaatccggtgccgcccttggatgccggtgaaggctcctcggctgtacccgtgcctactgtggccggcgaagaccctgtgtcagcccctgcgccgatgagcgaagatgccgtgagggtggtgaaagtcgcctag

SEQ ID NO: 32733 - DNA, 582 bp, Zea mays
  Peptide Sequence Number=SeqID_76108
atgggcgcaccggacagtgtccgagtcgaccgttgcacgcagatagctgttgctccgctggcacaacggacagttcaggggtttgggcctgcgcacgcaaccactactgacaatgctaattttgtggcagcttcgaccgtggttgctgaaggtgattctgatgattctgtgtctaagtgttttgagtctgatgattctaggagttcaattgtgtggacagaggagtcttcggaggaggacttggaatattttgcagcattggatgtggctgcggcggagactccttcgcatgtgatgggtgctgaggatcttccgggtgcgagtgttgggcgtaggcggcgaagggcggtggcgaaacggagagtgggtgagttgtcgcaaagtgataggcgtcatcatggtgagatggagggtggtcgtcttcgtgtggacggggctggcaaacgggaattattgtcctcgccggctggggcgagtgtgggtgagggggagctgcgaagtctgtttgcgggtgaggaattgaggataatgttgttcaactatagggagatgggtatcatcccgaatgttgagccaatgtaa

SEQ ID NO: 32734 - DNA, 297 bp, Zea mays
  Peptide Sequence Number=SeqID_76109
atgacgttgagtgcggagacacactacaaggatttgaagctgctggcctcgacaaagttaaagccggacgaggagccgatggcgttgcggcttgaagcgtccttgatcagtggagacgagccatcccggcgcgcaggaagccgtgcgcaggggctgaccggcgaccatggcagatgggagctcaacatggggtcgacgagatccgagctgggccagcgacgcggcagcagggaggagcagaggtggccggccaagacagagaaaagaagggaccacgctggtgtcggtacttggtag

SEQ ID NO: 32735 - DNA, 297 bp, Zea mays
  Peptide Sequence Number=SeqID_76110
atgacgttgagtgcggagacacactacaaggatttgaagctgctggcctcgacaaagttaaagccggacgaggagccgatggcgttgcggcttgaagcgtccttgatcagtggagacgagccatcccggcgcgcaggaagccgtgcgcaggggctgaccggcgaccatggcagatgggagctcaacatggggtcgacgagatccgagctgggccagcgacgcggcagcagggaggagcagaggtggccggccaagacagagaaaaaaagggaccacgctggtgtcggtacttggtag

SEQ ID NO: 32736 - DNA, 132 bp, Zea mays
  Peptide Sequence Number=SeqID_76111
atgggttcaacattggaaaagatgtacctctgccaggtgaggaagcgacaaacttttgttgcttccgttctaaggtggtaccaaaggaagaacgtcaggaatgaagtgcgggaggaaaggatcctccattag

SEQ ID NO: 32737 - DNA, 1086 bp, Zea mays
  Peptide Sequence Number=SeqID_76112
atggcaacctgcatagatcttacttatggaagagctgttagtacagcattggcagttgaagcaaagtatgcaggcgctggaaaatccaagggttttggagctgcccccctcccccctctcttccccccccgctcggcccaccgcgccggcccagctcccagcgccgcgccagcctcctccccccccgcgcgcgcgacagccgcgcggcccagcaccacagccccaccgcggcagcccagcgcgcgccgcgcccccagcccaagtcgcgcgctcgcggctcagcgggtgtgcattgcgcgcacgcagcgcgtggagcgcccgccgccgctgctgcccagccgggcccgcgcgtcagagagccagcgcacgctgtacttcttcctgaactggctgcgcgaaatttcagaaaaccaaccgcccgacacgcagtttcttccgcccgtcgcccactttctcgccacgatctcgccctccgactcgccgaaccgccgtcggagcctcgtctcgcccggagcgccgccgtcgtcgccgtgcgcgcttgctaagcctgctgcgcagcgcctcgttgtctcgccaccgcgtcgcgttgccgagctctgcagcgtgggtgagaaactcccttctctctcttccccagccttcttccccgtagcagtcgtgccggcgagcctcgccccttcgcgccgcggcctagtcgctgcgcgctcgccgcacgcccaacaccgtccccaggcctctggccaccggagcgctgctggcgcggccgaccgggctcaagtcagcaagccgccgcgcgcccagcagccccgcgcgctctcgtctggccagcaggagccaccttcgcctagcgccgacgtagcagccacacccctgcgcgtcgcagccgagtcgctgcgctcgctgcatgcccagctcgtccccgtgcctcgctactgttacttagcgcgtcgctgcgtcgacgggactccgtctacgttcgtctaccctcgtctacccctaaacaactcccttctaccccccgtctacccctcgtctaaccccgtgtgcgttcgtgtcgttcgccatcgcccgcgcatcgcgcattaa

SEQ ID NO: 32738 - DNA, 378 bp, Zea mays
  Peptide Sequence Number=SeqID_76113
atgaactgcgggctccgggagcaggagggagagaaagagtctgccagggagacgtcaatggccggcggggcttcaagtgccatcaagggctacggcgggctagagcgtcaggcgcacgtgcgtgaagcggtatcccacggtccggaccgtgcgatcaagatcggacggggaaaatcagaccggggaaacagacggctgcgggcgacaccgctcctctccgcggcggtgaggtcgccggagtggagaggcaggggtgacatagagaactacttcggtgaactagaccaggctaaatcagccggccaccgtgcgagcacggcggactgccgcggccgagcactggcgaaggcgaaattggacgaacacagggcgcaataa

SEQ ID NO: 32739 - DNA, 285 bp, Zea mays
  Peptide Sequence Number=SeqID_76114
atggtggtggccccctgggtgaggtaccttagccaagaatacgtccccatgttaacgtgggctgccaacacctaccgctccccctcttgcccatatttcagggttgtcttcgaccttgtgttttcgttcatgcgcaaggatgaacgtcgacgagctaggttcgacgggcagggaatggcacgattgttggtgagcgtttgggcggagctccggctggggacgcgaacgtgtcacaaatctacccctcttaaaaagaatctcgtcctcgagattaagaaaggctag

SEQ ID NO: 32740 - DNA, 1695 bp, Zea mays
  Peptide Sequence Number=SeqID_76115
atggctggggtggaggatgaggacgagttcaaggacgcctcggtggccgccgatccgccaccttgctcgccgaagcccgcctccaagtccatgaccgctaccggcagcggcggtggcctcgggaggaggctgttcgcttccattcctctccccgccaccctctccgccgccatcggccgcttctccggccccaacccgctggctaccaatgtgggcctcgggctcctactcgacgcggggcccgctgcctcctctgacggcccccttgcctccgacgcggcctcgggcggcagcagcctccacctgccctcgttgcctgctctccagcggcagcacggggatgatcaggttgctgggcgtggcgcgggtgagtgggaggaggagctagggttgttaccggccgaggaagggtgggatacagctgaagacagtcgggagaaggagggtcttgctgttgatgggcgctctgcgaacagaaattgtttcccgacgcgtggtcaggaggagggggcacagagacagagacctggtgatgagttgggggcagccgtggcccaagaccaggaggtggtggtgaagcaacaaggggccactgaggattgtgctgctgtggtggaagatgagagtaactactctgcggtagagcaatgtgctggtgatgaaacaagggcagtcaaggctagtaatgctgtggaaataaataagagggtgatcgagcaagaatgtgctggtggcatactggatgaagccaaatatggtgtttctttaggattgcaagaggagaatgccatggtggaagagcaaggtgtggatgtcatttctgtacaaaatcaacgtgtggcgatggagcaatgcgctggtgatcagttgacaacaaccacaggcggtagtgctgtacaagaggtggtggtggagcaagaaggggacactgagtgttacactgctgtggaagctgtagaacaatgcaccaatcatggatcaagagcagacaaggatggcaatgttgtgaagagaaaggagaaggcggtggagcaagaagtttctgttggtgtacgtgatgcagctaaggattgtgttactgtggaaccacaagaggagaatgtggtggtggtggagcatggtgaggatggcatttctgtgcaagatcaacataaggcggtggagcaatgtactagtggtcaacttagaacaaccatggatgatactgctgcagaaggtcaaagggtggtggagcagggaggtgccattttctatttggatgcaacagcatatgatattgctgttgaagatcaagagaaggaaatgaaggaatctgatggtgacgaatcaagatcaaccagggatagaaatcctgcggaagtcaaagataaggaggtgaaccaagaagatgtcgtagacagacacaatgtgatcaaggatggaagtggtgtggagttactagagaataacatagtggctatagagcaaggtgaggatggcatctctctatcagatgaggataatatggtggaactatatacaagtgatcaactgagagcaaccctggatgatcatgctgcagcaaatcgaaaggtggtggagcaagaaggtgacattgttgaaagggttgtgaccacagatggtatttctattgaagactatgagaaggaagtagagcaatctactggtttttctcaaggtcaaccaagggtgtga

SEQ ID NO: 32741 - DNA, 2246 bp, Zea mays
  Peptide Sequence Number=SeqID_76116
atcaagacaaggaaatggagcaatctgcaggtgacgaatcaagagaaaccgaggctgagaatgctgtggaatataacaagaaggtggatcaagaagataccattaacagacaaggtacagctaaggaagacagtggtgtggagccacaagaggagaacgttgtggatccagatcaaggtgtggatgacttttctgtactagatgagggtaatgtggtggcacagtgcaccagtgatcaattgagaacaaccatggaagataatgctgcagagatgcaagaggtggtggagcaagaaggtgccatttttgaaaagggtgtgacctcagatggcattactgttgaagatcaagacaaggaaatggaacaatctgcaggcgatgaatcaagagtgaccaagggtgagaatgctgtgaaagataaaaaggtgtatcaagaagatgccattgacaaacaaggtgcagctgaggatggcagcggtgtgaagtcacaagaggacaacatggtggttccaggtcaatgtacagatggccttcctgtactagatgagggtaatgtggtgccacagtacacaagtgatcaactgagaacaaccacagataacaatgctgcagttgatccagagttggtggagcaagaaggtgttgatagcatagtgggtgcagccaaggttggtattgctgtggaagaatcgcgagaggacatcatggtggaaaagcaagttgaaggtgttcttttacaagatcaagatgaggcagtggagcaatgcaccagtgatcaactgaggacaatcacagatggtaatgatgtggaagatcaagaggtgcacagagagaaggttggtctctctgaagggtacccacagaagcctgagcaagttcttgatgttcaacgccacactgcaacaggatgggatgatactaacttgcaatcttcaccacactcaaagaagtcacctgaacataaaactatggatgacatatcgtctggatctgaggttcttcctccaaacatacttcggatgcttttacctccccagaatgtgccccctagtacaaaagaaaaggaaatcaggataaaaaaggatcctgattgggcttcagcttcagatgattctgatggctgctgctcggccgatagttcagatgggcctttgtgcaagcaggaacatgaggactatcctgagaggcctgaatgccctttccttcttagatttggacatcaacacgacaccacactcaccgtcgacatagagtgcccaaacaacacaggcagcggcaaccccacacgagagcacaaaactgctaaaggtcatcgttatcaagcaaagatgcagagcatccaacaactccgactttccaaagcagccaacaggcgaaccaaacaaaaagcagatagacaacccgaagcgaaaggtctcaacaagtcatcgttgccgggctcaggcacaaagcagcttcgacttccaatcttgaccctctgccctgcctccggtttttgcccgaccttcgaaacattctggaccacgaagaagggaggcaccgagaagcgaagcaacagccgaaggcaaagtcctggccgagacgaacttcagaagcgacgccttcaggaagggagtgacgtcactgtgacgccaccgtcacctgtccgtgatggaccgagctttcacccaaggaagatagcactggggtgtgacgcccttaacaggggaagcgacgcccatgggcgtcaccgtcgccgagactttcgcccaagagcccccagcacaacgtctggccgaaacctcgagacacagcaagctgcctccgccgtcgccgacgagaggaggtcccgccactgcaattccggccgactgcgcaggcctgccggcgcaccaacgccgacctccaccccggctcatgcgctagcccgggaccagcctgccgccgcctccgacggatggcatgcggaggccgccaacctcgcgcgccagatccagccttccgcgcgccaacgccgctccccctgggggcgccagatccagccctccgcgcatcagccacccgagtcgcgagggggcgaagccggggccgaccacgccgacgagcaactcacggtgaccttggcggctgtgcccgcccagatccaccagagggagacggagatgccccgccgccgccctccccgcaagcagccgaaccttccggcggccagctcaggcagcggcgcggcagggagaggcccacgaaggggcggcggcggctactag

SEQ ID NO: 32742 - DNA, 596 bp, Zea mays
  Peptide Sequence Number=SeqID_76117
atggtggtgatggagggtaatggcggcgccggtaggatcaccattggcgtctgtgtcatggagaagaaggcgttctcttctccaatggagcagattctcgagcggctccgcgcgtttggagaattcgaggatacagccacaacgcgaccatggccggtgaggcggacgaatggggcgggtcaatgggtgggcgcgagcggggctagcgtggggcgtggcctgggtaggagtgggctggggcaggtgcagccgatggggccggggcacaaccaaaacacgtggccagacgatgccgggggcagccacggcgtggccatggctggcgaggtggccgaccagggtgggcccggtgtgggggcgcgactgaggcagaagcgggctggggcgggcacaaaggaagaagaaaaggcgatggaggaagaagtaaaaacgaaacgaactggtacacgtgtaataggtgtgaagattataatatttggagataaagttattctcgacgatcctattgagatttggccaaactgtgattgcttgattgccttctattcctctggttttcctctgcaaaaggttcaagcatatgctgctttgagaag

SEQ ID NO: 32743 - DNA, 459 bp, Zea mays
  Peptide Sequence Number=SeqID_76118
atgggcaggctgggctccagcggcaggctgcggaatggtggagggaagagcgagggaagaaggcgactgggaggaagtgatatgcgcaggagggcaagtgcgtcgggtaccacccccttccctcccatcctcctttatctccctctccaagcgatgattgcggggaatggtagagaaggaggaagacgtgggatgggggcgcgatcatcgcgcggtgatgagggcggctcgcgtggtgatgagggcgatgacatttttggaaaggaagggcggcaagtgcgctggagacggacggtggcaggggagggggcattgatggagatgtggaggcagaaccgtgcaccatatcctgtgaacggggacctcatggtcgtcgccaacgtcggcgactctcgggttgttttgggcaccgcatccgacaacggcgccgtcacaccgtccagctcatcatccacctga

SEQ ID NO: 32744 - DNA, 567 bp, Zea mays
  Peptide Sequence Number=SeqID_76119
atgtggggacgttctacccgaatcagtataaatatcgcgctcactgagctcaacatccggaccccagaacgtgcacaaacaaatttacttgtcggagtaggttcgaaacaccgacatagtgtttatttaagcgagcatctggagaagtatggaattcctgtgcccagttatgctcttgtcaatagagaatatccggaccaagagctagactacttcatcgagcaagaagattttgttgaggtccatgggaagcggtttttgaagccttttgtggagaaacctgtcaatggggatgatcaccgaataatgatatattatcctagttctgctggtggtggaatgaaggaattattcagaaagctctgccgacctatcctcgcatggctccgctgcatgggggctccaacgcgggaaagtcggatctctgttgcggtcactcgctcgacgttgtgggtcgtctgggtttgcaccaatccggcctcatgtcgatctgctttgctggttgtctctctccaggcccacgaaagaatgaccttacgatttactgggcccttgggcctttcgtga

SEQ ID NO: 32745 - DNA, 351 bp, Zea mays
  Peptide Sequence Number=SeqID_76120
atgagggagtacgctgctcggccttttttggtgaatgaattggagccacaatacctcctccatgaccgcagaaaagtgtacgagttcaattcaggccatgggaaagaatatgaaagcgctgggcacctggccataacaaatgttggaccgccgatcgcctcgccaaaagggggctgccacaccctgaatgctgtccactttgcgaccaagttgaggagacaattgaccactttccagtttcatgttttttcactcggcaactgtggttcaacatcctgcataagtttggtgtgcagtccctatgtcctcagcccaacgacatctcctttaatgatcggtgggcaagattag

SEQ ID NO: 32746 - DNA, 786 bp, Zea mays
  Peptide Sequence Number=SeqID_76121
atgggccttggttgtccaatatctcagatctggactcgtcatcgccaagataacttaagcatggcaggcgtcatcgtgtcctcctcggcggcacgtacagagaagagccaggagcaagaccgactcacccgtacccgcgtcgacgagcgtcagtcggctcgcggctgcgaccgcgggcgggggcagcaagttggggaggaagaatacggcgaaggtcgggaagacgaacgagacgtccgacgatggcgaaatcgatggtgcgtgcatgatgtgaaacgtcctcgtggacgtgcaatagccactgtgcgagtcggtccggggctggtgtcggacgaatacgggaagggggcacatgctcctacgccctctgccgagaatggggtcgtacggagttggaggcataagggaagagagaaaataagtagaatggcgaccgagatggtggcaactgaggcgaggaccatcattattgtgcggagggggactgggggagctaccgagcacagtgcagaggtcagaccgtcagagggagttgctggtgcagtggtgcgggggagatcatcagatcagaggggtgtctccatggccgacaatgaggggaccctggacgccgtcctcaaggaggccgtcgacttggtaactgctggccttcctcttgttggggttgggacggttcttggtgggacaacgctgccgttgggcatatttgctggttcttggatttcttggttattgcgttggtgtacaatccttctgttatactatgttctcggattcctgcgttag

SEQ ID NO: 32747 - DNA, 1137 bp, Zea mays
  Peptide Sequence Number=SeqID_76122
atggccgccgccgccctccgctcctccgcacgccggctcctgcgtctcaccccggcaccctcgtcggctctgttcgccgcttcccggcccaccgccagggttgcaccgctctcacgccccatcgccgctctgtcaggtggcaacaatcctatctcatggaaactgagacgcttcttcagttcaaatgaaaagcacttgcctgcaatatctgatccagagatcgaagctgcatttaaggatttgttggctgctagttggaatgaacttccagattctctcgtagcggaagcaaagaaagcagtatctaaagcgaccgatgataatgctggtcaagaggctttgaaaaatgtatttggtgcagctgaggcatgtgaagaattcagtggaaccttggttaccctaagaatggctcttgatgatctgtgtggcctgactggcgaaaatgtgggtcccttacctggttatattgaagatgctgttaaagctgcatataatcgctacatgacatatctggagtcctttggccctgaggaaaattatctaagaaagaaggtggagactgagttgggcacaaaaatgatacacctcaaaatgagatgcagtggcataggttccgagtggggaaagccaagtccggtctcaggcgccatagaaagctccgcctcgcccgacccagggctcggactcgggctcagccccggaagacgacgaactccgcctcgcccgacccagggctcggactcgggctcagccccggaagacgacgaacttcgcctcgcccgacccagggctcggactcgggctcagccccagaagacgacgaactccgcctcgcccgacccagggctcggactcgggctcagccccggaagatggcgaactccgcctcgcccgacccagggctcggactcgggctcagccccggaagacggcgaactccgcctcgcccgaccccagggctcggactcagccatggcctcagccgacggtctccgcctcgcccgacccaggggctcggactcgacctcggcctcggaagacagactcgacctcgacctcggaggagcctccgcctcgcccaacccagggctcggaccgaccgcatcacaggaggggccatcattacccttcccctag

SEQ ID NO: 32748 - DNA, 405 bp, Zea mays
  Peptide Sequence Number=SeqID_76123
atggcggggatgcgctgggggcggtggctggggctggtgacggtggcgtgggtgcagtgcatctccggcaacaactacaccttgatgtccagctccagccccgaaaactgctcctcctcctcagaatggcccgaccgagcggcggcatcgcgctccaaccggtacctcttcgacgcgaatgcgcaggcccggtgcgcggggtacctggacctgatgaggctagaggtggatgcgcagctgggcaggctcaggggcggtgtcaccggcctggagagctacgccttgccgggcaacggccgtgcgatcagaggtgcgcacctgggcatgtcgcttgatgtcatgttgattgagattgatgagaggttcaacgccctgaagctgctcatgggctccgtgttccggtag

SEQ ID NO: 32749 - DNA, 720 bp, Zea mays
  Peptide Sequence Number=SeqID_76124
atggggaggttcgcggtggagtggatctacaggcaggaggggttgcagcggcccacgaggcgggaggaggagttcttgggcgatggaggcggaggttgcgcggatgcggcagctggcggaggtcggttggcggatcagatggcggatgattcgccgcgggcgagagcttgggcgatggaggcggaggttgcgcggatgcggcagctggcggaggtcggttggcggatcagatggcggatgattccccccgggcgggagcttgggcgatggaggcggaggttgcgcagatgcggcagctggcggagtcgttggctccatgtgctcggcctcggtagacatgaagaggtgcggagtaggtccagtggaggtcctccctcgccatccacgcaccatcctcgtcgtccgggatctaaggcggaggcgaatgcggatctgggagctagggtcggcatgcgaagggagcggtttctggcgccgatgacaggggctacagaggcggggggcatgggcgtggcctgcggggatggcgagcggcgcgctgacgccgagattggcgggggatggggggcgagggctcgctggcgccgatacccgggtagccgacccacacgacacacgacgtgcggctcgctggcgccgacgagaggagggagggggaagcgagcggtcggtgcttgtcgcaacggcggggatgtaggcggcggcgctactaaactctag

SEQ ID NO: 32750 - DNA, 558 bp, Zea mays
  Peptide Sequence Number=SeqID_76125
atggcgcttcctgttgacgtggcgggcctgtgccctaggtcgggcgacgtggaggctcctccgaagccgaggtcgagtctgtcttccgtggccgaggccgagcccgagcccctgggtcgggcgaggcgggggtcgttcggcacaagccagggcggagtccgagccctggggtcgggcggagcggaagttcgccgtcttccggggcttagcccgagtccgagccctgagtcgggcggagcggagttcgccgtcttccggggcttagcccgagtccgagccctaggtcgggcggagtttcctatggcgcctttggcaaggcctgactgcctgcctctgcagctttatgttgatgggggttaccagctgagaattaggcgtcttgaggggtggccgttgcgcgtgcgcgagccgttcgaggaacggctgtttcgcttcgcgttttttgaatctcgcgtctggtccgggcggagcgctggaaatggtctcgccctggtctttatatacccgggagagggtctggtgacggttcttcggtccgcctcctgcctcttcctttag

SEQ ID NO: 32751 - DNA, 459 bp, Zea mays
  Peptide Sequence Number=SeqID_76126
atgggcaagaacaacaagcgtaagcgtgagccgactcctccatcggaggagtttggtgattcggaatactcagaggaggagttctcttctgagtccgaggggtctccggctcccatccccctgcgtgagtcgtctgatgactcggacgactcccaggggcttgcggcggaggtctggacgtatatccgggccgtcgagcgctccgggctcgaaggctcggatgagtcggagtactcctcggatgaggaggactcggacggcggcgacgagggtgaagacgacgacgacgacgacgacgacgacgacgacgacgacgacgacggcggcagcggcagtggcaggggcggcggcgacggcagcagggacagcaccaagggcgacagcagcaggggcggcaccaagggcagcagcaggggcagcaccaagggcggcggcggcaggggcagggccagtggctag

SEQ ID NO: 32752 - DNA, 426 bp, Zea mays
  Peptide Sequence Number=SeqID_76127
atggagcaccgtcccgggctggagaggttgctggagactgcccatctggagcttgacgggaagctgttcgtcagcacgcagcaggcccctacctggcgcgccaactgtcggcgtctcgagaccggggggtccctaagccgacgagtcgggcgacgtggaggctcctccgaagccgaggtcgagtctgtcttccgtggccgaggccgagcccgagcccctgggtcgggcgaggtgggggtcgttcggcagaggccagggcggagtccaagccctggggtcgggcggagcggagttcgccgtcttccggggcctagcctgagtccgagccctgggtcgggcggagcggagttcgccgtcttccggggcctagcccgagtccgagccctgggtcgggcggagcgtagttcgccgtcttctggggcctag

SEQ ID NO: 32753 - DNA, 303 bp, Zea mays
  Peptide Sequence Number=SeqID_76128
atggcgcctttggcagggcctgactgcatgtcagtctcactctgtcaagtggcactgcagtcggagtggcgcaggcggcgctgtccttctgtcagaccgctttatgctgatgggggttaccagctgagaattaggcgtcttgagggtacccctaattatggtccccgacaagatggtttttaccttaatgtattccaagagtcttataaaggtgacatgttgtcctacagaacatcttctgaggaatacacctatatgagtcagactgctggtcacagtctatgggacttgggtaatccctaa

SEQ ID NO: 32754 - DNA, 1782 bp, Zea mays
  Peptide Sequence Number=SeqID_76129
atggcgattagggctggccgctcgccccttctccacctcctcgccctcgccttcctcatcctcgccgcctctccctgcctccaagttttctgtgatgcaatgtgggtaggccagatagccttctcaattcagagttcagacgatagtcatcctagtataagctcgagtggaccatcgcaaacagatggccctcatctcctgggtagatcaaaggaaataacacacatgaaattaaggagagttgctgtaaggaagaaaatggaagtagtgcagcaggatgatgaagcgttagttaaacttgagaatgcaggtatcgaacgttcaaaagctgttgactctgctgtgctgggaaaatacagcatctggagacgtgaaaatgaaaatgaaaaggcagattcaagggtccgtttgatgcgagatcaaatgatcatggccagaatatattctgttcttgccaaatcgagggacaagcttgatctctatcaggagctgcttgcaaggctcaaggaaagccagcgctcccttggggaagctactgctgatgctgaacttcccaagagtgcttcggatagaaccaaagcaatgggccaagttttatcaaaagcaagggatctattgtacgattgcaaggaaattacccagcgtttgagagcaatgcttcagtcagcagatgagcaggtccggagcttgaagaagcagagcaccttccttagccagctagcagctaagacaatcccaaatggcatccattgtctttccatgcgcttaacgattgattattatcttctctctccagagaaaagaaagttccccaatagtgagaacctggaaaatcctgatctttaccattatgctcttttctcggacaatgttttggcagcatcagttgtggtcaactcaaccatcatgaatgctaaggagcctgaaaaacatgtatttcatcttgttactgacaaactgaactttggggccatgaacatgtggtttttgctgaatccacctggggatgcaacaatccatgtggaaaatgttgatgacttcaaatggttaaactcttcttactgccctgttctgaagcagcttgagtctgcagccatgaaagaatattatttcaaggctgatcgtccgaaaacactctctgctggttcttctaatctgaagtatcgaaacccaaaatatttgtccatgctcaatcatctaagattttacctcccacaagtctatcccaagctgaataaaattcttttcctggatgatgatatagttgtccagagggacctaactggactctgggaggttgatcttaatggaaatgtaaatggagccgtggaaacatgtggagagagttttcaccgatttgataagtacctaaatttctcaaacccaaatattgctcagaattttgatcctaatgcatgtggttgggcttatggaatgaacatgtttgatctggaagaatggaagaagaaagacattactggaatttaccacaaatggcagaacatgaacgagaacaggctgctctggaaactggggacattgccaccagggcttctaactttttacaagctgacacaccctctggacaaatcatggcatgtgcttggcttagggtacaatccaaccattgagcgctcagagatagacaatgctgctgtcatccactacaatggtaacatgaagccctggctggaaattgcaatgataaagtatcggccttactggacaaagtacatcaattatcagcattcctacattcatggatgcaagatcagccaatag

SEQ ID NO: 32755 - DNA, 1425 bp, Zea mays
  Peptide Sequence Number=SeqID_76130
atgcaggcggcatgcaaccgcgccaggtgggcgcaccccttcgactccaacgcgcccagcatggaggcccaggcccacacgtcatgcaaccggcgcgccggttgctacgtgcgagcaactgcaccgccactcgcgccattaccgcgcctcctcgactgcggaaccagtaccgcgactcgaggcaaccctgcgtatgacccaacagtgccagccaggcacatcggtcacgggtcagtcagctgtgggaaaaggcgcgaccgtcaatacggccaaaactgggccggcagtaatggcagtggcaggcgggcggaagcagcggacagacgacacctttggcaggagaagcgggcgacgcttcgccttcgccataatgaccgcgtcaaaaaagggatcgggaaaggggataccccgaaagggatccttccccgcgaaggaaacgggccccgagcccccctactgatcagaggttcgaaggctggcccctcggaggggttcaacagccgcctcagagcgctcgggatccgcgcccactactggtcagaggttcgaaggccggcccctcagaagggttcaacggccgcctcaggccactcgggctccgcgcccactactgatcagggcgggaatgatcttgtaacggaatcccatcagagggaggcatcgagccctcggaccccgtcaaaaggggaccgggtccggcagatcacccgcagctcactggagacaccatgttcggcgccctccaagggaaacatggcgctttcccccctcctccttgcggaaaggcgacgcaggggcggctcggactcgggctcaaccccggaagacgacgaactccgcctcgcccgacccagggctcggactcgggctcagccccggaagacgacgaactccgcctcgcccgacccagggctcggactcgggctcagccccggaagacgacgaactctgcctcgcccgaccctagggctcggcctcagccctggcctcagccgacagtctccgcctcgcccgacccaggggctcggactcgacctcggcctcagaagacagactcgacctcgacctcggaggagcctccgcgtcgcccaacccagggctcggaccgaccgcatcacaggaggggccatcattaccctacccctagctagctctggctacggggaacaagaccgacgtcccatctggctcgccccggtaaacaaggccctcttacagaaggttggccgcgcggggaaggacgggacggtgctcgcaacaggaaaggctgatggacctaataagattgttattaggggcaccaagcgtaagatcgacaacgacatcactgatcgcctggacatttcaaaaccaaatggaagtgcttctccctcagactacaagacagtattaggggtgcttggtttaaggatcaactcatcctag

SEQ ID NO: 32756 - DNA, 1002 bp, Zea mays
  Peptide Sequence Number=SeqID_76131
atggcggctgcggcggcgcagaagctcctcgaggcgagcacgaagatcatcggcgtcgggcgcaactacatcgcccacgccgaggagctcggcaacccgatccccaaggagcccgtactattcctgaagccgacctcgtcgttcctccacgctggcgtggccaccgccgccgtcgagatcccggagccgctcgaatcgctacaccacgaagtcgagctcgccgtcgtcatctcccggcgtgggcgtgacattcctgaagcgtccgccatggacttcgtcggaggctatgcacttgctttggacatgacagcaaggggccttcaatctgttgctaaggttccaaaatcatctgtcactaatcccgacgatctcgagctatggctaaaggccaaccgcttgaagattgctgctcgtgtcacgctcacgcgttcctcttggacgttcacaaaagcttttggtgcacggttctgccgaggatctccgccatcaatgcccgcaatcggatcggaccagtacgcgatatcagcaccgcccgttgccgaggccgccatcaacgccatcctcccgcaatcctcgcctactgccttgcctgccccttccatccttctccccacccctccttccatcctcgcccgcgcgctccgcacgtccccgccgtcgcgctcgcctccctcctctttgttgcctccgtgtcggcctccacccctctccgacgcgcttaccaccgtctcggatttcagcgccgccgcgcctgcgctatcccacccaatggatgtgctgctgcctctgcagcatgccccgtcgctaccgaccccgcccagccatgcatttggagttcacaatgtggagacatggtttattcaccggacgacgaggatgccatttagccaatgctcggacttcaccccaccccccaccttcacgatccatagcctcgaggaggaagaggagacaggggcaccgatgaggttcaatgcctatgagagggggtgcacgatgtga

SEQ ID NO: 32757 - DNA, 147 bp, Zea mays
  Peptide Sequence Number=SeqID_76132
atggggctcggtgtatgcggctcgctctgccaaggtggtgatgagaatgatggttttgattatgattatggtaatggtaaagaagaagaagaaggcgtcgaggcagatttccaggagttccaggacatcgacgagttcgaggattag

SEQ ID NO: 32758 - DNA, 177 bp, Zea mays
  Peptide Sequence Number=SeqID_76133
atggggctcggtgtatgcggctcgctctgccaaggtggtgatgagaatgatggttttgattatgattatggtaatggttgcctttggtgcaacctatgctcaggtaaagaagaagcagaagaaggcatcgaggcagatttccaggagttccaggacatcgacgagttcgaggattag

SEQ ID NO: 32759 - DNA, 297 bp, Zea mays
  Peptide Sequence Number=SeqID_76134
atggcgcttgcccatgaggtacatgaggttgatgtcctcattcattgtatctcttcgtggcaccacgcaggccgtgccacccacgtcctcactaagctcgccaaaaacaaggaggttgtcaacgtgattgtagagggcagcgtcgtgacggccttggtttgccacctagaagagcctgttgtggcggtgcaaacgcaggaggaacaacaaatgcaaccgtttgagcatgaggttgagaaggggagtgcctttactccaggcctcctagctggaaaggttccttcattaattccctaa

SEQ ID NO: 32760 - DNA, 729 bp, Zea mays
  Peptide Sequence Number=SeqID_76135
atgacctccgcctccaccttcctctctctgcgcctgcccactccctcccacgccacttcgtccctttccttccccccgtctctgctccggcaggcgcgtggcggtgtggcgtcctcgacgctggtggcgcgggcggcagggccaacgggagcggcgggagctccatcgccgctattcaacccccggggagacccgttcctgtctaccctcgcagccgcctcaccggaggaccttgcggccgccgctggtggcgagcgccgtggagaggaccacctgccgttcctcgagatcttccagaacaccaaactcatggcctcgcccgcgcaggtggaacggtctagcagctcgtatagtcagcacagacctagaaggcctcctccagatttgccttcattgcttcttcacggccgaatcgtttatattggcatgccgcggggcaagacgccgggaggagaagtgcgccaggagggtagttgtggagagccccgctccaatgagctctttaatttttcagaggacgtgctcctagctttcgtccatgtccagaacgtcttcccatcagacccagttgaccattggctctgccaccgacatctccaggacctgagcctcgaggtatgccacatcatatcagaaggggtacaatcacgaggtgtgactgttatcgatgctttggcttctgagcttaagacaactaaaagcttggcccgtgcatggcacactgactag

SEQ ID NO: 32761 - DNA, 372 bp, Zea mays
  Peptide Sequence Number=SeqID_76136
atgtccttcagcttttgccatgaggtgattgttcttggccgaagagaggagtatcaggaatttgaagacgcgttccgctataattcaccggactgtccggtgagccagcagagcaacggctccctgctcatccaacggtcaactgtggagatgtcaaagcggaacagtgctgcgcagaagtcagaagcgcataagtcagagggcaccggactgtccggtgtggcaccagactgtctggtgcagctagatgacaaaggctccaacggtcaaccagcttcgaaccctaacagttgcgctgatgtggcgcgcaccggacaacgcatcggactgtccggtgcgcccatcgccagcagccttcaccaacggctatga

SEQ ID NO: 32762 - DNA, 306 bp, Zea mays
  Peptide Sequence Number=SeqID_76137
atggtcgagtctgctctgggcatgcaattgtgcgaggaacagttgcaggagtggcctcctatgggatttgcagggggcagttggccgaggccgagctcaggcatggcagagttttttccgaggctgaggccgacttcagacgagagacctttgactgaggccggcctcggggttatcctcctgtccgagacgggctcgggtgaggcggaaacatccgttccgcgaagaggggacctcgggcgggacgaggacttcctcaagtgctgccctcgcccgagggaaggctcgaacgaggtggagttttga

SEQ ID NO: 32763 - DNA, 384 bp, Zea mays
  Peptide Sequence Number=SeqID_76138
atggcgctctctacggaggcatggatggtccacggcctggcgcagaggctagggttcctgtctaatgagtccgacgaagtagaaatcgagaataaaaaaacaaaggtcgtgttcacccaggtagctttcttcttccctatgctcttcacggctgccagccaccctggcttctcttccccacgccaccccctccatctttgttttggctggcacatggagacctcccatgtcactcgggcagcagtgctgctcctcccccaaccccctgggcgtgctccccacacgacagctggcacagagcaacaaccccatggctcctccttccctgtccagcgacaagtccgtggtcggacgatgtccctgctcggcgccctgcccacttga

SEQ ID NO: 32764 - DNA, 315 bp, Zea mays
  Peptide Sequence Number=SeqID_76139
atggcctccgccgtcctcagccctagggaaaactcttacactaagaaaactatggtgttggggcgaaggcgaagacgttacccttcgctcgaagccttcgccaatcttactgcaccaacggagacaaaacgaccgacggggcccacccttcgtcctctacactgcaagacgaaggcctacgacgaggccgccccgtaccacgtcctcacccaacctggaggcccacgtgggattcggcacattgtaacaggccccgcgcggagaatctgtaaccctctcttatgggaatattccggggatagtccaggtgcctga

SEQ ID NO: 32765 - DNA, 300 bp, Zea mays
  Peptide Sequence Number=SeqID_76140
atgacgctcagtggtgttgggactggcagttcgatcaaagccaagggagtcacgttcgttgagttaaccgtcaggaccaagacccttgatgctgcattcttcgtcgctgatttggtaggagatgaggtagaacaagtacatgttgatgcatcggcctgcatcgccgtggccgatgctcctgtaagcttaaatggtgtcaagttcgccaagcaaaatgatctagcagtcggtgattattacaattcaatgatgaacaatattgatgaagtgaccgacaagagagtgatagctctaggataa

SEQ ID NO: 32766 - DNA, 654 bp, Zea mays
  Peptide Sequence Number=SeqID_76141
caggagatagagtctgtgaggagctgctcccccgtgcttcccctagaggcgccccctgcaccaccactgagcgccctagcccctggagtagctgctggaggagacccagacgacggaggtggcgacaacagctcgagccacgacactgacttttctgctagccaggagccagaaggatgggttgctcgacccatcactcacgacgctgctcaggtctgctcagagcactattccatctctgagcgggactcagctgaggcagccatgcaagatgccgcatggcgtgcgctttcgcactactgctcagtgttcggtggggtagccgacggtctcaacctgaagtattacccccgccgtccatctggcagcacaggaggcgtgattgtttcacctgtcggtgaggacaatcctaggttgagcagcacagtcaacctagccgccgtgctaaacacggagctggaccatgcgctagacgagctgagtagggctcgtgctgagatcgccgagctgcgggctcagcgcgcggagcgtcgtcacctggatgatggctcccccgctcccgtcgggactcagcacccgtaccgctcacctcggcgtggacaccagtcttatggcaatcccgactgcaagaccaagatagacttaggaccatag

SEQ ID NO: 32767 - DNA, 207 bp, Zea mays
  Peptide Sequence Number=SeqID_76142
atggcgcgacctgcgcgcggccatggcgcggcgacacggctcgcccgcgcccggctcgagaacgatctggttgaggagctcgaggaactcacaggagaagcccctgagcagcagtcggttggtggaggcaagtgtcccttgacctatctctgtcctatacattctttaattcacctcccgcattacacatttatacctaaggattga

SEQ ID NO: 32768 - DNA, 606 bp, Zea mays
  Peptide Sequence Number=SeqID_76143
atgcaggcggcatgcaactgcaccaagggggcgcaccctttcgacttcgatgcatccagcatggaggcccaggcccacacgtcatgtaaccggcgcgccggttactacgtgcaaaaaactgcagcgccacttgcgccagcgccgtgccttctcgactatggaaccggtgccgcgactcgaggcaaccctgcgcatgacccaacagtgccaaccaggcacgccggtcacaggacaggccacacctttggcaggcgaagcgggcgacgcttcacctccgccataatgaccacgttaaaaaaggtgcgccccaacattcaatttcgtatcattttcctcttcccctttctctctcttgctacagacaccgggaaagggggatactccgaaacggatccttctccgcgaaggaagcaggccccgagcccccctactgatcagagttcgaaggctggcccctcggaagggttcgacagccgcctcagagcacttgggctccacgcccgctactggtcagaggttcgaaggctggcccctcgaaagggttcgacagccgcatcaggccactcgggctccgtgcccactactgatcaggggttcgtaggctag

SEQ ID NO: 32769 - DNA, 777 bp, Zea mays
  Peptide Sequence Number=SeqID_76144
atgggtcgacgcgagacggagacacaaggggggaaaacaggtaatgatggcccctccttgtggcgtggtcggcccaagcgaggtggtgactcctccgaggtcgaggttgagtccaagcccgggggtcaggcgaggcggagaccgttgtccgaggtcaaggtcgagtccgagccctggggtcgggcgaggcggagatcgtcttccggagtcgaggttgagtccgagcccgggggtcgggcgagacggagaccgtcttccggagtcgaggttgagtccgagcctgaggatcgggcgaggcggagaccgtcttccggagtcgaggtcgagtccgagccctggggtcgggcgaggcggagattcctatggcgcccgaggctggacttggctgctgtcagcctcaccctggcgggtggcacagcagtcggagcagcgcaggtgatccttgcattaaatgctcctacgatccggtcggctggcgaggcgatctggccaaggttgcttctccgcgaagcctgtccgaaccgggcctcgggcgagtcaaagctttgtgctgatgggggttaccagctgagattaggagccttggggtcaggttctgagttctcgggcttgtatgttgacgctgtcaatggtttggccggagccgggtttgcgagagcagcccccgagcctctgcacaggggcgccgaacatggtgtctccagtgagttgctaacgggtgatttgccggacccggtcccgttcgatagggtccgagggctcgatgcctccctctga

SEQ ID NO: 32770 - DNA, 921 bp, Zea mays
  Peptide Sequence Number=SeqID_76145
atggctgctggactgggagcgcgcccctccgccaccttcgtggccggaaggttccggcctctcgctgcccctctccgccccgtccgctccggcaagttcgttgtgccaaagcgatgcttcattgtatcaagcaggcttgcatgggtggaagatgagcttatggagatacaaaaaaattcccgatacgtcccggatacgtatccggaagtatccgaggagtatctgtatccgatacggtatccgacaccgaagaaaaaaactgcctttgaaaccgctttaccggttcaggatgatgttttgtctggttttgagagttgcagggtgtttgctgtgcaagttggagggcacattccaagaccatcttatgttggtgcgaaaggattgcctgaactatgcaagggccaattacatgatgctcaaggaattactggaatgagagctgcttgcaaacttgctgcccgtgttcttgacttcgctgggactttagttaagccatccattactacaaatgaaattgacgcagcagtccataatatgatcattgaggctggtgcttatccttctccacttggctatcatggatttcctaagagtatatgtacatcagtaaatgagtgtgtctgtcatggggtacctgattcaactcagctgcagggataccatgggggtacctccagaacatttgcatgtggacaagtggatgattctatcaaacattttctcaatgcagctgaagaatgcttggagaaaggcatttctatctgcagggatggtgtgaactacagaaagattggcaagaaaataagcaagcttgcctatttttatggctattatgtggtggaacgctttgttgggcatgggattggaactatgtatcattctgagccactaattctacatcatggtgggtaccatttttga

SEQ ID NO: 32771 - DNA, 630 bp, Zea mays
  Peptide Sequence Number=SeqID_76146
atggttatacgccccttcatttttgaagcaaccaacggtcgagaagacaaaccgccacacaaggagcgtgcaaccgccccacggttatgcgcctcttcattttcgccgaaaccagcggtcaagaaggcgaaccgccacacaggaagcatacaaccgccccacggttgtgcgccccctcagcttcgctgcaatcggcagtccaacatgggggccaggcccacatgtcatgcaaccggcgcgccggttaatgagtgcggaaaatcgcaccgccgcttgcgccaatgccgcgtcccctcgggaccgccgcagaagactgaaaagataagttttcagaaccagtgcaacgactcgaggcaccccacgcatggcccaacagtgacattaagtacaaaggtcacgggccagtcagccgtgggaacgggcgtggcagccggtgtagccataagcgggcctgcagtaattgcatcaacaggcgcgcaggagcagcaggcaaatcgccaatcagactctggccccacctgtaggctcgcaccctcccctgaggcgagcccgagggccactgtcagtaccctcaatcaggggtatcctctactacagtataaagacgccgcgcggagaacggcatcctga

SEQ ID NO: 32772 - DNA, 798 bp, Zea mays
  Peptide Sequence Number=SeqID_76147
atgaccaccagcttcgtggtggggagaagcaagccaggctgcggcctccccccccaccctcagcttcaaggatgttcatcatccttgctggggtggaaggcgagccgagtcagggccctgccctccgcatgggctggtgacccgcttattcctccagcattcggaggagaaggatgttcactagccttgcgaaggaggcgaatcttggctacgcggggccggctggctgcaggccgtcagctgcagcgtgtctggccctttgggttggatggctttggtgccgcctccgacactgcctcctgtcgtctggccggggcatggctgtccatccatcgcacgggcgacggtcgcatcgtgcgtgggttcgccacatccacggcttctcctgcccgccggccgcactggggggtcgtacaagacgccgtacgccgcgggggtggcggccgcgttcttggatggtcttgtcctcactcacgtgggaggacgggagcgaggaccccttcgcacgtgctgaggcacccgtcgtccaccagtgcagaggtggccgctgtcgtcggtgctgaggtggtcgccgccgctggaggacaggggcgaggacctcctcgcaatggtgcacaccctgaggtggtcgccgctgctggcaagccgcttggagtggaggtggttgtcgctgcaggtgcagaggtagtcgctgtcgccggcgaatcgtcggtgcagaggtggtcgccgccgccggtgaggctgcttggagccatcttccagcgcgactgtcggcgtttcgacctggggggtccctag

SEQ ID NO: 32773 - DNA, 999 bp, Zea mays
  Peptide Sequence Number=SeqID_76148
atgtccctcataagggattacaacggtgactcaaacatttatggactaaaaggtcattctacttttatgtcggtttgtaaataccgaagcttcatgaagaggaaccttcggtcatctcatacgaacagcttcagccgaaaactgcttcttcctacaagaccttcggcgacgaagcatagtcccaacaacagcagtcggagcggcgcaggcagcgctgtcctcttgtcaggccgggcgcgcgtcaggataaggtgtcaggccacctttgcattaaatgctcctgcgatacggtcggtcggcgtggcggcttggccaaggttgcttcttggtgaagtctgggcctcaggcgagccgaagggttgcctcgagtcgcggtactggttccgcagtcgaggaggcgcggtagtggcgcgagtggcggtgcggtttcttgcacgtagcgaccggcgtgccggttgcatgacgcgtgggcctgggcctccatgctggacgcgtcgaagtcgaaagggtgcgccccttcggtgcggttgcatgccgcctgcctggcggtctgccctttcacccgctggtctgggcgaaagtgggggaatgcttgtaaccgctgggcagttacgcgcgccgcgtgcggtggtttggcttcttctgccctgggccagcttgcatgacgcgtgggacccagcccccgtgtcgcagggggaggaccttggagcgtgttggagaagacttagcccacgatggctgaggacgcaagtgaggagagttgcctttaaaaggggggtgacccccttgaaaggcaaccatgtcttcgcgttccccttatgcatcgtgtctttccaccttccgagcccccggatgggggatactcgcagtctttccaccttgtcgtcggaggaatgcaacttcgcggaagttggtacctttcagccatcgttcggcttcaaggattttcatcaggcagcccggctgcatcccctcgccggtggtcacccaagatggtga

SEQ ID NO: 32774 - DNA, 255 bp, Zea mays
  Peptide Sequence Number=SeqID_76149
atgccccacttgacggcgggaggcagcattggaggcggcaccaaagccatccaggccaaggagccagacacgcggcagctgacagcgcctgcagccggccggccccgtgtagccgaggttcgcctcctccgcaaggatggtgaacatccttctcctccaaatgatggaggaagaagcgggtcaccagcccatacggaaggcaggaccccgactcagctcgccttccaccccaacgaggatgatgaacatccttga

SEQ ID NO: 32775 - DNA, 405 bp, Zea mays
  Peptide Sequence Number=SeqID_76150
atggatgccccggctgatgttctagaggtcaagaaaaagagaaagctttggcatatgttgggcatggaaccagtgcctgcccagactaagctagccatcggcggtgatgtggtagatgatgatctagtagatgatgtggaaggtggaggcgtggtcaaaacggccagatacattgtggaggaaatgggggaagatgaggaagaggaggaggtgttcccgctggtccttcatgagcgacactctaagactcgaaatgatgcttcgagccttgcttctctagtgaggatgatggagatccaagctccagtcctagagggcgcttcagcccctgagggtgtagcggttggctcctctcctgctatttcagtggaagtccaggttgggttgtgtcacacatggttttaa

SEQ ID NO: 32776 - DNA, 414 bp, Zea mays
  Peptide Sequence Number=SeqID_76151
atggagcttagagggtgtcgcaataactccctggctgccgacaacgcccccggtgacgcccttgacggagttcgggatgggaagcttcttgtagaagggataacacagtgcgctgcttggcacgggcgcactgtttgccagcagacccagcaggcgcgccgcctgctggatgaccttgacgccatctgccagcggatgggacgggacacattaaatgctgagagggcacgtcgcccgctcggcccgatggcttatgtcatgggccacaagcagcgggcctttgcctacgcgatgagcggagaacaaggcctgcacacgggcccggtgaccctctatgggggtccggtcttactgaggcatggtgcctttcctcgccacgtggcgccctttggcccgcccatccggtggagttag

SEQ ID NO: 32777 - DNA, 2037 bp, Zea mays
  Peptide Sequence Number=SeqID_76152
atgccgcgcacgaagaatgtgtcggcgccagtgggaggcgatgatgaggatcctcgtcgccccttcaggcaggtcaagggcaagacagtttacttagagcagcaggaaggccgcaagaagcggcgtacggacagagcagcccgtgcagcggcagcagcagcagcagccgctgcgcaggccaagcttggagatcagccgcagactccgtcagatcagatcgcataccgtgttcgtcgtctcgcctcccggcctcgctcctccactcacacctctgcttccactccgccacccactctgcctgctcccgtcactcctgttgcgccatccaccaccacagccacacccgctacctccactacgccagcttccactgctcctcctcctcccgctcccgcgtcagctcctcctgtccctccacctcgtttccgggagcgcgatgagactgaggtacgaccacttgctgcggatcctagactgtttgaccttcagcgtgctacagcggcacgggtacgtaggttcagatacgtacccgtggagtcttggttaccagctcagagggaccctgcagcaggtgacctattcagcacacgtattcaggagtcgtttttcagagcccagatgtctgctcagatagctctacgagtgcaccggcttttggatcttccagcctttctgcttgcagccggtgatgactctgaggcgcacctcacatatatgcctggccttctgacccttttgactaccagcggcaggtatgttgaggagtgggtccgagttttctacgcctctgtatggatagactcggatcatcactggatgaggtttcgttttgagcgagaggatgtcaccattactaccagtcagatccaccagctctttggatttcccgagtcgacgactcgtcttcacagcctctgctacggcacttctgaccctcctcgtcgccctcacggcggtgtggctccgggtacagctcacgtcgcggctctgttccgcccgctcgattcgcgacgttcaccggcagactttactacagcagccaagtacttatttgagcttatcagacggactcttctgccgaggatgggatacagggaggctaccacacatattcaactttggctccttggtgccctggtctcccactctgagtttgacgtcgtggatttccttatttgtgagatcgaggacaccgttttggatgggattcgtgctcgtagacagttgccatatgctcactacttatgccacatctttgcgcagctgattcagcctcctcggtttcaaggcacccttgaggcctcacgccttgtctttggatcctaccgtcctgcgcctgaggctcctgtgccagcttctgctcctgtttttgactctcaggccgaggatgcagctcttcgtcagttcgacactcagggtacagcagcagcagctgatgatgatgatgatgattttgaggttcctcctccgcctccgcctcctatgcctccgcgctctcatgatcatgaggctgggagttctagtgctgcccctgctgcccctccggctatggaccctgctcttgcttcgattctccagtctatcactcagcagcaggctcacctggcagccgagcaggcccggttatccgagaggatgctctcgatgtttcagaacatgcaggacaggcaggatgcgcttcagcagcagctactccaggatctggctgagagcagggcattcatggctcttatgctacagcagtctggtgtctcagttcctccggttcagtctgctccacctcctccgcttcacgctccagttgtgccatcgattttgtcaggaccccctgttggtacttctccgctccggcccggtcactttggctttcacctctccggttctcagctctgtctgcccgcagccgccagtgccaccagcatctgttgtctccactactgctgtggcaatatctgtgaccacttctcttccaacagctcctgcagcgcggcctcactccgtgtcagtaccagctccagcttctaccgcagatcctga

SEQ ID NO: 32778 - DNA, 186 bp, Zea mays
  Peptide Sequence Number=SeqID_76153
atggagggggctcggcgtgggagagctgggcgtcttctccggccaggggagcatagggcgcggtcgacggtgccgagccctggcgtagaggaaggtcgtagggggaggcgcagtggacatgagaggcagggctcatggcctatggcctggcatggccgagcaagaccggagggagctgagagccat

SEQ ID NO: 32779 - DNA, 501 bp, Zea mays
  Peptide Sequence Number=SeqID_76154
atgaaacgacaaggagggagttttgagaagctcaaatggctcctaaaggcttactccgctcctgccaagaagggtgatgccaaggcccaggccttgaaggtggccaaggctgtgaagtctggggcaggcaagaagaagaccaagaagattcgcacatctgtaacatttcaccagcccaagaccctgaagaaggccagggacccgaagtacccaagaatcagcactactggaagaaacaagcttgatcagtaccaaattctcaagtaccccctcaccacagaatctgcaatgaagaagattgaagataacaacactctggtctttattgttgacctcaaggcagacaagaaaaagatcaaggctgcggtcaagaagatgtatgacattcaagcaaagaaggtcaacaccctgatcaggcctgatgggaagaagaaggcttatgtgaaactgacacccgactacgatgcccttgatgtggccaacaaaattggcatcatctaa

SEQ ID NO: 32780 - DNA, 369 bp, Zea mays
  Peptide Sequence Number=SeqID_76155
atgtcacgcgcgttcgacgactactatatcaaggactgtggcatcatctcggcgctggaggtgacacagaggaggaccgacagcaatgatcaattcgtcatcctcgccaccgtcgaggacttgtatgtatctcacaaattagtttcgtcagaaaatctgacctgtgcgcccaatagggctccgatgactcggacgatggctgaggtggagtaccaagacgacgacgaggatggcgacgagggtggcgacggcgagggcggtagcagcagcaagggcatcaacgacggtggtggtggcgacgatggtggtggccaaggcgatagcggcaacgggggcaacaaccccggtggtatggctccactggcttaa

SEQ ID NO: 32781 - DNA, 549 bp, Zea mays
  Peptide Sequence Number=SeqID_76156
atggccttcgtgttgccctgcgcccaggtcaggcgaggcggaggctcctccgaggtcgaggttgagtccgagcccgggggtcgggcgaggcggagttcgtcgtcttccagagccgaggctgagtccgagccctggggtcgggcgaggcggagttcatcatcttccggagccgaggctgggtctgagccctggggtcaggcgaggcggagttcgtcgtcttccggagccgaggctaagtccgagccctggggtcgggcgaggtggagttcgtcttcttccggagccgaggctgagtccgagccctggggtcgggcgaagcggagtccgtcgtccagcgtcgaggttgagcccgagccctggggtcgagcgaggcggagcttcctatggcgcccgaggctggacttagctgctgtcagcctcactctgttgagtggcacagcagtcggagcgacacaggcgacgctgttttcttgtcaggtcggtcagtggagcggcgaagtgactgcggtcacttcggctctgtcgactgaagagcacacgtcaggataa

SEQ ID NO: 32782 - DNA, 138 bp, Zea mays
  Peptide Sequence Number=SeqID_76157
atggtggtggatgggttgagactacgcctgattggtttactgcgtccgcacacccagtcccacgcgagcctgaccgaccaggtacgcccatttctggcatatgtacagatacagccaccattcctcgcgtacagttaa

SEQ ID NO: 32783 - DNA, 285 bp, Zea mays
  Peptide Sequence Number=SeqID_76158
atggcgaatgcaccaaattcattcatgccatggctcctgaggtcaccaacagtcgtgttgtccttgttcctgctgaacggcgggctgctgaatatggaagcactcgtggcctccctccctacgctgtccacacaggacacagccgccagtgctggacagatgcctctaccctttagcaagctggaggacatcgtccggccatccgagtacacgctggtgcaggaatgtttcttccatttctctgcggagaacacaaagaggctcaagacaaagggcggagattaa

SEQ ID NO: 32784 - DNA, 552 bp, Zea mays
  Peptide Sequence Number=SeqID_76159
gctcaccgcggtgaacgagggcggcgtggacgaacggcgtggacgaacggcgagcgcggcgtggacgaacggtgggctctcttcttcgcgacggcggccacgggctcccttcgcggacggcgggctctcttcttcgcgggcgggcgtggggctcgacaggcgtgcaggggcgaggggcgcggcgacgtggggctcggcggggtgggcgtggggctcagcaggcgtgcaggggcgaggggcgcggcgtgcaggggcgggcggcgaggggcgcggctgccggggcggcgtgcaggcgtgcagcacggcgtcgtgggggcgcgggagctctgcgggcggcgtcgtggggccgggcgcgggagctctgcgaggggccggcggtgcgtcggcgtcatggggccgggcgcggagctctacgaggggctgggcggcgaggcggcgtcgtgggggccgggcgtcgtgggagccgggcgcggcggcgtcgtgggagctctgcacggcggcgaggggcgcgggagctctacggtgttggcgtgcggcggcgcggcgtggtga

SEQ ID NO: 32785 - DNA, 183 bp, Zea mays
  Peptide Sequence Number=SeqID_76160
atgggtttgaaaaccctgagtacggagtgtactttcgcaagtcttacctgtcaaaggaaaagactctcaaggatatgtaggcctttgggaatcaaggtatcttcagaatcgggctacgagtatacaagagtacggtcaggacaaagcttgagtgagacggaaggcgattatgacgaaggataa

SEQ ID NO: 32786 - DNA, 360 bp, Zea mays
  Peptide Sequence Number=SeqID_76161
atggctctggcaggggcggatctgcgcccggggctgcctgggctgcagccccggtcgcggcccagtcacgttcacgtccgctcgaccgctcctcagtcctccctccagccgccagccgcgtgcctgcgtccatcccgcgtgtcggcgtccgtccaaccgccgctcgtcgtctcggggtctcgccgtctccgcctctcgcccttccggtcgtggactcgtgggcgctggccccgcaagctcccgcaggcccgcctccggtcgtgggcgctcgccgtctccggtcgtgggctcgtgggcgttagccgtctcacagtgacgccgtctcccggctcccgcaggcccgcactcgctgattcgtga

SEQ ID NO: 32787 - DNA, 603 bp, Zea mays
  Peptide Sequence Number=SeqID_76162
atggcgcctcctgttgacgtggctggcctgcgccctaggttgggcgatgtggaggctcttccgaagccaaagtcgagtctgtcttccgcggccgaggccgagtccgagcccctgggttgggcgaggtggaggccgtcggctgaggccagggcggagtccgagccctggggtcgggcgaagcggagggctgagcccgagtccgagccctgggtcgggcggagcggagttcgccgtcttccaggacttagcctgagtctgagccctgggtcgggcggagcggagttcgccgtcttccgggacttagcccgagtccgagccctgggtcaggcggagcggatcggagtggcgcaggcggcgctgtccttctgtcaggccggtcagtggagcggcaaagtgacggcgctttatgctgatgggggttaccagctgagaattaggagtcttgagggtacccctaattatggtccccgacagaaggacttcggggaatttcgagacttggcaaaattgggatgtatatcattggatgcatcatattggatcaagtctattgccaagtgggttagtaaatactttggacctgaattccccatccatgactaa

SEQ ID NO: 32788 - DNA, 849 bp, Zea mays
  Peptide Sequence Number=SeqID_76163
atgcaggcggcatgcaaccgcaccaagtggacgcccttctccgactcccaacacgcccagcctggagctcgcgcacgcgcaacggccgccccgccaaccactcgccccgtcgcattaactccgcggtgggacaggcggcgcctctggcaggagaagcgggcgacgcttcgccttcgccataataaccacgccaaaaaagggaccgggaaaggggataccccgaaaaggatccttccccgtgaaggaatcaggctccgagcctccctactgatcagaggttcgaaggctggccccccggaagggttcgacagccgcctcagatcgcgtgggccctacacccactactggtcagagctcaccggagacaccatgttcggcgcccatcgagggcaacatggcgctttccccccctcctccttgcggaaaggcgacgcaggggcggctcagactcgggctaagtcccggaagacggcgaactccgctccgcccgacccagggctcggactcgggctcagccccagaagacggcgaactccgctccgcccgacccagggctcggactcgggctcagccccagaagacgacgaactccgcttcgcccgaccccagggctcggactccgccctggcctcagccgacggcctccgcctcgcccgacccaggggctcggactcggcctcggccgtggaagacagactcgacttcggctttggaggagcctccacatcgcccaacctagggcgcaggccagccacgtcaacaggaggcgccatcatcaccctaccccgagctgactcgggccgcagggaacaagaccggcgtcccatctggctagctccgcccagatag

SEQ ID NO: 32789 - DNA, 482 bp, Zea mays
  Peptide Sequence Number=SeqID_76164
atgagtgatctgaagtactcatcctacacgaggctgggcctgcggcggtggcgacggacggcgaggggagtccggctcagcccgacgcgcatcaccgtgcgcaggctccgtgccaagctgtggacgctgctggggctcctgggccgttgcgtgcgcaacctacggctactcacgaagggccggatggcagcggcagccggtgctgtgaaggcgagctcgccccctgccgctgccaccggcagcaggaggtttcttgtggccggtcagaaacgctccctcgccggagggaagaccggacgacaggccgccggggacggcgggagcagcagcagtaagccaccgcggcggccgccgtgcatgcggtccaactccttctacgcacgcgccgtcgccgagtgcctcgaattcatcaagggcagcaacgcgccgccagcgtcaccgtcgccactggcggcccacggcacgccgcgccgcggcaccag

SEQ ID NO: 32790 - DNA, 996 bp, Zea mays
  Peptide Sequence Number=SeqID_76165
gtattcgtcaacgtcggcatcctgctcagctacgtgtccaactacgccttctccggcctgccggtgcacctcgggtggcgcgccatgtacgcggtcggcgtggtcccgcccgtgttcatcgccgccggggtgctcctcgtcatgccggagtcgccgcggtggctcgcgatgcgcggccgccaaagcgacgcgcgcgcggtgctcctgcgcacgctggacacaccggccgaggccgacctctggctcggggagatcaagcgagccgtcgcggacgccgagccgccgccaccgcccgctgggcgcggtgccggtgccagtgtcagtatctggaagcagctgctcgtccggccgtccacaaacgtgcggcggatcctcacgtgcgttctcgggctgcacttcttcgtgcaggcgtcgggcgtcgacgccatcctcctctacagcccgttgattttcagggcggtcggcatggcgtccgactccgccatcctcggcgccaccgtggccatgggcgcggtcaagtcgtgcttcatcctggtgggcatgctcttcaccgaccgcctcggccggcgcccgctactcctcgctagcaccgcgggcgttgccgtgaccgcgaccgccctcgccgtgactctgtacgtaggcacgagcacgacgacatcgacttcaccggcgacgaccgcggcgtgcctggcgtcggtgctggccgtcgtggccacgtactccgtcgggtacgggtcggtagtgtcggcgtacagcgcggaggtcttgccgctgcggctccgcgcgcagggctccagcctggccatggcagtgaacaagctcatggccggggtggtgagcatgacgttcatctcgctcgccgacgcgatcaccatgcctggctgcttcttcctctacgctgccgtgacggcggctgcgtttgtgttcgtgtacacgcggctgccggagaccaagggccggagcttggaggacatggaagtgcttttccacaaatag

SEQ ID NO: 32791 - DNA, 234 bp, Zea mays
  Peptide Sequence Number=SeqID_76166
atgggcgatctgggcgccttcgtcgaccccgctgcgcgccagcgccaccacctctcgccggagctcgcggcgcagccgtcggtgtcgtgccgcccccgctcgacctggcctccgccgacgcattgttcgggtaccgcctcctctcgccgtcgcttaatttggcccccagcagcgtacccactagcgcgcctaccttcgcccagcgccggcgcacaccgcacgcgctacctgtaa

SEQ ID NO: 32792 - DNA, 666 bp, Zea mays
  Peptide Sequence Number=SeqID_76167
atgtccggtgcgccagccacgtcatcctatccgttgagatttgagctggtcgaccgttggaggctttgtcctcatgtggcaccggacagtccggtttcaaaggggtggcttcttcctcgcttccaccatccttgccggagctccgcgttcctgtccgagtactccagactcgaggattatccaagggcaaccggctggttcagcaggtcctggtggaatggtctggcctcccgcctgacctcgctacatgggaagatcaagaagctcttcgtcaaagctttcctttggcccctgcttggggacaagcaggcttcgaagggccagggaatgttaccaactcgccaatggaggagatgtcccagccgctacaacagcaagatggcgcaataccgaatggtccaagcaagcaggatgcggcaactcgtcgtgtgcgtcggcccaacaggcgcgtatatgggcccgagtgggtgtagacctgctgcagatcaagtgagagcagtgtctccgaaccaccgtcggcgttttgacaacatgcacgtgcaggtgccggcgaatcaggtttctgggaagtgcttcgcgcacgtccgttcgggttcttcttcaacactcgtggaaatcgctgcgaatctgttctgttttaatgtcgtgaatattatatgccagtag

SEQ ID NO: 32793 - DNA, 1185 bp, Zea mays
  Peptide Sequence Number=SeqID_76168
atggcacaggctgccggcaccgccgatgccactgatgaggctccactgctgctggcctcgtcggcggcggggtcgacgccgtcgccgccaggttcagcaccgcgccggaacaggttcgccttcgtctgcgccacgctcgcctccgtcaccaccatgctacatggctacaacctgacgctgatgagcggcgcggagctgttcatgcgggaggacgtggggctcaccgacggcgaggtcgaggtgctggcggggtccatgaacgtgttcatgctcgcgtccatcctcgccgccggctgggtggccgaccacctgggccgccgccgcaccctcgtgctcgccaacgccttcctcatggccggcgcgctcgccatgtcgctcggcaccagcttcgccgcgctcatggcggcgcgcttcgtcaccagcgtcggctccgggttcgcgcgcgtcgtcgcccccgtgtacaacgccgagatatcgcaggcggccacgcgtggcgtcctctcatccatgctcgacatattcatcaacgtcggcatcctgctcagctacgtgtccaactacgcgttcgcgggcctcccggtgcacatcgggtggcgtctcatgtacgccatcggcgtcatcccgcccgtgctcatcgccgccggggtgctcgtcatcatgccagagtcaccgcggtggctcgcgatgcagggccgccacgccgacgcgcgcgcggtgctgctgcgcacgtcggacagcccggcagacgccgacttccggctcggggagatcaagcgagccgccgacgcgccgtcgcccgctgctgcggcgcgccacggtggcggcggtgtctggagggagctcttcgtccggccatccaccacaaccacgagcgtgcggcgcatcctcggctgcgtcctcgggctgcagttcttcgtgcaggcgtccggcgtcgacgccatcctcctctacagcccgctgtgttggaatctatactgtctaggatcgattcctaagtccctagaataccaatccgtaaccgaaagtaaaatcttgatgacgtgtagatctgatctactgagaggaacggggaaacacacctttgttgttgttgctatcttcataccgtcgccctgcagagaagcagcaggcatcaggatccgagctgctgtaggttgtcgtgtttccaaacactccgacgtctag

SEQ ID NO: 32794 - DNA, 387 bp, Zea mays
  Peptide Sequence Number=SeqID_76169
atggctgctgggccctgctgccaggggaagctcacgaccaatcgcggcctgggcgagcgcgcaatcgcgtcgtgcggctgggcgagtgacttccgcggtcgaggcttagtgaacgcgacgacgcgggttcagggaacattcaaggagaggcagcaagaaaacaagattggttcatcgattgtttacagcttctttagctcaactttgactctagcaacttcaacttgcgaactggttgctttgaccttcagatacttgagaccgattgatgcaattcttgaggatttcttggacctgtgggttaggacccacacaggctttcgttgcgccactctgatcttgttggttgatgttgatcgtatcgtctccattggggttagcggctaa

SEQ ID NO: 32795 - DNA, 213 bp, Zea mays
  Peptide Sequence Number=SeqID_76170
atggctttgataccacttatgtcacacccggttttagaagcaaatgtcccgtttggctatagtggactagctttatgtggggttaaggtcaagcagttgcttttagttgatcagcccgagcttgcaagacccttattcactcccaaggtgaatggccagggattcactatgaaacctttacaaagattccctgaggctgtagccgtccgttag

SEQ ID NO: 32796 - DNA, 234 bp, Zea mays
  Peptide Sequence Number=SeqID_76171
atgaacaagaacacaagagacacaagatttatcccgaggttcggtcacaccaccaaggtgccctacttcctcgttgaggcgcccacaaagagccgggagagaaaaccccagctcaactgcccggaggcaagttcagctggtctgaagaagctcaactcagctgaagtcaagtgcagctggaaagctcagctgcagttgaagaagttcagctgcttttcagcaagaacactctag

SEQ ID NO: 32797 - DNA, 576 bp, Zea mays
  Peptide Sequence Number=SeqID_76172
atggcgaggggcagtacgcgaggagaagaggggtgggggcaaccaactgcgcaggcgaaagatgggggcgcaggtggttctggttctggctttggaactttaggcacgggtccatggacgtgcgcgctgactgcggagggagcagttaacggagaagatgaacagggtgccgtggggagaagatggagaggggaggtggctctgcgggtttgcgatgtgggcgccgaagggagcggcctcgcaactggagcccgcgggcatggctgctgggccctgctgccaggggcagcgcacaaccaatcgcggcctaggcgagcgcgcaaccgcgccgtgcggctaggcgagcgacttccgcgggcggggctcagggaacgcagcggcgcgggtttagggaacgcggggctgggggctgcggggtgggccatgcgcgtgggccacaggaacagggcggcggcgctagggtttggggaaggggcgcgcgggatgggcctagttgggccgtgcggctgcgcgtgggagtgggccggggtgggaaaaatggcgtgtgggccgcgcgggaggctggctgggggttga

SEQ ID NO: 32798 - DNA, 1464 bp, Zea mays
  Peptide Sequence Number=SeqID_76173
atggcacacgccgacggcactgccgatgatggtgctacggcgccgctgctcgcgtcgtccacgaagtccggcaagccgccgcgccggaacatgtacgccttcgcctgcgccacgctcgcgtccatgaccaccatcctcatgggctacaatctcgcgctgatgagcggcgcgcagctgttcatccgggaggacctgggcctgtcggacgcgcagatcgaggtgctcgcgggctccatcaacgtgttcatgctcatgtccatcctcgctgccggctgggcagccgacctgctcggccgccgcggcactctcgtgctggccaacgtcttcctcatggccggcgcgctcgccatgtcgctgggcgccagctaccctgcgctcatggccgcgcgatgcatcaccagcgtcggctccggcttctccatcgttgtcacctcggtttacaacgccgagatatcgccggcgtccatgcgcggctttctatcgtcgtttcttgacatgttcgtcagcctcggcttacttctgagctacgtgtccaactacgccttcgccggcttgccggtgcaccttggctggcgcaccatgtatgcggtgggcgtgcttccgccggtgctgctcgccgtgggcgtgctcgccatgccagagtcgccgcggtggctcgcgatgcgcgggcgccacgcggatgcgcgcgcggtgctcgtgcgcacctcggacaccccggccgaggccgacctgcgcctcgaggagatcaagcaggccgtcaaagaggagccacagccacagggtagcagcgatagtgacggaggcaacgcctggaaggagctgctcgtccggccgtcggcgagcgtgcgccggatcctcgtctgcgtcgtcggcgtgcacttcttccagcaagcctccggcatcgacgccatcgtgctctacagcccgctggtgttccgcaaggccggtatgtcgtccaacaaggccatcctcggcgccaccatcggcgtcggcgtcgtcaagatgtgcttcgtcctggtggccaccctcttctcggaccgcctcggacggcgaccgctcctcctcgcgagcacggccggcgtggccgcgtccatggcgtcgctgggcgtgacgctctgcatcggcgtggcgtcggccgcgagcatggcggccagcgtcttgtcggtgctggccttcatggcagcgttttcgattgggttcggaccgctagcgggcacgtacagcgccgagatcatgccgctgcgcctacgtgcgcagggcgccagcttgggcatggcggtgaaccggctaacgtgcgcgctggtcagcatgacgttcatctcgctcgcggacgcgatcaccatgcccggatgcttcttcctgtacgccgtcgtgggggcggccgcatgcgtgttcgtgtatgcgcggatgccggagaccaaaggccggagtctcgaggacatggacgtgctcttcgccaaatga

SEQ ID NO: 32799 - DNA, 1983 bp, Zea mays
  Peptide Sequence Number=SeqID_76174
atgccgcgcacgaagaatgcgtcggcatcagggggtggcgacgatgaggaccctcgtcgccccttcaggcaggtgaagggcaagactgtgtatctggagcagcaggaaggccgcaagaagcggcgttcggacagagaggctcgtgcagcagcagcagctgtagcagccgctgcacaggcagcacttggagatcagctggatgttccatcagatcagattgctttccgtgctcgtcgtctcgcctcccggtctcgctcctccactcacacctccgcttccactccttctcccactctgcctgctccagtcactcctattgctccatccacctccaccgccatacccactaccagcactacgccagcttccactgcttcccctgccccccgctcccgcttcagctcctcctgtccctcccacctcgcttccgggagcgcgatgagactgagcgtgctactgcagcccgggtacgtcggttcaggtacgtaccccgtggagtcttggctgccagctcagagagacccagcagcaggtgttcttttcagcacacggattcaggagtcattcttcagggctcagatgtctgctcagattgcgctgcgagtgcaccgcctattggatcttccagcttttttgctagcagccggtgctgagtctgaggcgcatctcacctatttgccaggccttctgtcctttttgactatcagcggcagatatgttgaggagtggatcctccacgtcgccctcacggcggtgtggctccagggacagctcacgtcgcggctctgttccgcccgcccttcacagatgggtcgcgacgttctccagcagacttcactaccgcagcgaagtgcttatatgagctcgtcagacggacactccctgcctaggatgggatacagggaggctaccactcatattcagctttggctccttggtgccctggtatcccactatgagtttgatgttgtggacttcctgatctgtgagattgaggacaccgttctggatgggattcgtgctcgtcggcagctaccttatgctcactacttgtgccacatctttgcgcagctgattcagccacctcgatttcagagcactcttgaggcctcacgccttgtgtttggatcttaccgccctgctcctgagattccagtgccagcttctgcttctgtgtttgactctcaggccgaggacgcagctctacgtcagtttgacactcagggtacagctgctgctgatgatgatgatgatgatgattttggggttcctcttccgcctccgcctcctatgcctccacgctcacatgatcatgaggctgggagttcccgtgctgcccctgctcctcctccagctttggaccctgcccttgcttcgattcttcagactctcacccagcagcagcagactctcactcagcagcagcagactctcacccagcagcaggctcttctggcagccgagcaggcccgtttatccgacaggatgctctcgatgtttcagagcatgcaggacaggcaggatgcacttcagcaacagcttattcaggatagggcagagagtagggcattcatggctctcatgcttcagcattctggtatctccgcacctccggttcagtctgttccgcctcctccgcttcacgctccagtggtgccttcgatcttgtctggaccccctgttggtacctctccgctccggccggtcactttggcgttcacctctccggttctcagctctgtctgtccgcagccgccagtgccaccagcatctgctgttaccactaccgctgtggcagtatctgtgaccgcttctgttccggtagctcctgcagcgctgcctgcgtccgagtcagtaccagctccagcttctaccgcagatcctggatccgagactgactctgaccctccatcggcgttcgctctgctacctcgacctcgaccggatgcgcccccgccacctcctcctgcttccgatgtttag

SEQ ID NO: 32800 - DNA, 297 bp, Zea mays
  Peptide Sequence Number=SeqID_76175
atggctcgagcagccaaagtctgctcagtctgggtgcaccaggctagctcgagcgaagtggctgctctcgggaattcaccggcgacgtacggctataattcaccggactgtccgatgtcagaaaataggcgcagaggaggaaggcgtgctcagcaggagcagacagctcagcaggatgaggcaccccagcagcagcagctgccacccccgcccccgatgtcgatcgagcagatgtttctgatacagactcaggcaattcaagccattggtcagactctggccgccattcagcagtag

SEQ ID NO: 32801 - DNA, 810 bp, Zea mays
  Peptide Sequence Number=SeqID_76176
atggctgctccacgtctagaaactgcatgccgcttcaggcctgcccctacacgctggcaccgtcgtttctcgcttccggtgttcctcgaccagtgctccttctcttcgccgtggtcaaagaacgacccggttgaggagcccgaagaactcgcaggagaagcccctgagcagcagtcgatggctcgtcttagacacatcgcacggaagtctgtcatccccttcttaccctctcgtctcgcggagcgtccgctttgctgtcccgtggccggtcagtccagccacttggagaggctgcaccaccgcctgcatgaggagcaggagcgtcgacgacaggagcagcagggctcttctttctcgctccagcaggagatagagtctgtgaggagctgctcccctgtgcttcctctggaggcgccccctgcaccaccactgagcgccctagcccctggagtagctgttggaggagacccagacgacggaggaggcgacagcagctcaagccacgacaccaaatttctgctgaccaggagccggaaggatgggttgctcgaccccatcactcgcgacgctgctcgcgggtgtcacttccacgatgcggtcgacaccctgctacgttgggcacttgacctgcatagtcgcggggtctacccggaccgttgggaggcgacctgcttggtgcgccgtccggagaacagtctctggggtgctgaggtctgctcggagcactattctatctctgagcgggactcagctgaggcggtgaaagggaaatgtgcccttgggccatttctaagtattttggtgatttag

SEQ ID NO: 32802 - DNA, 132 bp, Zea mays
  Peptide Sequence Number=SeqID_76177
atggggctcggtgtatgcggctcgctctgccaagatgatgatgaggatggttatgattatgtttatggtaaagaagaaggcgtcgaggtggatctccaggagttccaggacgtctatgagttcgaggattag

SEQ ID NO: 32803 - DNA, 300 bp, Zea mays
  Peptide Sequence Number=SeqID_76178
atgaagggtagcaatcatgtgctggagaagggcgacactaggtgccgtaagcacgatgttgtcgatgtagaggagtccagagagagcgagggagaggacgacccaaatggtggtaaaattgacaacaaccctggaggtctcatcgtagtccactctgggacactgagtaaagcaccaaaggacccaacgaatcatgtagtgatcgagcgagccattagaggtgagcttatggcagaagatccacttgccggtggctaccccgtgagagcttcctcgtctgctcgggctattaagggctaa

SEQ ID NO: 32804 - DNA, 165 bp, Zea mays
  Peptide Sequence Number=SeqID_76179
atggcgcccgtgctccaacgccccgcgcgcgcgcccctccccggcagcgagggccgcgccccatatgatgatgaggaggatggttatgattatgcttatggtaaagaagaaggcgtcgaggtggatctccaggagttccaggacgtctatgagttcgaggattag

SEQ ID NO: 32805 - DNA, 432 bp, Zea mays
  Peptide Sequence Number=SeqID_76180
atggagcgcgagcgcaggagctcgggcggcacggccgaggcagcaggctcgggcaacacggtcgaggctgcgggctcgggcgacgcgaggcgcgagcggcaaaggctcgggcggagcgcatccgagaatagtgggctcgggcggagcatgaccaagggcagcgggctcgggcgaggcggaccaaccgcggcggcgcacgcgatggtggttcgggcaattagtctatggtcaacggaggtcgcagagcccgagcttttatacaccgcaggggccaaatacgagccaagggaggatggccggactgcaacgaacttccacaaacgccgcacgaaagtcggcgttctgttacgagcttgcgactgggatggggagaagggagctgacaattgggccccactagtcggtgaccaagtgcatgcagatgaggactag

SEQ ID NO: 32806 - DNA, 1521 bp, Zea mays
  Peptide Sequence Number=SeqID_76181
atgaaggacctaggtcctctccaccactttctcaggatcaccatcgatgatgctgccggcaccgccgatgccactgatgaggctccactgctgctggcctcgtcggcggcggggtcgacgccgtcgccgccaggttcagcaccgcgccggaacaggttcgccttcgtctgcgccacgctcgcctccgtcaccaccatgctacatggctacaacctgacgctgatgagcggcgcggagctgttcatgcgggaggacgtggggctcaccgacggcgaggtcgaggtgctggcggggtccatgaacgtgttcatgctcgcgtccatcctcgccgccggctgggtggccgaccacctgggccgccgccgcaccctcgtgctcgccaacgccttcctcatggccggcgcgctcgccatgtcgctcggcaccagcttcgccgcgctcatggcggcgcgcttcgtcaccagcgtcggctccgggttcgcgcgcgtcgtcgcccccgtgtacaacgccgagatatcgcaggcggccacgcgtggcgtcctctcatccatgctcgacatattcatcaacgtcggcatcctgctcagctacgtgtccaactacgcgttcgcgggcctcccggtgcacatcgggtggcgtctcatgtacgccatcggcgtcatcccgcccgtgctcatcgccgccggggtgctcgtcatcatgccagagtcaccgcggtggctcgcgatgcagggccgccacgccgacgcgcgcgcggtgctgttgcgcacgtcggacagcccggcagacgccgacttccggctcggggagatcaagcgagccgccgacgcgccgtcgcccgctgctgcggcgcgccacggtggcggcggtgtctggagggagctcttcgtccggccatccaccacaaccacgagcgtgcggcgcgtcctcggctgcgtcctcgggctgcagttcttcgtgcaggcgtccggcgtcgacgccatcctcctctacagcccgctggtcttcaaggcggtcggcgtggcgtccacctccgccgtgctcggcgccaccgtgtccatcggagccgtcaagacgtgcttcgtcctcgtcgccatgctcttcaccgaccgcctcggccggcgcccgctcctcctcgccagcaccgccggcgtcgccgtgaccgcgaccgccctcgccgtgacgctgtgcgtgggcacggcgtcgccggcgacggccgcggcgtgcctggcgtccgtgctggccttcgtggccgcgtactccatcggctacgggtccgtggtgtcgacgtacagcgcggaggtcttgccgctacggctgcgcgcgcagggctccagcctgggcgtggccgtgaacaggctcaccatgacgttcatctcgctcgccgacgccatcaccatgcccgggtgcttcttcctctacgctgcggtgacggcggctgcgtttgtgttcgtgtacacgcggctgccggagaccaagggccggagcctagaagacatggaagtgctcttccgcaagtga

SEQ ID NO: 32807 - DNA, 641 bp, Zea mays
  Peptide Sequence Number=SeqID_76182
agaacgcaaacatcgccgatggcgacacgctcgcggacgaagtgaagcttgatcgatctccacgtgctacgtgcgctgatgctgcacgggattgctggacagggtgtgcatgtgaaggcacacttgctgaacgacgtaggcgttgtcggcctgcacaatgtgaggtactggaaggctctagagaggatccagtaggccatctcgtcgctgaccgagggtccgtcgtcatagaagagcattgcctgagtgtcaacaggtgtggagcagggcttgcagttggacataccaacatgctccaggatatcgatgacgtaccagcgttggtggcggcacaggcactgaggccgccgctcaatgattatcctgagaaagtggtggagaggacccaggtccttcatcgtgaactcacgatgaagggcaacaatcatgtgctggagaagggcaacactagatgccgtcagcacgatgtcgtcgatgtagaggaggtagatagtgtcatcgttgtatcaatggatgaacagggatgtgttcgacttggcctcgacgaaactaagggagaccaagcgggaggcgaagcgactataccaggctcttggggcctacttaagaccatacagagagcgattcatcctgctgactag

SEQ ID NO: 32808 - DNA, 2466 bp, Zea mays
  Peptide Sequence Number=SeqID_76183
atggcgggcagcgagtcgtcaatggagtaccagctgaagaagtacctactgctgctggccacgctggttgcgacggtgacctacgcggcgggactgaacccgccggggggctcgtggctggaggacgacagagcggcgggagagctggccggcgactccatcctccgggacactaactacgtgcgctacatcatcttctactgcttcaacgccgtctccttcgccgcgtcgctcgtggtcagcctgctcctcctgctgctgcacagggacgccgcggcgagcctgctcaagctcacgcgggcggtgatggtcgtcgacctgctcgccctcatgggcgcctacgccgccggcaccagccacgaccggttcaccaccgtctgcgcctccgtcctcgtcatcgccaccgccgtctacgtgatcgtcgccgtcccgaggttcagcatcagcaccagcgccagcgcccaaacggaacagccgcagccaccgtcgcccggcgacctggagaagcacgagatcctgatggtgctcgccgtcttcgtcgccaccgtcgcctacgtcgccgggctcaacccgcccgggggattctggcggaccaccctgctggacgccaacggccgactccgccacaccgccggcgacccggtgctccaggcgctccaccccatccgctacaagttcttcttcttcagcaactccaccgccttcatcgcgtccctgctggccatcaccttcaccgtgcactacgagaagctcaagctcaagtccatcagggtccccctctatggcctcgtcgtcgtggccatcttgggcatcgggggcgcctacgccgccggcagctgcagggacagcaagcacaccatctacgttctctgcctagtcgtcgcagtccttctctgcatcttcctccagtggtttcttgtgggctccgctttccagcttccttgctatggcactggtccaactaccaggaagggtagtggcaaaggtatagacgacgacgatgatctggacaagattcgtgaattcattcagctgcttgtcattcttgcggcgaccgttgcctaccaagccggtgtcgatccgccagggggcgtctgggcagagaacggggaaggccacagcgcaggggacccaatattcctgacgacgcatccagggcggttcaaggtcttcttctacttcaactcggcggccttcgtggcatccctggtcatcatggtgatgctgcagaacgagttcctcgtcaggcgccacgcgctggaggcggtgatgatactggatctgttttgcctcataggcgcgtacgctgccgggagctgcagggacaccagcacctccatctacatgctcgccatggctggcggtgtccttgtctacgtggtcatccacatcgtcttcttcacgctagaccccaacagagaaaaggataacaacaaggccgatgatgaaggaaacgccacgaacagtgagcaagagaagaagagaaagaaggatcggctagagaagaagcgtgaggtgctgctgctccttgcgatcctggctgcgacactgacctaccaggccgggctgaccccgcccggcggcttgtgggagaacgacaggtttgggcaccgcgccggcttccccgtcctccaggacaagtaccctcgccgctacaaggcattcctctactgcaacacggcgagcttcatggcatccgtggccctcatcgtgctccttctcaaccctaacctgtacgggccaggcatcaattgctacgcgctctttgtctgcatggtggcgggcatgttcagcctcatcggcgcctacgctgctggaagctccctgcacctgcggacctccatcgtcctcttactgctggttcttgcggtttttgcggccgtgttatacgtgaccatcaagcaccgtcgtcacgccagggaaaacaaagattcatcatcacctgctgatcgtcaagaacaaaaacccaggaaaccctcgggagcggcggccatgtacctgatgctggtaggaatactggccgcgagcgtcacctacctgacgggcctgaagccgcccggtggcctgtggatggaggacgacggcgacgggcactccgctgggaacccggtgctctacgacatcgacaagcaccggtacaacgccttcttctacaacaactccgtctctttcatggcctccgtcactgtcatcgtgctgctgcttccgaggatgctgcgcgacaatgacgacgagaggaacaagcggcccctttggccgatgcacactgccatgttcctcggcatgctcgcgctcctcggagcctacgcggctggcagcgctcgggactggtgcacgtccaagaacgtcatcctgctcctcctgcctatagtgggcttcgttgcactcctcttcttctggaagaaagggaaagcaagtgagggcacccagcatggccagagtgcacgcctacctagcagtacatga

SEQ ID NO: 32809 - DNA, 156 bp, Zea mays
  Peptide Sequence Number=SeqID_76184
atggccctgaagcgtggatcagaggcagcagaggttaagcagttacaactagtagtaccatacccacgattattaccactggcttcgtacatcaggatggatgaacaagaaggtcttgctgcttcaagaagtttgattgtccatccacgcccctaa

SEQ ID NO: 32810 - DNA, 1446 bp, Zea mays
  Peptide Sequence Number=SeqID_76185
atggcggacgagacagagacagcggcgccgctgctccgctcagctcccctcgtcgccgacgcgccacgccggaacaggttcgccttcgtctgcgccacgctcgcctccatgaccaccatcctgatgggttacaatctcgcgctgatgagcggcgcgcagctgttcatccggcaggacctgggcctctccgacgtgcaggtcgaggtgctcacggggtccatgaacctgttcatgctcgtgtccatcctcggcgccggatgggcggccgaccttctgggccgccgtggcacgctcgtgctcgccaatgcattcctcatggccggagcgctcgccatgtcggctggcggcagctacgccgcgctcgtggccgcgcgcttcgtcaccagcgtcggggtcgggttcgcccgcgtcgtcgcgccggtgtacaacgccgagatctcgccggcgtccacgcgcggcgtcctgtcgtctttgctagatatgtttatcaacgtcggcatcttgcttagctacgtgtcgaactacgcgttcgccggcctgccagtgcacaccggctggcgcgtcatgttcgccgtcggcgcgctgccaccggtgttcctggccgcgggggtacttgccatgccagagtcgccgcggtggctggtgatgcgcgggcgctacggggaagcgcgcgccgtgctcttgcgcaccaccccagctgaggccgacctccgactccaggagatcaaggaagccgtcgaggcgccgcgggcacctgctgacagcggcggcggcggcggcgttggcgtgtggaaggagatgctgtggcggccgacgaaaacggtgcgccggatcctcgtctgcgcgatcggcgtgctgttcttccagcaagcctccggcatcgacgccatcgtgctgtacagcccgctggtgttccagaagtccggcatgtcgtcgaacagcgccatcctcggggcaaccgtcgccgtgggagtggtgaagacatgcttcatcctcgtggcgacgctcctgtccgactgcgtcggccggcgccccctcctcctcgccagcgccgccggctctgcggcgacgctggcctctgtggccctgacgctctgcgtcggcagcacgtccacggtaagcactgcggcgtgcgtcgcgtcggtgctggccttcgtggccgcgttctcggttgggttcgggccgctggcgccgacgtacagctcggagatcattccgctgcggctgcgcgcgcagggcaccggccttggcacggcagtgaaccggctgacgtgtgcattggtgaccatgactttcatctcgctcgccgactggctcaccatgccggggtgcttcttcctgtatgctggtgtggcagcagccgcgttcgtgttcgtgtacttggagctgccagagactagtgggcggagcttggaggatatgcacgagctcttcgccgccaagtga

SEQ ID NO: 32811 - DNA, 1728 bp, Zea mays
  Peptide Sequence Number=SeqID_76186
atggcacaggctgctgtaggcagcaacgatggcactgaggcgccactccttccctcgtcggcgggcgggccgacgccgccgccagcaggagcaccgcgccggaaccggttcgccttcgtctgcgccacgctcgcgtccgtcaccaccatgcttcatggctacaacctgacgctgatgagcggcgcggagctgttcatgcgggaggacgtggggctcacggacgccgaggtcgaggtgctggcggggtccatgaacgtcttcatgctcgcgtccaccctcgccgccggctgggtagcggaccacctgggccgccgccgcaccctcgtgctcgccaacgccttcctcatggccggcgcgctggccatgtcgctcggcaccagcttcgccgcgctcatggcggctcgcttcgtcaccagcctcggctccgggctggcccgcgtcgtcgcccccgtgtacaacgccgagatatcgccggcgtccacgcgtggcgccctctcatccatgcttgacgtattcgtcaacgtcggcatcctgctcagctacgggtccaactacgccttctccggcctgccggtgcacctcgggtggcgcgccatgtacgcggtcggcgtggtcccgcccgtgttcatcgccgccggggtgctcctcgtcatgccggagtcgccgcggtggctcgcgatgcgcggccgccaaagcgacgcgcgcgcggtgctcctgcgcacgctggacacaccggccgaggccgacctctggctcggcgagatcaagcgagccgtcgcggacgccgagccgccgccgccgcccgctggacgcggtgccggtgccagtgtctggaaacagctggtcgtccggccgtccacaaacgtgcggcggatcctcacgtgcgttctcgggctgcacttcttcgtgcaggcgtcgggcgtcgatgccatcctcctctacagcccgttgattttcagggcggtcggcatggcgtccgactccgccatcctcggcgccaccgtggccatgggcgcggtcaagacgtgcttcatcctggtgggcatgctcttcaccgaccgcctcggccggcgcccgctgctcctcgctagcaccgcgggcgtcgccgtgaccgcgaccgccctcgccgtgactctgtacgtgggcacgagcacgacatcgacttcaccggcgacggccgcggcgtgcctggcgtcggtgctggccgtcgtggccacgtactccgtcgggtacgggtcggtagtgtcagcgtacagcgcggaggtcttgccgctgcggctccgcgcgcagggctccagcctggccatggcagtgaacaagctcatggccggggtggtgagcatgacgttcatctcgctcgccgacgccatcaccatgcctggctgcttcttcctctacgctgccgtgacggcggctgcgtttgtgttcgtgtacacgcggctgccggagaccaagggccggagcttggaggacatggaagccgccagacccaacacggagtcgcagacgcagacgggcagccgccgagacgtgaagacgctgttgcgccgctgccgccgcacaccagcacacgtcgagtcgccaagacggcaagacgtcgtcgtcgacgacgacacgcgagtggctgcagcctgccagcctgcagggcattcagattcaggggcgatcggcgtcggcgatcgccgatcggcgaacgcagaagtcaagacgcagccgtcgaccgcctag

SEQ ID NO: 32812 - DNA, 303 bp, Zea mays
  Peptide Sequence Number=SeqID_76187
atggcattgctgggaacagcagagcgtggattaaggatcatgaaggatcgtgatgctgatgaagatgccggccttagtaaaaagttcctgctagtttcagctgctggtattgcttatctaactacttccaggcgccttgcggacaggaagacagccaagttccagaagaacatcacgaggcggggttccgtgccggaaaccgccgtcaagaaggggaaggggaacggctacgctgccggccccgtagtgctcggcttcttcgtcttcgtcgtcattgggtcatgtacgtcattgggtcgttaa

SEQ ID NO: 32813 - DNA, 1224 bp, Zea mays
  Peptide Sequence Number=SeqID_76188
atgacaccggcgaacggcgccccagcgcgggcagcggaggcgggcccccacgaggtggagtcggaggccgacgcgttccggcgccaggtcgacgacctcgtctcgaagaccgacgtgctggagcggcgggtgaaagaggtggcggacttctacgatggcaaaaagcacggaagcggcgggaggaagggtggtggtggtggcaggtatggggcatcctcgaggggaatgccggaccttatgcgccagttcggcgtgcttttgaaagagatcacctctcataaagatgcatggccatttctggagccggtggatgttgtaactctacagcttcctgactatcacaacattattacccaacctatggacttctctaccatccaaaagaaaatggaaaggaaggatggtacttgttacaccaatgttagagaaatatgttctgatgttcgattaatttttgccaatgcgatgaagtacaatgatgatcaaaatgtcatccacttgatggctaaatcattgcttgagaaatttgaagagaagtggctccattttcttcctaaagttgagagtgaggaaaaaagacaaaaggaggaggaatcaaagggtgttgcagccacaaatacttctcgagaagttgcaatcgtaaaattagcaaaagacactgatgatgagctaaatcagatcaacaagaagctggaggagctccggaaaatggtggttcacagatgcaggaaaatgacgacagacgagaagaggaagctgggtgcaggtatctgtcacttgtctccagatgatcttagcaaggcgctagagattgtcgcacaagacaatcctagcttccagactaaagcagaagaagtggatcttgatatggatgcccaggtgagaaggcctgcggatttacatgttaccgttattcttgtttcttgtgatgttggcgaactgcgacgtggtcgggacacggagaacgcgaacgtcgtcgatggcgacgcgctcgcggacgaagtgaaggtcaagctccacgtgcttcgtgcgctgatgctgcacaaggttgatggagaggtagaccacactgacgttgtcgcattagacgagggtggagcgcttgagggggttgtggagctcctgaagaagctgacagagctaagaggccttggtcacgccgttgggcacaatgcggtactcggccttagtgctggagcaggatacgatgagttgctgctttga

SEQ ID NO: 32814 - DNA, 402 bp, Zea mays
  Peptide Sequence Number=SeqID_76189
atggggacagtggctaggacaagctccagcgtcgcagccactgtggaccggtgttgggtggacgcaggcacctccagacacttggacggctccaccaccccaaggatcgtagccagccccgggatgggtgccaccggtctcccagccaccggcgggctctcagccatttcaagtgtggatggcaccgccaccgacgggggtttagtgtcacatgctcagggatcagagggtgctgtcaacgtccaagactacctcgtccatggttccggagggagtggccaccttcctggtggcggaggagggagtgggccaaaacccccacagcccgcaggagtgagacttgccatgagtagtgcagaaaaatctgttttgggggggtaccatgaattttcgtcggcctga

SEQ ID NO: 32815 - DNA, 993 bp, Zea mays
  Peptide Sequence Number=SeqID_76190
atggtgggatcttactgcaaagctccctgtgatgcttttttcatccttgggaacagaaacaatcctaaggatggaagtgaggagcgacaaatttttgttgcttttgctccaaggtggtatcaaatgaagaaatacaagagtgaagatgcgggaggacgtggtcctccatataggacttttcgttttaaaactattgggaggagtttttacctcccttgtttatgtaaaagcttccacaattctatatctctgatgttctgtaatgtctgcaagacgggtgagacgttcctggaaagggaccgggaaaggggatactctgaaagggatccttctccgcgaagggagcgggccccgagccctcctactgatcagaggttcgaaggctggcccctcggaagggttcaacagccgcctcagagcactcgggctccgcgcccactactggtcagaggttcgaaggctggcccctcggaagggttcgacagccgcctcaggcccctcgggctccgcgcccactgctggtcagaggttcgaaggctagcccctcggaggggttcgacagccgcctcaggccactcgggctccgcgcccactactgatcaggggttcgtaggctggcccctgaagggttcgacagccgcctcagagcacacaaagcgagggatgactctgggtacgtctgatacatggccgatgctcgggctacgctcccgaggtaccctaggacattttcgagacgccagcaggagcgaattctgtaacggaatcccatcagagggaggcatcgagcccttgggaccctatcaaacgggacttggggtcggcaaatcacctacaggctcaggggctgctctctcaaacccggctccggccaaaccgttgacagcgtcaacataccagcccgagaacttggaacctgactatgcacccgggctacggccagttcgcatgagggaacagccagaccgaccgaagcatcacgaaacgctctaa

SEQ ID NO: 32816 - DNA, 816 bp, Zea mays
  Peptide Sequence Number=SeqID_76191
atgaatcaacaagaagctcctacaggagttggagagtttctacgagattttggtgttccagtggtcctgtggcgactacttcaagaagttggatacaccgaagcacccaagtaccagtggtcacgcactgttcttagaggacaaccatggtatgaggtagtagtgcgtattccagagcgtgctagaaaaccatcttggccatattggatgttccatgctgaaggaatgactccttgggagggtgctcaggcccgattaatggaaagcattcctattgggcaggattctgttgaatcggcatctgctcgagttttgatggccgtgctagagttgcaacttactcgagggcacagtcgtcaaaagtggcagcagttgtacactgggagttatgcagcatttaagatgatggaaatggccaagaatagtgcttgtacccaagcacaagaacgacttgaggaaacaaaggttcaagcggaacaggttattggactagagcatcaggtgacagaacttcagatgcaacaccaagctgatcagaatcgcattaaggagcttaagcatcagctaactaatgctcattctaaattaaaaattttgagtcagcaacaagaagaaatttgtctgtatgctgttgttgttagagaagaccttaaggaaaccatgagcttcataagccatcaggatcaggcgataaaagaattgaatcgtgctcatcccatggaatttcaagtagcacaacggcttgtcaaccatctgcagcaagcagtgcataggctcaatgctgccttttatcctactcctgcatcggcggactaa

SEQ ID NO: 32817 - DNA, 762 bp, Zea mays
  Peptide Sequence Number=SeqID_76192
atgctggccaagaaggaggagcacttggaccagagggaggagcagaccgcggctgtggagagcctgcaaaggctgcagtgggagctggatgacaaggccagcagctttgccctggtcgaggagaacctcaaggagaaagatgcttccctggataagcggctgacggatctcgcctggcgggagaaggacctcgccttcagggaggaaatgtttgaaaggcgggagaagctgctggccgatcatgagctcgaggcggaggaggagcgggcgctggaggagcgggtccgccagttcgaggcggtgcaggaggcacaggcagcaccgggcccccaggcggtagaggcgatgcaggagacacttgaagacctccaggtgaagcagcacgccggggtccagcgcatcgccgcatgggccggcgaggcgagcacggtactggtgccgctaggggtgagccccatcccggtgtcggagctgccgacgtccatctccgacgcgctcccggtgctggactccgccgccgaccgcctccaacgcctggaccagatccttggcgcccgcctagagaccgaaggcgacaggctctgccaggcggtaatcgagtacatcctgacgtgcttccggagccatgacccgaccatctccttggagccggtgattgctggtccgatggccgacaccgaagacgccacccgggaggcagaactaggtgcagacacatccccctcaatcaagcatagcagaaaagaagacttcagctgctga

SEQ ID NO: 32818 - DNA, 375 bp, Zea mays
  Peptide Sequence Number=SeqID_76193
atgcacccatccccacctcctatcgcgctcggcagcctcgccggcaacatcaccgccgcgagcgcccgccacctcaccatgggctggccacctcgagcaccctccgggcaaattggcccctccaccatgatcccctatcctcgcctggtgcctcgccaccctttcaccatcgagaaccgggaccccggcggagaaccgatgcggggcctcaccggcgcggaagagggatccgatgctccggaatttgtagctcctgaagaagggcaggaacctgacccctctgaaatagatcttttgtgccaggaaagcttcgacgaaggcaagtccattcttcccttgatgcataatttacctattctttctaccactacctaa

SEQ ID NO: 32819 - DNA, 471 bp, Zea mays
  Peptide Sequence Number=SeqID_76194
atggcgctcctatatgaggggcagagatttacgatgccggacgcaacggggaagagggggtcgagcataggactatcgagtgggcgggccaagaccgctggggaagttggagctcgtgccggcgacgatggacgccatatggggctgcgcaaccgcgcttgggatgccgaggtgacgaggatgtcaggaaagatgatgacgattatggagggaaggggaggtggccagtacgtcattagagcatgggagaaggtggacgacagctatgcgcgaggctcccctggcggtgcgtggggcagaaggcagcacacatgggcgcgaatcttggcagcgaagcccccgcgcgactcaagcggctcgaatgagaagataggggatagacggagagacacccgatggtggggcgagctggcggtcgagcagcgcacgggcattgcctgcaatgtggaaaaggctgactataggatctag

SEQ ID NO: 32820 - DNA, 324 bp, Zea mays
  Peptide Sequence Number=SeqID_76195
atgggcgcgagacagcacccgggggaggggaactggcgctgcttctggctcggcgccgggccggagccgccgcccaaaaatcaccttcgtctcctccggagtgggcggcaggatggagctggacgcgcccccgtgtcgaccttgatggcgggggcgggcgcagctggggcttcctcagccgctaccgacggtgtactcgatgacatcgtcgtcgttgaggctgtggcagccgtcggagcagtggggaccccctccgacgctgcggcaccgctgctgccggacccccagctggagcctaggggcccggtagcgctgtctcggtga

SEQ ID NO: 32821 - DNA, 816 bp, Zea mays
  Peptide Sequence Number=SeqID_76196
atgttcgtgggggtggcgccctgcacctccctcttccgccatttctttgtgctggtgaagtcggggaaggcgaaggaccacctcggcgcctactacttccaaaaaaggccggatttggccggcgcttatatccccaccttcggcggcgcaaggtgggaaaactggcatgaagactgggtgatcgccaagactcgaccggaagtagtggagggccaagccatccctggcgccggagttccagttcatactggacaggatcaagagcttagcgacgagcagcctgacgtcgatgcacgtggtcggggacttcctgaagcgccggatcgcgccgctgcagcagagggtgcgtctatgttgctggctcaccggctcaaacgacatcggccggatccagcacgggcggggactgacctgtcctgggaggagctggaggttctggttaaggggattaccggtgagtccttcattcctgagtccctgatccttccccagggcatctccgcactctacgacgatccagggctgaggacggcaattttggccacgctgccgaccctcgacgagagcggcgtggcggtccgccagaccggtggccaggaccaccaccgcgggattcggatctccgatgcgccggccggaggcccccagtctatcggcgtggctcccagtgcccccgctagagcttctcgcacctccgccccaggtggcatcggggtgtcggaggaagagaggcgacgccggctgcgccgtgccgacggatcgtttgtttcggacccccctttggggccgaggaggccagctcttagaagcgtctga

SEQ ID NO: 32822 - DNA, 453 bp, Zea mays
  Peptide Sequence Number=SeqID_76197
atgatcccctatccccgcccatgcctcgccaccctttcaccatcgctgaaccaggatcccggcggagaaccaccgcggggcctcaccggtggtcgagcccggccgatggaaggctcttgggtcattaggacatcctactgctcagaggaggaaggattccctcatctcttgtggagttgcgcgcttcgcatggggatccgcaagaagccggagtatgtctggaaagaataccgcgagaacggaattgagaacaaagaggtttttgaaaccccccatcgttacttcccacctagcaacaaaaatacccctacctggaggaaaagacttcaggccctgtcaggaagagatcctactgaggatgaccccaccatcgtctacatggccggatatctccacactctcgataaccactatgatgacctttcctcccactgcacccacctaaactcctag

SEQ ID NO: 32823 - DNA, 801 bp, Zea mays
  Peptide Sequence Number=SeqID_76198
atgtgcgacaaaagcctcctagcgagtattaacactcccttcgaggctcgggggctactgtcggggaccataattaggggtaccctcaaggctccaaaatctcagctggtaacccccatcagcacaaagctgcaaaggcctgatggagtgaggctgacagcagccaagtccggccctaggcgccatgggaaactccgcttcgcccgaccccagggctcggactcgggctcagctccggaagacgacgaactccgcttcgcccgaccccagggctcggactcgggctcaaccccggaagacgacgaactccgcttcgcccgaccccagggctcggactcgggctcagccccggaagacgacgaactccgctccgcccgacaccagggctcggactcgggcttagccccagaagacgacgaactccgctccgcccgacctcagggctcggactcgggctcagtcccggaagacgacgaactccgcttcgcccgaccccagggctcggactcgggctcagccccgaaggacgacgaactccgcttcgcccgaccccagggctcggactcagccctggtatcagccgacggtctccgcctcgcccgatccaggggctcggactcgacctcggccttggaagacagactcgacctcgacctcggaggagcctccacctcgcccaacccagggcacggaccgaccacgtcaacaggaggcgccatcattaccctgccccaagctgactcaggctacggggaacaagaccggcgtcccatctggctcactccactatacgaccaatga

SEQ ID NO: 32824 - DNA, 435 bp, Zea mays
  Peptide Sequence Number=SeqID_76199
atgggccagtcggccgcgggaggaggcgcgatggtcgatgcggccaaaaatgggccggcagtaatggcggtggcaggcaggcagaagcagcggtcacgtccggctcgcgcacgtgcaacggctgccccacgaaccacacgccccgtcgcattaactccacggcgggacaggcggcacctttggcaggagaagcgagcgacgcttcgccttcgccataatgaccgcgtcaaaaaaggttcaaaggttggcccctcggaggggtttaacagctgcctcagagcgcttgggctccatgcccactactggtcagaggttcgaaggctggcccctcagaagggttcaacggccgcctcaggccactcgggctccacgcccactactgatcaggggttcgtaggctggccctcgaagtgttcacagccgcctcagacatag

SEQ ID NO: 32825 - DNA, 609 bp, Zea mays
  Peptide Sequence Number=SeqID_76200
atgaacaaaacaccggcattcaaggtgccattacaaacggaaccccggttccacctccgcaggtacgaacaaccccacacgattggggggctagcggagcaacataaggccgacggatggctcgccgtcgcccgctccaacagcagcgacgacgacgacttctgctccggggggccaaacagcagcagcgatgacctcagggtggatgctgctgccatgaggccctcgcccatgccctcactcgagaggcaaggacgggcagaaggccgtagagttggaggtcagtccgtgggcggcaccggctatctcgtaggtggagaaacctcttccggctgccgtggaggaaggcggcaccgggagcggctccgaagccactcgggtcagagagccaggcatgcggcagctgccagcgccacgaacggcgaacgcccttccccccaatcactgagggaaggagcgggccaccgcccgcgcagggaccgaccccaactcggcgcactcccctccccagcactgatgatgaaaatccttgaagctgagggaggggcagaggccgcagcccggcttgcttttccccgccatcgaactggaggtcaccgtcttgggtga

SEQ ID NO: 32826 - DNA, 210 bp, Zea mays
  Peptide Sequence Number=SeqID_76201
atggcgggcgggaaggagctcgccggagctaaagaggggtgtctggccggcggtggatttgagttagggatcaaggtgaacacgcttgatctttggctcaagggctcaattagggtttttattggggttgcacattttgtctttttgaaaaacccatttgttttgaacatgatacttttaagtgtatattacattgctctgccttgttaa

SEQ ID NO: 32827 - DNA, 321 bp, Zea mays
  Peptide Sequence Number=SeqID_76202
atggcacccaagagagctacctcgaaggctgacgaggctgcgaaggcagcactgctggccgagaaaaagggcaaggcccttgtcgacaccacccaccaagaggcctgcgaagccgacgcactcagcaagaggcagcgcaatgaacaacccactcccgaaggcagtctccgcacttgcagctctagaggacaaccgcaacttcccccaggctttgctccactgaagggcgcgaatgccaccgaggacggcaaagtcatcggcgttttagcagaagagcagctacagctgcgcgccttgcgcatcaagaaccgcaatctctag

SEQ ID NO: 32828 - DNA, 3129 bp, Zea mays
  Peptide Sequence Number=SeqID_76203
atgtcgtcctcttcctcttctgctgccgatacaccgccatccggtgcatcgtccgaggagacgctgagcaatgtggcggcggaggagttgcgtcctggcgacatagtggaattcggcgcgttgcggatgtcctcggtccgcgtgcaagacatgcaacagcttgggtattttggcggcggagtggcacgtgtcccggggacagaggaggtccccgagccagaaggcgagttagtcgtcttcgaggcttttttcgccgctggccatcgtctgcccgcgcatcgatttgtgcgagagaaaagcaaaatcggaaataagattgctcaatttggatcttgcacatttacgccgaagaccggcaagacttcgatggaagtcgtggagttggttccctgcgcctgcaataaatggggcaactggtgggaattttggttctacgttgccgaaggcacagtcaaagaccatccagggctccccgtggttgtcatgtgttcgcattattacgtagcgtacccgcagtttgaggtagcagaggaggatgaaaacgaaggggcccttcggtgcgtggcccgcatgagtagcgggcgcgaccttgttgaggagtttgtcgggtatagggtatggcccttgacgcgtggctgggcgctgggcgaagtatgccctcgccagatgccctcccgtggcgcgatgatggtgcggagtcctgccttcgcactggatttgcatggccgagatcccgccgcattcgtgcgtgaagcggaagacggtgcggcgaggattgtggggtgctacgtgccgaagacagagggtctgcggagttgggatatccgtgggaccaatgacaggctgaatcgggtcttcgagttgaacagtttgccttacggtggttaccccggggaagacgccgccgaccgccgcgggaagaaaccgatgggcagtaccgaggaagggccatcgcaggaggccgccctggccactaagaagagaaaattaggtactatagtgggggaaaagggggtgtctgataattttgttgtggagttgatggggacatgcgcggcccccgggggaaggatgtcttcgcccgagatccaggagtcttcggcgcgaatgttggaggttaccgggggtcggtggccaaagaatcttccgatccccttggcagagggcgaagacatctctacatcgcgtatagctcgtggattgaagattttcccttacggaaggaatattgttgctgttgtgtcggcagtgatgaacaaggatcgccaggatgctgcgcagaagtgccgggcggtcgtcaggctccccgatcctaggcatgaagcgaagagagcgcgggggagcgcgaaggctgccgccgccggcggtagccagccgacgctggccgcgaaaccggccgcacccggctccagcaaggtgtctgagagtgcgaaggtcgttgctgccggcgaagccaagtcgacccagggcgaggccgcgaaggtccgggagttgccttcaccggggaagcgcgttgccgacttcggcacaaatattagcgtggacgactatttcgtcgagtcaggcgaggggcaaatggttgttgtcccgcctgcggtggcaaccacggcgtcaaccgcgttggtcggggcgaagggtagcgctttctgcgcaagcggtaagatttcttcggccgctgctgtcaagggcgaggcgggcaccatgtcccgccggctgagggaggcgtcgcagcagctgtcgcagcagctaagtcaacacgcggacgtcgtccgggagaagtcggccgcggagagcaagagccgcaggttggcggagaaggtggccgccctggacgccgagaggacggacctccggcgccagctggtggaagaaaggagggaggccaaccaggctattgccgaggcgcagcccgcgcaggcagcggccaaacaggcgcgggcggagggaagccttgccagccaacgcgtggaggaatgggaggagcggttcaacgctctgcgcggccgcgtggagaaggccaaggcctctacgcgctcagaagtggaacggacgcgcgcacagctcgtggagtcgtaccgcgagctgggtgtgcggatggctgactttgaggtgcccgaccgagaggcgggccttcgcttcctcgagtggctgcaagaggaactgcaggtggtcctgaccctcatggagggtttcatgtcctttgcctcccatgtcacctgcgaaggggccatgaacgcgctgtctcgcgagggctacagacacttcgaggtcttcgaccaagctgacaagagctttgaacgcgagatttttaaggccgaagacccagttgtgaagcagtcagcgggggcactgtttgataggatgtggggggcgtatggttgggaggatgtcagggagcggtccgaccgagcgagggagcagatggagcgcgccgaggatgtcgaggacttcggaagtctagccggcgcgccgcccgaggctgcggagggcaaaccggtgctgccctcagatgctggtgaaggcccgtcggatgcgcccgtgcctgctgctgccgacgaggaccctgtgttggccactgtgccgacagccgaaggcgcccaggaggtggtggcggagccggcggtcgaagaccctacggccgcggccgcggcttcacaggttcaggattttgggcctacgcacgcaaccgccactgaaagtgctaattttgtggcggcttcgaccgcggttacggaaaatgattcggatgattctgtgtctaagttttttgagtctgatggttctgggagttcgctggtgtggatggaggagtcttcggatgaggatttggattatttcgcggcattggatgtggctgcggcggagacttctcctcgtgtgatggatgttgttcccggtccgagtgctgggcgtaggcggcgaagggcggtggcgaagcgtagggtgagtgaggttgagggtggtcgtcttcgtgtggacagggctggcaagcgggaattgttggcctcgccggctggggtgagcgtaggtgagggggagttgcgaaatctttttgagggtgaagagctgaggataatgttgtttaactatagggagatgggtatcatcccaaaggttggaccaatgtaa

SEQ ID NO: 32829 - DNA, 609 bp, Zea mays
  Peptide Sequence Number=SeqID_76204
atgtgtgtcctaaggaatccgaagagcccactcaagcacaagatcaaccatcatcttccatacaagcatctcaaccaacctaagatgaggatcaggctcaagacaatgaaattgaagatcaagaggatgagccacctcaagagaaggacaatgatcaattgggagatgacaattatcaagacaaggaagatgaacaggccttacgggatagaggatgcattaggagactcggattgggtgctggcaatgcaagaggagctcaacaacttcacaaggaatgaggcccgtaatgcgcagcgacagcgcggggcccgttatgatgggccggattgcacgtgggccctcgtgttgcgcgacgccgcgggatggggtgacctcgccataggtcttcgtcctttggcgtgtcggacgaagggtggagtctgccagtcgtcgtctccattggtgcagcgagactggcgaaggcatcaagcgaagggtagcgtcttcgccttcgccccaacatttgccctccgagggaccagttcgaccaagtcatctggtgccgaaggcgtcgctagatggtggagacgctgccctcgctcgaagtggttccgcgggggtttttga

SEQ ID NO: 32830 - DNA, 582 bp, Zea mays
  Peptide Sequence Number=SeqID_76205
atggcaagattcgcacgtttgcgatctctggagacgtttgaacaatggaagaaactcacctccacgtgttcgacgccttctgcccacgccagagcacgcccgcgcgtgcccccgcatgcccagcgccgcgcccgagccaaaccagtgccgcggcccgcgcccgagcctataaagccctcccaggcttcgactgcactcttccgcgcaccctccaaacctcaccggagtttagctcgtcgtcgtttgcccgtgcgcagcaagtccgcggccgcccaatccctctgttaccgtagaccggccaacagagccattcccaacctcgtccagccctcggggaaggccgtgcacgcctccgggaagctccccgagcgaggaatcggagtttgcttcgccggagaggccagcccacgctcgccggagctctcaaccccgccggagtacgtggaccggccttgcttgtggcataattttacaggttctctggaggacatggttgctggagtgacttggccgtccaccttaccaccgggttggactgttgagtgggaccctgcctcggctgaggaggagcatgaggagtga

SEQ ID NO: 32831 - DNA, 723 bp, Zea mays
  Peptide Sequence Number=SeqID_76206
atgtcttctcgctcccttatgcgtcgcgtctttccaccttccaagcccccggatgggggatacccgccgtcttttcgcctcatcgttggaggaacgcaactccgtgggagttggtacctttcagccatcgtttggcttcaaggattttcatcagccagcccggctgtacccccccgccggtggtcacccaagacggtgaccaccaattcctgggtggggagaagcaagccgggctgcgatcttggtcccaccctcagcttcaaggatgttcatcatcctcgctggggtgggggccaggctaagccggcgctctacctcccatgcgggttcgtgggtcaccctctcccgcggcgttcgagggagagggcgctcactggccctgcgggcggcccggacttcgacaacgcggggctggtcgatggcaggcgtcgtcacctccagcgtgtcgggctcgccggcttggctcccggcggccccttctgccggagggcggctgtcgcgccgtgccggtgccccactcgtccgggaggatttgagtggggatctgccagagggctgatggcccctgtcgtcggtgtcaaggcgaaggcggttcgagaagtccccgtcgccgacgggatcaccgccaccatccgcgcctcgggcctccggctctttgtacttgtcctcgcccctcgagcgtcggcgtgggcgagggcaagattgcagcagcgcccaccctga

SEQ ID NO: 32832 - DNA, 189 bp, Zea mays
  Peptide Sequence Number=SeqID_76207
atggacgccgaggtggtggagctgatcgaccaggcgcctacagctccgcctaccttgtcccccacaaggtcgagcgcaagagctgaacttcgtgaaagcaagctgatgaacaagtacaatgagctcaagcgtggattcaggtttcttcatgctgcatttgtggcttgtggcgcgtcggagtttttttaa

SEQ ID NO: 32833 - DNA, 630 bp, Zea mays
  Peptide Sequence Number=SeqID_76208
atgaacaagacaccggcattcaaggtgccgtcacaaacggaactccggttccgtcccgcgggtatgaacaacctccacaccggggagcctgcggggcgacaagctccgggcgactcaccagcgacctctgcagcagcagctatggtcccaggacggacgcggccaccagaaggctctcgttcgcgtccccgctcaagggacgcgaaccagatattaaagccaaagagccgggggccgccatcgcgggctgagtcttctccaacacgctccaaggtcctccccctacggcacgggggctgggtcccgcgtgtcatgcaagctggcccagagcagaagaagccaaaaccgccgcgcgcggtgcatgcaactgcccagcggttagaagcattcctccactatcgcctagaccagcgggtgaaagggcgaacagccatgcaggcggcatgcaaccgtgccaagtgggcgcacccctccgacttccaacgcacccagcatggaggcctaggcccacacgtcatgcaaccggcgcaccggttgctacgtgcgagcaactgcgccaccactcgcgccactaccgcgcctcctcgactgcggaaccagtaccgcgactcgaggcgaccctgcgtatga

SEQ ID NO: 32834 - DNA, 609 bp, Zea mays
  Peptide Sequence Number=SeqID_76209
atggcgcctcttgttgacgtggtcggtccgagccttgggttgggcgagagatcatcggctgaggccagggctgagtccgagccctggggttgggcaaagcggagttcgtcgtccttcggggctgagcctgagtccgagccttggggtcgggcgaagcggagttcgtcgtcttccggggctgagcccgagtccgagacctggggtcgggcaaagcggagttcgtcgtcttctggggcagagcccgagtccgagccttggggtcgggcgaagcggagttcgtcgtcttccagggctgagcccgagttcgagccctggagtcgggcgaagcggagtttcctatggcgcctaaggccggacttggctgctgtcagcctcactctgtcgagtggcacagcagtcagagcagcgcaggcggcgctgtcctcttgtcaggccggccacctttgcattaaatgcccctgcgatttggtcggttggcgtggcgatttgccaaggttgcttcttggtgaagactgggcctcgggcgagccgaagctttgtgctgatgggggttaccagctgagatttaggaatcttgagggtacccctaattatggtccccgacagtag

SEQ ID NO: 32835 - DNA, 141 bp, Zea mays
  Peptide Sequence Number=SeqID_76210
atgggagaccacgtctcaggtcgcgtgaggggtaaagtctgcgggcaggttcactcaggattaataacattatgcaaaaagaaaactaagttaaggaataacttagggtttctgggtcatacggggcttttagtgggttag

SEQ ID NO: 32836 - DNA, 354 bp, Zea mays
  Peptide Sequence Number=SeqID_76211
atggggaagcctgtcccatcactcctcatgctcctccccagccgaggcggggtcccactcgacagtccaacccggtggcaaggcggacggccaagtcactctagcaaccatgtcctccagagaacctgtaaaaattatgccacaagcaaggctgagtatactaatactcagctagacttacccgtgaccgcacttgtacccaccataaccagaatgggagaccacgtctcaggtcgcgtgaggggtaaagtctgcgggcaggttcactcaggattaataacattatgcaaaaagaaaactaagttaaggaataacttagggtttctgggtcatacggggcttttagtgggttag

SEQ ID NO: 32837 - DNA, 360 bp, Zea mays
  Peptide Sequence Number=SeqID_76212
atgacgggggctcaccggacgacgagcagtgaggctgacagatcgacgaccagtggtgcgagggcaatagtgatgcaggggatgaaaacttggacagacgtgaggccgatggccacgacaagagcgacgctcgacaaacgcgttcctgtgcgcggcatggtggactggagtacgacatgtgctgaggccgagctagatagatggagcgggacccaggcgcggctagcgcgtgcaggaggcagggacacgcgacggcggctagcgcacagcacgctggggctgcaggcgagtgcgcaggaagctgtggcctgggtgcagccacagggtggcgacctgtgctacggcgagggaggagcctga

SEQ ID NO: 32838 - DNA, 480 bp, Zea mays
  Peptide Sequence Number=SeqID_76213
atgtcgaaaactggagggtcccgcttgtcaatgactggttgctattctagcaaagggaaggtgttttttcggaccttcggcttaaggccttcgtccatatcgcaatatgaatttttcagtacagcaaaattaatattacgaggggctactgttgggggccttcggcttccgaagcatttgagaacaagtccccaacagatgggaaacatcttgccatatgaacatgcggtgtcaccctggcgctccacgcgatcccgctgctccaggtcgtcgccctgtgtcgacggtggagggcctgtgcgggtcgcgaagaagaagcagccagatgaccttgaccgtgttgctgcgcaactctccgcgaaggagaggcggtgcctcctacacggcgccagtgccctggactcgagcggcgactctgactttgacacttgcatctctgctttgagccaatgctatcttcggagttatttctattgctga

SEQ ID NO: 32839 - DNA, 402 bp, Zea mays
  Peptide Sequence Number=SeqID_76214
atgggaagctccgcctcgcccgacccaggtctcggactcagcctcgaccccggaagacggactccgcctcgcccgaccctagggctcggactcagcctcggcctcggaagacggtctccgcctcgcccgacccagggctcggactcagcctcgaccccggaagaaggactccgcctcgcccgaccccagggctcggactcagcctcggcctcggaagatggtctctgcctcgcccgaccccagggctcggactcagcctcgacatcggaagacgaactccgcctcgcccgaccccagggctcggacttgacctcgacctcagaggagccttcgcctcgcccgacctcgggctcggacccgccacgtcacagggaaggccatcattaccgtacccctagctag

SEQ ID NO: 32840 - DNA, 462 bp, Zea mays
  Peptide Sequence Number=SeqID_76215
atggccatgatgggttcaacatcggaaaagatgtacctctgccagataccaaactttgggtttgaaatgattaagctgagactgggcgggatccactttagtaagcatttctgcaaaacagagtctttgattattgacaagccttaccttgactcccttaaccagcatacccttgagagtcttttctttagtcaggtgaggaagcgacaaacttttgttgcttctgttctaaggtggtaccaaaggaagaacgcaaggaatgaagtgcgggaggaaaggatcttccatttagaacttttatgtaagaacttatcgggaggagtttttgcctcccttggccaagacatagatgtcatcttgggcatgaactggttagcccagcataaaacaattctcaaccctgatctgagaaccatcaggttgagttatggccaatcgagagttggtgacttgattgcctaa

SEQ ID NO: 32841 - DNA, 234 bp, Zea mays
  Peptide Sequence Number=SeqID_76216
atgcaggcggcatgcaaccacaccaagggggcacaccctttcgactccgacgcatccagcgtggaggcccaggcccacacgtcatggaccaagaaaggggatactccgaaagggatccttctccgcgaaggaagcaggccccgaaccctcctactgatcagaggttcgaaggctggcccctcagaagggttcggcagccgcctcagagcacttaggctccgcgcctactactga

SEQ ID NO: 32842 - DNA, 162 bp, Zea mays
  Peptide Sequence Number=SeqID_76217
atgtccggtgcacaccggacagtccggtgcccccttctgaccgttggctcggccacgtgtcccgcgcagatcgcgcggccgaccgttggcccggccgaccgttggctcaccggacagtccggttcaagattttgggcctacgcacacaaccgctactgctaa

SEQ ID NO: 32843 - DNA, 879 bp, Zea mays
  Peptide Sequence Number=SeqID_76218
atggcatcgatgtgggggggcgctgcgcaggtcgacgtctcgtgcgtcgaaggttatcggtacgtgggaccactttgtctgcacgactgggccggtgatggcgacgtggttgatgctgcggtagtggtcccgcttctaccgctttgtgtcgaagtcggtgctggaccccctagtgatcatatgaatgactccgcgatacggctgatcggcgaagtcttcttgttttggggcgtgggggtgggggatgttttgatgttgctggtgtggaggtgggggtggggaagttttcgccatgaaagagacagtagaatcggcgaggcggctgcgcacgtccccgacccctaccacgagttccatttccgtggccctggggggatattgctggcggcgaggggcgtcagcagcggggtgctggttcttgggtggatccctgatgcagtggctgtaaaggacgccggcgcgaaggccactgatggcgtagtggatggcgatctgagtgagagtttggccaaggagtcggtgtctgggcggtacccttggaagttgagcaggaatttgtcccggaggcttctccaggagtcaatggacagtgggggtaacctagtgaaccaggtgtggcgccaggggacttcgctcatcgaggtagttgaccccttggaatggcgcagcgtgtgggaaggcgtggtcgcgctgggggaagggtgccccgtgctgcaggccgaggcggccttcgcgtatgtcttccagttgtgcgcgctgttgcaggggtgccccgtgctgcaggccgaggtggccttcgtgctgcatcagcgcgatctcccgctcgaggtcctgggccttctgctcttcgtcgcgtatcatttgccgcaccttggctag

SEQ ID NO: 32844 - DNA, 498 bp, Zea mays
  Peptide Sequence Number=SeqID_76219
atggagacaagacaacgggcaggctcacccttcgtcccatacgtcaccgggcgaagacctgtgacaaggtcatctcatcttgcgacctcgtccagcacggaggcccacagctattgccatctcatgcgagaaccctatttacgtcactacacactcccgttggatccccttgcaccagagagcaagttccaacatttggcgcccaccgttcgtgctacgaaaaaaccacccgcgatggcacccaagaaagctagctcgaaggctgacgaggctgcgaaggcagcactgctggccgcaaaaaagggcaaggacctcgccctcacccactccacccaccaagaggctactgaagacgacgttctccgcacctgcgaagatgacgctctccgcacctgcggccctgaaggacaaccgcaacctcccccaggcttcgccccaccagagggcgcggacctcaccgaggacggcggagtcctcggcgtctcagcggaagaatag

SEQ ID NO: 32845 - DNA, 771 bp, Zea mays
  Peptide Sequence Number=SeqID_76220
atggtcgcctttcaagggggtcaccctccttttaaaggcgactctccctacatgcatccccagccgtcgtgggctgagtcttctccaacacgctccaaggcgggcaggagcagcggtcacgtcgtcagccaagctcacgtcacctcgtgggacagcgagagaaccctctctcacagcgtgaagacggcgcgcccgtgttccgttcctcgaatggctcgtgcacgcgcaacggccacctcgcgaaccactcaccccgtcgcattaactccgcggcgggacaggcggcgcctcaggcaggagaagcaagcgacgcttcgccttcgccataatgaccgcgtcaaaaaaggaaacaagccccgagcctccctactgatcagaggttcaaaggctagcccctcggaggggttcaacagccgcctcagagcgcctgggttccgcgcccactactggtcagaggttcgaaggccggcccctcagaagggttcaacggccgcctcaggccactcgggctccgcgcccactactgatcaggggttcataggctggccctcgaaggagggaggcatcgagccctcggaccccgtcgaaaggggaccgggtccggcagatcacccgcagctcaccggagacaccatgttcggcgccctccaagggcaacatggcgctttcccgcccctcctccttgcggaaaggcgacgcaggggccgtcaacataccagcccgagaacttgggacccgaccgtgcacccgggctacggccagctcgcatga

SEQ ID NO: 32846 - DNA, 1011 bp, Zea mays
  Peptide Sequence Number=SeqID_76221
atggcgcctcctattgacgtggtcggtccgtgccctgggttgggcgaggcgaagcggagttcgtcgtcttctggggctgagcccgagtccgagccctggggtcgggcgaagcggagttcgtcgtcttccggggctgagcccgagtctgagccctggggtcgggtgaagcggagttcgtcgtcttccggggctgagcccgagtccgagccctggggttgggcgaagcggagttcgtcgtcttccggggctgagcccgagtccgagccctggggtcgggcgaagcgaagtttcctatggcgcctgaggctgggcttggatgctgtcagcctcactctgtcgagtggcacagcagtcggggcggcgaaggcggcgctgtcctcttgtcagatcggtcagtggagcggcgaagccacctttgcattaaatgcccttgcgatttggtcggttggcgtggcgatttggccaaggttgcttcttggcgaagactgggcctcgggcgagccgaagctttgtgctgatgggggttaccagctgagatttaggagtcttgaggctgaagtgagtcggctccacgcggaactctgccgcaggacgactatatgggtcttagatggcgaccgcataaatgagttgagaagagatgtctgccatctgcgagatcagctcgcggatcgagatttggcactcgactgggttgttcaatcccgttcgcttgcatgggacaaggagcaaaaagctcaagctcgagcagccgagctcaacttggccgttgaagacctgcagacatattgcaataccttacatgaagaagttcatgtattatattcgcaactgcatcccagtgagcctacgaatcctgttgagtcggaagccagaccctcgcatgttgcgggacgcgcgcttggtggtgagttagatctttttcagccccctcctactatgaggctggtcgatgaatggtcccccacacccgatgacaaggccacccaacgcaacgggaagcaggaataa

SEQ ID NO: 32847 - DNA, 273 bp, Zea mays
  Peptide Sequence Number=SeqID_76222
atggcgcacccaggcggtcggtttgcggcagagtgcggtcccgcggcggcccttcaactacggcgagaaattgtgctcaccagtgaatacccacacgcacgccgacgactggatgaactgtcccacaacctggagcctcaccgtggttacacgctgatgccaggcgacgcccaaccggtcacgaccgtggcggcatcccaagagtacggcaacagcggctccctctcagctcacctactcccttttctttggctaatcgaccagttgagttag

SEQ ID NO: 32848 - DNA, 75 bp, Zea mays
  Peptide Sequence Number=SeqID_76223
atggcgatttggccaaggttgcttcttggcgaagactgggcctcgggcgagctgaaggttacaaacagtatgtag

SEQ ID NO: 32849 - DNA, 490 bp, Zea mays
  Peptide Sequence Number=SeqID_76224
atggcgcctcctgttgacgtggccggtccacgccctaggttgggcgatgtggaggctcctccgaggtcgaggtcgagtccgtcttccatggccgaggccgagtccgagctcctaggtcgggcgaggtggaggccgttggctgaggctagggcggaatttgagtcctggggtcgggcgaagcggagttcgccgtcttctggggctgagcccaacccgagtccgagccctgggtcaggcggagcggagttcgccgtcttccggggcttagcccgagtccgagccctgggtcgggcggagcggatcggagcggcgcaggcggcgctgtctttctgtcagaccggtcagtggagcggcgaagtgacggcgcgaaaacagggcctcgggcgagccgggaacgtgttcgccgctggaggggggcctcgggcgaggcggagatcctccgggctttatgctgatgggggttaccagctgagaattaggagccttgagg

SEQ ID NO: 32850 - DNA, 495 bp, Zea mays
  Peptide Sequence Number=SeqID_76225
atgggttcgaaggctggcccctcggaagggttcgacagccgccccagagcacgcagagtcagggatgaccctgggtacgtccgttacatggccgaggctcgggctacgctcctgaggccgcatgaggaaacaacaaggccgaccgaggcatcacaaaaagaattaagacctcagaggagtcaaaccactcctctgaggcctcgtgggctacacccggcgggaaaacagcaatgttcgcctcgctctggctactgtgccaaccaccagggtaaaactaagtcacgatttcccacgagttcagcctcatgcgcaacagggagctctgcctcgcccgacctcaagcctcggcctcagcctcggcctcgagtaaggtctccgcctcgcccgacctcaggcctcgacctcagcctcggcctcaggagaagtctccgcctcgcccgacctgggcctcgggccgactacgctacaggggatacatcattaccctactcctag

SEQ ID NO: 32851 - DNA, 586 bp, Zea mays
  Peptide Sequence Number=SeqID_76226
atggcgcctcctgtcgacgtggtcggtctgtgccctaggctaggtgatgtggaggctcctccgaggtcgaggtcgaggtcgagtctgtcttccgtggccgtggtcgagtccgagccaatgggtcgggcgaggcggagaccatcggctgaggccagggctgagtccgagccctggggtcgggcgaagcggagttcgtcgtcttctggggctgagcccaagtccgagccctgggtcgggcggagcagagttcgccgtcttccggggcttagcccaagtccgagccctgggtcgggcggagcggagttcgccgtcttccggggcttagcccaagggcttagcccgagttcgagccctgggtcgggcggtgcggagcttcctatggcgcctgaggtcgggcctgactgcctgtcagcctcactctgtcaagtggcactgcagtcggccacctttgcattaaatgctcctgcgatttggtcggtcggcgcggcgatttggtcagggctgcttcttggcgaagacagggcctcgggcaagccgaaactttgtgctgatgggggttaccagctaagaattaggagccttgagg

SEQ ID NO: 32852 - DNA, 999 bp, Zea mays
  Peptide Sequence Number=SeqID_76227
atgcaggtggcgtgcaaccgcaccacgggggcgcaccccttcggcttcgtcgcatctagcacagaggcccaggcccacacgtcatgtaacgagcgtgccggaatcgcccgtcctgtcgcatcaactcctcggcagggcaggcgacaccattggcaggcgaagcggacatcatttcacctccgctatgatgaccgcgtcaaaaaagccgccccagagcactcaggcttcaagctcattactgatcagaggttcgaaggctggcccctcggaagggttcgacagccgcctcagagcactcgggctccgcgcccactactgatcaggggttcgaaggctggcccctcggaagggttcgacagccgccccagagcacgcagagtgagggatgactctgggtacgtccgttacatggccgaggctcgggctacactcccgaggccgcatgagggaacaaccaggccggccgaggcgtcacgaaaggcattaatacctcagaggagtcaaaccactcctccgaggccttgggggctacacccggcgggtcaaggcttcgtctacccaagggacgcgatctcgccccgcccgagcctagcctcgggcgggaactgtagtcccggacgaagttacgcctcgcccgagggcctcctcaggaagtgggcgcaccctcggctcgcccgaggcccagcttgggcaggcttcatcgagaagcaaccttggccaaatcgcctctccaaccgaccgtatcacaggcgcattcaatgcgaggatcgcctgacaccttatcctaacacgcgcaccttagttggcaaggtcgaacctcaggcgcaacaggaagctccgcctcgcccgaccttaggcctcagcctcggaaggaggtctccgcctcgcccgaccctagggctcggcctcaacctcggcctcaggagaagtctccgccttgcccgaccttgggctcagaccgaccacgccatgggggatacatcattaccctacccctag

SEQ ID NO: 32853 - DNA, 300 bp, Zea mays
  Peptide Sequence Number=SeqID_76228
atgtggagaaaaaccccatcaaagatggactgtcaggctgccgataagctcaccgtcgaccgccgcctctcggccgtgtgccgcgtggctcaactcttccaccgtgttgccgtgacccgctactgctgtcaaatcggcgccgaacgtgaagaagagatagaagtcaccgaagacaggacaccaccaccttcggattcgcaagcaggcaactgcttctacttcgatatctgtggatccgaacccgaatcacctgtaaacgaaggcaagccccggtgcatttccaccttcctgaggttttaa

SEQ ID NO: 32854 - DNA, 1161 bp, Zea mays
  Peptide Sequence Number=SeqID_76229
atgcctgcttcgcttgccaaaggtggcgcttgccctgccgaggagttaatgcgatgggacggatggttcgcggggcagtcgttgcgcgagccgttcgaggaacggaacacgggcgcgtcgtcttcacaccgtgggagagggctcccctactgctccagaaggggacgtgagcctgcaaacgatttgactgctacttccgctcgcctgggttgcctcgagtcgcggcactggttctgcagtcaagaaggcgcgacatttgtgcaagtggcggtgcagtttcttgcacgtagtaaccgcccgaatgcattccctcaccaatggtcacccaggatggtgaccaccggttcgatggtggggagaagcaagccgggctgcggcctctgccccgccctcagcttcaaggatcttcatcacccgagctggggaggagggcggggcaagtcgaggcctgcctccgcgtgggctggcgacccgcttcttcctccggcatccgggggaggagaccatcctccagctctgcggaggaggcgtcctccagccatgcgggggaaggcgaactgctgctacctggccagggtgcagcatttcgtcctccgtccgggcgactgtggccggctgcaccagggggtcgcacaacacgtcgtacgccgcgagggcggtactcgtgttctgggacggtcccgttctcgttctcgtggcgagaacgggagtgaggacctgctggtgcgctttggggcggccgccgctcgctggtgcggtgttggtgggcaggtggccgctggagagggtttctccgccgacgacaccgtcaatgccacctgcgctccgggcctccggctttttggctttaatggctggttctcgtcccccgcgaggggacgtgaacgagggccttccagcggtagcgttcgccctggggccatcgctgctgctgtcatgccgtccgagatggaggtcgttgtcgctgctgcagtggtcggcggcgagccacccggaaaccctcggctgctctgcgatgagccggaaccagaggcagcggtgtcggcatggacagaggcggagtcggctcgagcagaggcttcgttggcccaggagcaggtggcttcccaggccgaggagatgcagcagcggctgctggagcttggccaggtcgtccactag

SEQ ID NO: 32855 - DNA, 375 bp, Zea mays
  Peptide Sequence Number=SeqID_76230
atggcgcggtcgatccgagcccaaggtcgggcgaagcggagactcctcctgaggccgaggtcagggtcgggcgaggacgcgattcctcccgaggtcaaggttgaggccgagccctggggtcgggcgaggcggacaccaccttccgaggccgagggttccgagttttcaggctggtttgttgacgctgtcaacggtttggccgtagctgggtttgcgagagcagcccccgagcctctgcacggagcgagaggacgatcaaggactgactcgacttttatcatacgccccttcgtcgcctttccgcaaggaggaaggggggaagcgccatgttgccctcggagggcgccgaacatggtgtctccagtgagttgctaa

SEQ ID NO: 32856 - DNA, 945 bp, Zea mays
  Peptide Sequence Number=SeqID_76231
atggcgtcgtcctccgacgagcagcccaagccgccggagccgcccgccgccgccgtggtcgccgcaccgccgcagacgcacgccgagtgggccgcctcgctccaggcctactacgccgccgcggggcacccctacgcctggccggcgcagcacctcatggcggcggccgcggcgggggcgcccttcggcacgccggtgccgttccccgtctaccacccaggcgccgccgcggcatactacgcgcacgcgtccatggccgcgggcgtcccttacccgacgagcgaagctgtcgccacggtggcggcggccactgcgccggaagggaaaggcaaggggaagggcgggggcgcgtcgcctgagaagggcagctctggggcgccctccggtgaggacgactccaggagtgacagcggcagcgatgagtcgtcagagacgagagatgatgacactgaccataagggttcatctgcgcccaagaaaaggaaatctggtaacacgtcggctgaaggtgaaccgtctcaagctgctgttgtgcgctatgctacggttgagtcgccatatcccgcaaagggaaggtctgcctcaaagcttccagtgtctgcacctggcagggcagcgcttcctagtgccaccccgaatctgaacattgggatggacatttggaatacttctcctgccttggctgttcctgcagtgcagggggaagcgaatcctgggttggcgcttgcccgacgtgatagcgttactcaactggatgaacgtgaattgaagagggagaggcggaaacaatctaacagggagtctgcaaggagatctaggttacgcaagcagtcccatatttcattaaactatgctgttggtccacaacctgacgacttgcgtgttgtcatgggcataatagggagcgagaggcaacaaccaggctgggataaggctagagaataa

SEQ ID NO: 32857 - DNA, 351 bp, Zea mays
  Peptide Sequence Number=SeqID_76232
atggagaaccacccgggaaaacagtgctaccacaaggagacaatcgatcaagccaaggatggaggcaagaagaggttcgaggtaccgagtgcacgggagaaggtcaaggagaccaggaacccaaagccaggggtgaagaagaagacttgcaaagtcaaggttgatcgagttacgaagagttatgagacaatcgatcaagccaaggatggaggcaagaagaggttcgaggtaccgagtgcacgggaggtcaaggagaccaggaacccaaagccaggggtgaagaagaagacttgcaaagtcaaggttgatcgagttacgaagagttatggtgcatcaaggatcactacataa

SEQ ID NO: 32858 - DNA, 207 bp, Zea mays
  Peptide Sequence Number=SeqID_76233
atggcgcggtcggtccgagctcaaggtcgggcgaagcagagactcctcctgaggccgaggtcggggtcgggcgaggacgcgattcctcccgaggtcgaggttgaggtcgagccctggggtcgggcgaggtggataccaccttccgaggccgagggtcggtcagtggaagggcgaagtgactgcggtcacttcgaccttgccaactga

SEQ ID NO: 32859 - DNA, 309 bp, Zea mays
  Peptide Sequence Number=SeqID_76234
atggccccaaagggatttgaacccacaacctctcaaacaaatgttaccggtagctaccactacaccacatacaccgcattcaacgacgacgccatcacgtcgtccagctcatcgtccacctcaagcccaacctgccaccctagccaagagtcatcagtactcggtatgtcgcgcacgttcgacgactactatatcgaggactgtggcgtcatcttggcgccagaggtgacgcaggggaggaccgacaacaatgaccagttcgtcatcctcgccaccgttgaggtagcttttgtgccgacttgcctttaa

SEQ ID NO: 32860 - DNA, 228 bp, Zea mays
  Peptide Sequence Number=SeqID_76235
atggagtcgccaggctaccactggccgcagcggatcctggagaccctagaaaattttaatgtcatttttgaccatttactcggcgccgtagcctgtggcgccgaggtaacacagctcggcgccataggctatggcgccgagcgagcacagcagctgtgtgccacagtgctcataagccgtcaacttctccccttgtttgctcagctaaccacaataaaaatcaaatga

SEQ ID NO: 32861 - DNA, 1137 bp, Zea mays
  Peptide Sequence Number=SeqID_76236
atgattcccattctgcccagagatcgtgactccccattgatcactaccaagagtgagcactatgccccagccccctttgacggcactccggcaaagccaactacacccccaggttcatctaattattcagctaagggcgtcccattccaccctcatggttgcactgttatcccagatggtcactcaatgaacagatctgaaccattggatcggggacggacgattgtgatggggtgcgcgggcattttacagctcagtgactggcgttgctccctctatgttgttgaggtcaccgtaggcaaggtagacgcggtcgctgggggtctagggtcaccagtgagggctagaacgggtgaagagggtctggcgaactcactggcaggctttcggccgcaagaacaggaccgaaaatgggagaacgacgaaggggaggcactctgggcggaggcacagggcagggctgaattggccagtcaccgcgcgagcgcggcgaacccgacgcagccgaactccgggcagacagtgtggtgcgggcggtgctcaaaaggggtgtgtgggcaggcgatgtggccagggatctcggcgtgcgtgcacgttggtccacggcggttcgcgggcaaggtggagctgacaaggcggtcccacggaacgcacgggcacacgtgttcgaccctggtcggcacgccagagctcgcccaacccgcgcgcgcgctcaccccggcgtccagtcaagtccgccgcgcgcccacgccctcggccgtgcccgcccgcgcctataaagcctccccgggcgcacctcacttcgccccgcactcaccctcaccggccagccactttccttacctccggcgagctcaatttcgcccgccattgccgccagagcttcggccaccgtggccagcccactccagccaccctcaagccaagccagtgcttcggctagctccgtcagtagcccgtgaagctcgccaagccctcggccccggccagacttcaccggaggcccgagatcgacctcaccggacttcggtcttccgccgccgcgcgtggatcgagctatccagtgagtctccgcccaattccttgcgctcatatcttctctggcatcccgtggacctccctgacccatttgattga

SEQ ID NO: 32862 - DNA, 291 bp, Zea mays
  Peptide Sequence Number=SeqID_76237
atggtcaacctggtcacgatgctcaacaccgagctagaccacgcccttgacgagttgggcaaggttcaggcagaggatgcagaactgcgtgttgagcgcgcaacgcgccactatcaagatggcggttctcccgctcccgtcgggtgtcgggattcagcaccctttcaatgggggtcggggcatagtgctcactctgccaagggggtgcagaggttcattcgatttggttttgttagtcacccaccttggggagggaccttcggcctcggaataaagctatacacgatatga

SEQ ID NO: 32863 - DNA, 411 bp, Zea mays
  Peptide Sequence Number=SeqID_76238
atggtctcccattccggttatggtgggtacaagtgcggtcactgcacgacggcagtcggggtcagtgaggcattgtacgctaaggcgggagccggttatacgacgcctccccagtacgcggtgcagctgcccgaggagcaccgggtaccccgctgtagggtgaggatgaccttggagcctcatcccttgcagccaggctggtgtttgttggactccgagtctttcggatacagggctgaggacactatcgaggccattgctctccatgggttgacgaccttttgtggctttcaccccttggagctatccactcaccccattggtttgttccccgctgaaaaggaggatgacccgatgtggaaggatcgagtggagcatgccaaggatgtgtgggctctatacccagggtag

SEQ ID NO: 32864 - DNA, 168 bp, Zea mays
  Peptide Sequence Number=SeqID_76239
atggccagcccacctccggtcaccaccgtcgacgacccgcacctcgacgtgatcgccacagaccgccggacctcacccgacccttcgccggagccagctcccgagcctgccacagaggatcttcccgcagctccagcatttgaaggcaagccccggttttatgcataa

SEQ ID NO: 32865 - DNA, 546 bp, Zea mays
  Peptide Sequence Number=SeqID_76240
atgtcgcaatctaaatttattgttttaaacaaattaatattgcaggggctactattgggggccttcggcttacgaaggcatcttcggactcaagtcggtatcacagcagaccagaataatacgaaggttgatacagcgccgaaggtgaacagtacccccgtactgttcacgctgatctggcattcacttttgcgtcacgcttgtactttcatctccttcaagttgaagagagaagtgcaaatcgaagagaagggcgagaggctccaagttatggagattcctcgcaaacgggagaaagacaaagaaaggaaaaaccgtggatcacctattcacccccctctaggtgctctcaggaggctattagttgaggcagaggcagttagcgattcgccgcgccaacatcgcggggaagacgctcctgttagcccggccccacgtgtaagcggtaacgtgaaagagaggagcgccgccaagcgggacccgcgggcagcgtcgcacacgcacgcgtgcgacctgacccagcgcggtggtcccatcggacagtga

SEQ ID NO: 32866 - DNA, 1482 bp, Zea mays
  Peptide Sequence Number=SeqID_76241
atggggcatacatctgggtgtggcatccccctcttctgcaacctgtcagctgtccatcacttgttccttatcgtcaaccaaaggaaaaacttacatttaggaggggcccagatctatgaattaggttggaattggaatgacacacagttggcacaaggaacattagcaagccatcttctagagtgtggctgccaactcactggaggatatttcatgcaccctggagatgcatacagggattttccttttgaacaacttctggatttgtctctcccatttgccgaagttagttgcagaggagaagtcattgtcagtaaggtagatggcagtggaggccttttgagcccccatacatgtgctgaacagcttctttatgaagttggagatcctgcaaactacataactcctgatatggttgtagatttctgtaatgtacagttccatcaaatatcaaaagacaaggtcagctgtgatggagcaaaaccttctaatgcttgttgccctgagaaactcctgcaattatctcctactgaaagtggatggaaaggctggggagagatctcatatggggggcatcaatgtttaaagcgtgcccaggcagcagaataccttgtaaggtcgtggataggtgaaaggtacccaggcattaatgaaaaaattgtctcatatgtcatgggctatgatagtttgaaagctattggaggtgatgaggatagttacttggccaagcaagtattggatgtaaggcttcggatggatggtctcttcgagcttgaagagcatgctgttcagtttgtcgaagaatttattgctctatatacaaatggtccagctggtggcggtggaatcagcactggacacaggaaggaaattattctgcaaaagatgctgcgttggtttgcgcaggttgatcgggaaaacatcttttggcgatcgcatgcaaagaaggcgagcattccctgcctgcataatcaagctacatattctgaaacaggtcaggcacgtatttcacaagcgcaacgaaacccaacatgtcgtacaatggccattcaacactttgaagcaagcacggagaccccagcatcccctgctccagctttacctgggaaaagggtcgctctctaccatgtggctcacagcagggccggtgacaaggggaatgatatgaacttctctgtcattcctcactcccctgctgacatcggccggctcaggtccgtaataactccggattgggtgaagaacgctgtgtcacctctgcttggttcgtcttcgtttcctgacgagcgagatgttcagcatcgaaacaagctgcttgagcttgtcaccgtggaaatttactacgtcccgggcataagctccctgaatgttgtggtgaggaatatcctggatggtggcgtcaactgctcgaggaggatagatcggcatggaaagaccttgtcagatgtcatattgtgccaacaagttatcctaccgccatga

SEQ ID NO: 32867 - DNA, 462 bp, Zea mays
  Peptide Sequence Number=SeqID_76242
atggtgagagaacgaagaacacaaacaaacacaatgagcaagaacacaagagacacaagatttatcccgaggttcggtcacaccaccaaggtgtcctacttcctcgttgaggcgcccacaaagagccgggtctctttcaaccctaatcctccctttgccgaccacaaagtgtgggaggtgtatataaaggtgcccacaaaagcaggtggccgttggggaaagttggccaaaaaccggttgaaccggtttgtaaaccggttgaaccggtttccaccaggaagaactcggttcactgacctactcagccggagagtcaaccggactcaaaaccggttgagccgggctcaaatccggttgaaccggttttcccaaaatctgcacacgactttttctgacaggactgactggcagactggcagtgacagagcggaacagtgcagaaaccggttgaaccggttttag

SEQ ID NO: 32868 - DNA, 276 bp, Zea mays
  Peptide Sequence Number=SeqID_76243
atggcgcccccgcgtgccgcgcggtgcccggcgcaacccgcccggcacgcggtcgtggcatccacgaacatcgatggaccacgtaaatcatttagttctttttttgagtcggcaatcccatctgctagccccggggatacagtaatgagatacttgatcagagatggttggtttactggtggtgacaaggatgatggttttgactatggtaatggtaaagaaggtgtcgaggcggatctccaggagttccaggacttcgacgagttcgaggattag

SEQ ID NO: 32869 - DNA, 255 bp, Zea mays
  Peptide Sequence Number=SeqID_76244
atgtcgaagctatcgcctatagagcttcggcacagtgacatgtctcaagacgaaggggtgaaccgacttaaagatgaaatgacccaaagacccatggtattttgtgtcattattgtagtcgactgtaaagggcataaatcatttgagaacaagttcccaacagtgacgaggatgatggttttgactaaggtaatggttgcctttggtgcaatctatgatcaggagttccaggacttcgacgagttcgaggattag

SEQ ID NO: 32870 - DNA, 981 bp, Zea mays
  Peptide Sequence Number=SeqID_76245
atggggtgcaccacctcaaggcaggcccgtcacgacctccggtactgcccgtcaccgctgccgcgcagccagtcgttcccggctcggtgccccagcgacgtcggcgtccacgtggtgcggctcacgtcgtccacgctcgggtccctggagctggacaaggccctgccgcgggcgccggagcccgcgcccacgaggctggcgccgcgcacgcccaccatgacgccgcccaacgagcccgaggacatcgacgcgtgggcgctcatggccggcctcgaggaccgctccccgctgctgggcgcgccgttcgggcgccactccttctcgttcccggtcgccacggcgcctgcgcaggacctcgcggcgtccgccaaggtgacgccgctgccgatgccgatgcctcggcccgacgccgccccgacgagcggcggggaggggaaggcgctgccgccgcggagggcggtgctctacttcacgtcgctgcgcggcgtgcgcgccacgcacgaggactgctgcctggcgcgcgccatcctcaagggctacggcgtgcgcctcgacgagcgcgacgtgtccatgcaccgcgggttccgggacgagctccgcggccttctcggcctcgggctcggccaagccggcggcacgcccgccgccctccccagcctcttcgtggacggggagctcgtgggcaacgccgaggagctgaagcggctgcacgaggccggggagctcgcgccgaggctggccgggtgcgagagcgctgcgtcgacggccggcccacacggcggcgacgccggcgcgtgcgaggcctgcggggacatgcggttcgtgctctgcgatgtctgctcgggcagctgcaaggtgtacgtgggtgacgaagacgaggcggaggaggaggaggagggcgacgaatgcggcggcgggttccggcggtgcacggagtgcaacgagaacggcatcgtgaggtgccccgtgtgctgctgctga

SEQ ID NO: 32871 - DNA, 1671 bp, Zea mays
  Peptide Sequence Number=SeqID_76246
atggctcgcggcgacggcgagctggagctgtccgtgggggtccgcggcaccggcggcgcggcggcggcggcggcggaccacgtggcgccgatcagcctcggcaggctcatcctcgccggcatggtcgccggcggcgtgcagtacggctgggcgctgcagctctccctcctcacgccctacgtgcagactctggggctctcacatgccctcacttcattcatgtggctatgcggtcctattgctggcttagtggtccaaccgctggttggcctgtacagcgataggtgcacagcaagatggggaagacgcaggccatttatcctgataggatgcatgctcatctgccttgccgtcattgttgttggcttctcgtccgacatcggagctgctctaggggacacaaaggaacactgcagcctctaccacggccctcgttggcatgctgcgatcgtgtacgttctggggttttggctccttgacttctccaacaatactgtgcaaggtccagcgcgtgctatgatggctgatctgtgcggtcatcatgggcctagtgcagccaactcaatcttctgttcttggatggcgctgggaaacatcctaggctattcctctggctccacaaacaactggcacaagtggtttccgttccttatgacaaacgcgtgctgtgaagcctgcgcaaacctgaaaggcgcgtttctggtggctgtggtgttcctagtcatgtgcttgactataaccctgttcttcgccaaggaagtgccctacagaggaaaccagaacctccccacaaaggcaaacggcgaggtcgagactgaaccttccggcccactcgctgtgctcaagggcttcaagaacttgcccacggggatgccgtccgtgctcctcgtaactggactcacctggctctcttggttcccgttcatcctctacgacaccgactggatgggccgtgagatctaccacggcgaccccaagggtagcaacgctcagatctcggcgttcgacgaaggcgtcagagttggctcgttcgggctgctgctcaactcgatcgttctaggattcagctcgttcctgatcgagcccatgtgccggaaggtcgggccgagggtggtgtgggtgacgagcaacttcatggtctgcgtcgccatggcggccaccgcgctgatcagcttctggtcgctcaaggactaccacggatacgtgcaggacgccatcaccgccagcacgagcatcaaggccgtctgcctcgtcctcttcgcgttcctgggtgtccctctcgccgtaagcgcctcgcctcgcctcgcctcgccaccagatgcaatgccacgcaacgccaatgtggactgggcgtcgtgtcctgatcgacccatctctttgttgcaaatgcagatcctgtacagcgtcccgttcgcggtgacggcgcagctggcggccacgaagggcggcgggcaggggctgtgcaccggcgtgctcaacatctccatcgtcatccctcaggtgatcatcgcgctgggcgcgggcccgtgggacgcgctgttcggcaagggcaacatcccggcgttcggcgtggcgtcggggttcgccctcatcggcggcgtcgtgggcgtgttcctgctgcccaagatctccaagcgccagttccgcgccgtcagcgcgggcggccactga

SEQ ID NO: 32872 - DNA, 465 bp, Zea mays
  Peptide Sequence Number=SeqID_76247
atgtccggtaaaaggaacgctaaatttaccggctaccaaggagacgctaaagctagagaatcgttgttcatctgctatccgtccttctcgtcgctcgtcactgtggctgtgggagtagtcctacagcacacagtagtgccatggccggtcgtgggggcgaagcttgaacactgcggcggcatggaggaccatgaccacgccatcgttccggcccgcgcgagcggcgtcgcccagcacctcactacctcgcatcctgacagccatcttgcgagtctaatgtctgcttgcactagctcatgcctggacggaggagaggagaccaacgtcagggaggagaagcacacctgtgttgcggcgaggaactccatggattctgtgagacgaagcagaggccgccgtgttgcatgtggtgtttgtgctacatccctatcttgtgcccagttcgagatcgagaagcggtgctag

SEQ ID NO: 32873 - DNA, 231 bp, Zea mays
  Peptide Sequence Number=SeqID_76248
atgcccaaaatcaagcgatcacatgctgcaagggttgtgggagcaataggtggtattaatggagaaagatcaaaaatagctgaaattgaagcagcatcaacaggtaaagctgcctggcttagagctgttccggaggagatgaaaggggaacttgctcatctaaagggtgaacatactgcagtagggagaccaaggccagacttctggcgatgctttctgaaagggaaatag

SEQ ID NO: 32874 - DNA, 429 bp, Zea mays
  Peptide Sequence Number=SeqID_76249
atgggcatggctcgcacggctttggaggtggataatgctgaagtcaggcgtcttcaattggaacttgaggctctgagcctttacgtgtgcgtgaatcaggctataaggttcgtttgtgctcgtgggaggaataacgatttgcgcctccttgacatcccggatcgtgtctacaaggccatggagttcgaggctctagagaaccacagtcaatttttagggccactgctggtcgagttgccaaagtcaggcaaatactcggggcttgaggccttgcaggatcatgcaattagctcgttctacctgtttgttcgcatggggctcctcgaagcgatggatgatgttggtgacgaacctaacggtctagttggaggtgatcttcacgatgggatacacctcgatccacttggtgaacttgtcgacagcaactag

SEQ ID NO: 32875 - DNA, 468 bp, Zea mays
  Peptide Sequence Number=SeqID_76250
atggcggacaatccaggagggtactcaccggcggtggagatgacgacaggccaggccacgatgaagggcggaattgcggtggttcctccacttcggcgagaaattgccatgcgaccgcccaagttccaggggggtaaggtcaagacaccattaggacacctctacgaccctcacaagccatctattgaggacggagcgaccctggacttcagatgcacagatcaaaattccagcatggaatacaactttgtttatattatttattttattcatctattggagcaaatgtttcagatattcattaggtcagatgtgattgtggacattactccacaactaatcacactcaatcaaggatccaaatcaaacaagtatcataagaacaaacattcaagcatacaaatacctataaaaatagttttgtttttgttcctaagagtaggtctcctagtcctaaagtcactttag

SEQ ID NO: 32876 - DNA, 1128 bp, Zea mays
  Peptide Sequence Number=SeqID_76251
atggcggacaatccaggagggtactcaccggcggtggagatgacgacaggccaggccacgatgaagggcggaattgcggtggttcctccacttcggcgagaaattgccatgcgaccgcccaagttccaggggggtaaggtcaagacaccattaggacacctctacgaccctcacaagccatctattgaggacggagcgaccctggacttcagatgcacagatcaaaattccagcatggaatacaactttgtttatattatttattttattcatctattggagcaaatgtttcagcagcagcacgccgggaaggcagcggattttgaagtactattggacagcgcggcgcggggaccgggtcgttggcgcgcggtggagtgggggtgggtggtcctggcgtcctgccctgcgcgatggtcgatggatgccccatgcgcgtgtaaccgcccagccgtcgccatccgaccaggtgggcagacgtgctggccactgcgcagccggtacgcggagccggcccggcagcggattcgattggacagagggaggggaggaggaaggaccgaaaagctgacaagggcagcagcggccactgccagcgcggtggttgcggtacagcatagcatgcgggcggtgggcagtggatgcagacgtgcagggaacaagacaaagcgatgggatattgcgtcaagtgggagggaggaggaggagactgcaggggaggccgcccgtcagccgagaaaaaagagccccctcctgtcctgtattgtacaccctcccgtctgcaccggcaccgctttcgcgctcgcacgaatgcatggatggatggatggatggatccggcgtgtcatcactcatcaaaggttcagacttgacaaacaaaagcaaagcgaacgaggctgggagcctgggactgggaatagagttgctcatcaatctcttcccttcccttcaactggcactgaattccgagcatgcacatcatcagaacccgccattggactagtgtccgagaaataccatatccccagcacctatcaagacgtattcaaagatcccgatataagaaactatcgcagggccaagccactgggaccactgctctcggggcccaacgcggctacgccctag

SEQ ID NO: 32877 - DNA, 147 bp, Zea mays
  Peptide Sequence Number=SeqID_76252
atgagcacaaaaactgacggccgaagaggcatatttataggcgcgtacctcggcgccgagatagtcgctgagatccatggcgcctacctcggcgtcaagatctacggcgccgaggtaccgggatcggtgttctgcggtgatggttga

SEQ ID NO: 32878 - DNA, 189 bp, Zea mays
  Peptide Sequence Number=SeqID_76253
atgtgcgacgagaaaaagctttcttctagaggacgatttttcggcgtgcaatccgctgggactgggagtgcagtacgttttgcttctgtctggaacaacgaggccaagacactggaacttgcattgccggccggtggatgcaaagaccaagacctaggatctaggctacagatggctgccacgagctga

SEQ ID NO: 32879 - DNA, 351 bp, Zea mays
  Peptide Sequence Number=SeqID_76254
atggccactagaacgaactatgatattcggacttggcgacaacaacgagttgaagcgttggcgagcttgaaagttcaatggcagaatcggcggcagccgacgccagtgcgcatggcgaggggacttcggcggcgcggacagcaagcaggcgattcgacggcgcgggagctaaagccgctcggcagggagaggaagatggccggcgagcttgggcgggaagaagctccggccatggagcttgggaccaaaaccagggcgcacaggagatgtgtaggggcgcagggaggatggagggacaccgggaatctgagctgtggggcgcggcactggcaagggccaaggaagagctaa

SEQ ID NO: 32880 - DNA, 174 bp, Zea mays
  Peptide Sequence Number=SeqID_76255
atggggaagcctgtcccatcactcctcatgctcctcctcagccgagtgaccgcacttgtacccaccataaccagaatgggagaccacgtctcaggtcgcgtgaggggtaaagtctactgccaggttcaatcaggatttaataacattatgctaagagaagaaaaactaagttaa

SEQ ID NO: 32881 - DNA, 1356 bp, Zea mays
  Peptide Sequence Number=SeqID_76256
atggacaaggatcgccaagatgtggcgcggaagcgccaggcattcactagggtcggggaccctagtcacgaggtcaagagggcgcggggaagcatgaagttcgccacccccggcagccacaaaccaccgccggctgcgaagctgaccgtctttgggcccagtaaatcttcgtcgggtgcgagggctgtcgctgccggctcgagcaagccaccttcggctgagcctacgaaggaacgagggccaccgtctccgctgtgcaccgccgaggcggcggcgggtggggccgacctcgccatggacatctgtgtggatgactaccgcgggctgtgtcttcgacaagattgtggtgtagggtcggatgctgggcaactggttgttgtgccggctccggtggcggtcgcactggctatggaggcgggtgggacgaagggtgcttcacaggacgcatggtccaagttttgcgccagcggcaagattgtgtcggccgccgccgttaaagacgtggcgggttctgtttcccatcagctgaagcatgcatcacagcagctgaagcatgcggctgccttcgccgatcatgttgcgtcaggcgccctgacctcagagttcgctgccgagaggcaacaactcgagggcagggttgagcgcctccgggctcagcatacggaagctgtgcaggacaagtcagctgcggagaacaagagtcgcaggctgatggagaagttggcggccgcggtggccgagaaggaggacctcagccgtcagttggcggcggagaggaaagacgcaaatagagcctgcgcctctgcacaagccgaggaggagatagaggtactcccaacgattgtgacgggcctcatgtccttcgcctcactcatgacctgcgaaggggccgtaaatgccctgtcccgcgagggatgtgggcacttcgaagtcttcgaccgatcagacgaggacttcgagcgtggaatcttccaggttgaggacccggtgctgaagtggtcggccggggcgctttacgataggatgtggggccctcacagtcgtgagactgtccgggagaggtccgaccgggcgatggagcagatggtgcatgacgaggaggtcgaatttgtcggggacttggatagcacactgcccgaggcgtcgggtgcgaaggaggggactgggggggagccggtgccgccatctgatgctggcgagggccccatggtgacccccgcgctgacctgtgctggcaaggaccctgtgccggccgctgcaccgactgctggggacacttcggtggtgggggcgaaccagctgccgaagaccctgtggcgtcagccggcccttcgcaggtggcgagataggggttag

SEQ ID NO: 32882 - DNA, 486 bp, Zea mays
  Peptide Sequence Number=SeqID_76257
atgatggtagactacacaacggtactcgatagaccatgtgtgtcgagcgaaggcccgacgcagcagggtatcgagagcatcgttgaagtgacactcgcgagcggcgtcacgagtgatgggtctagcgatctatccctccggctccggctcctccaaaagctccgtgtcgtggctcgaactgccatcggcgtcgtctccgtcagggtctcctccagcagccgggatgccctatggtggtgcagggggcatctctgggctgaggtgcaggggaaggcgacctctcaaactccacctcctgctgaggtgagggggaagagtcctactgctcctgctcctgctcctagcgtcggtgctcctgctcctcgtgtagtcgacgacgcagtctctccaggtggatggactgacctagcaccgtgcgacacaggggacgctccgccaggcgagaaggcaaaaaggggatcacagacatacatacagtgcacctga

SEQ ID NO: 32883 - DNA, 414 bp, Zea mays
  Peptide Sequence Number=SeqID_76258
atgatctccggggtgcggaagccttctcagagcactattctattactgagagggatactgctgaggcagccatgcaagatgcagcacaccgagcactttcccagttttgctcgtcgttcgatcggtagtgctggaggtgtgattgtctcgccagttggtgagggcaatcccaggctgaacaacatggtcaacttggccgccgtgctcaacacagagttggaccacgccctcgacgagtggggcaaggttcgagcggaggttgcggaattgtgtgctgagtgcgcagcacgccactatctggatggtggttctcccgcccctgtcgggattcagcacccttaccgttcaccgccccatggtcgcttcgactatggtaccccagactgcaggacccggatagatttagatccctag

SEQ ID NO: 32884 - DNA, 246 bp, Zea mays
  Peptide Sequence Number=SeqID_76259
atgaaacgagctagccacgacgtggactcttttgctgtggtggaaactcgatttgggggaaatgagcaatttgtggactctggtgaacaattggaggcaagtgctggtgctttggatgggtcccttgagtggtggccagtgaatttgagctcgcgcggtggcggtcggaaagaaggaggtgtactggcgcacgcgattggtggcaactaccgtggcaagctcaccggcgatcaccggatgggctaa

SEQ ID NO: 32885 - DNA, 519 bp, Zea mays
  Peptide Sequence Number=SeqID_76260
atgaggaacttcatgaattgtattcgcaactgcaccccgaagtacctgctgaccctgtcagaatgggagctggaccttctggaacaacagatgtcgtctcaaactcgtgcacatgacggcgcgggaacatcccgtggtcaagaggatacacccaatccaccaccagtaccgcccacgctggccgaggctatcgccgccttggtcaccgcgaccgctgacaacacccgcttcctacgtgaaatggtgggacatcaagttcagcaacaaggcaggagggcttatccgcgaggaccccgcgaaacttcgtacttggatttctcggaaactcatcccccacttttcgtcaaagctgaggatcctctcgaagttgacaaatgggttcgggtcattgagcagagcagggctatcagcccagcgctggtagttgaagctaagtatgcaggcccaggcaaatcaaagggaattggaggtgacaggtccaaccaggggcctgaaaagcgacaaagcttggtaatctga

SEQ ID NO: 32886 - DNA, 258 bp, Zea mays
  Peptide Sequence Number=SeqID_76261
atggcgaccaaattgggggaaaagctaaattcaggcgctatggtggctaatcggaggcgagggttgttgttctggtttcgtaataagcaagaggagcagaccgcacactcaatttatatcgttcatgagcggtggctccgaattcgggaaagggggtgtgagacagcaagagtgagctcacatacgttcatagctcaacaagttgtggggaataatgtgcataaactcgccaaaggtgggagctcacgtgaagtgtaa

SEQ ID NO: 32887 - DNA, 456 bp, Zea mays
  Peptide Sequence Number=SeqID_76262
atgcaggtagcgtgcaaccgcaccgcgagggcgcaccccctcggcttcgtcgcatccagcatggaggcccaggcccacacgtcatgtaactggcgcgccggttactacgtgcaagaaactgcaccgccacttgcgccaatgctgcgccttctcgactgcagaaccagtgccgtgactcgaggcaaccctgcgcatggcccaacagtgccaatcgagcacatcgaccacggggaccgggaaaggggatatttcgaaagggatccttctccgcgaaggaagcgggccccgaaccctcctactaatcaagggttcgaaggctggcccttcggaagggttcgacggccgccccagagcacacgggcttcaagctcattactgatcaggggttcgatggctggcccctcgaaagggttcgacagccgccccagagcactcgggctccgcgcccactactga

SEQ ID NO: 32888 - DNA, 459 bp, Zea mays
  Peptide Sequence Number=SeqID_76263
atggggagcacccgtgttgccttcgtcttgctgttggaggagcgcaaccttgcagagcccggctgcattccctcaccaatggtcacccaggatggtgaccaccggttcgatggtggggagaagcaagccgggctacgacctctaccccgccatcagcttcaaggatcttcatcatccttgctgtggcgggggcgagctgagccggagttctacctcccgcatgggctggcgggccacctcttccttcaatattcaggggagagggcgctcaccggcctagcagagggggcggacttcgataacgcggggccgggcgactgttgcgccgtgcgcaccgggggaccgtccaagacgtcgcacgccgctagggcgacgttcgtgttcttggattgtcttgtgctcactccgacacgacgcctccgcatggaggtcgatgcctgcccgtccacgaggacttga

SEQ ID NO: 32889 - DNA, 4104 bp, Zea mays
  Peptide Sequence Number=SeqID_76264
atgacacgcgtgatcatcctcctcgatagcgacaaagaagacgacggcaccggccgccaagccgggcgcgagcttggtggcgccgcgatcgcctccgcgggcgaggcctcgaagctcgtcaaaccagaggtcgtcgacgatgtgggctccaacccggtgcgtcctggggcgctgcctacctcgctacgggtacaaggccatcgcgcgccgtcctcgccgtcgccggtccccgcggcggttcggaagcagcccgagattatcgccatctccgacgaagacaatgacggttcccgattccggcgcgtgaggcgcgtcaaggacgaggcttccgattgggttctttcagcgaaggcgaagcgcgccatggtgtcgggtgtgccccccggaagctccgacgtgaagaggaagcggaagagaggatcgtccggcgctggcgactttcacgcgttggaccggaatttgagcgcttcaggggctggtcgtcgcacgtcgtggatggccgaagacgccgggagctccaggaatgtgagtagtagcgagttaagcagaggaggcgtgggtgaccggtcgggttcgaccaagaaggccaggggtgcaccgggaaagacgaggcgtggagggggtacgagaagagagaggagcactagtgcggcaccggccaacttggttggagggagtgcaacggttgggtcgcggatccggttaaggtcgcgtcagcaggggagagtgcagtgtgctacatactctgctcgagtgtcgtccgaggacacgggggaggacgaaaagcatatgcaggagcagacaagagtggaagatgtggagttcatggaggtggatgatgattatgacgacgtcaacgtggctggcaatgtcatagatcaagagagtgagcaggacgaggctctggaaggaaggagcagtcaggatagccatggctatagcgaggacaaggagggcaaagactctgctgctttgagtgataatgaggaggatgtggggggaaaggaattgttggaagaggaggaggaaggtgccgatcaagaagaaagtcatatcatctacgatggtgaaggagaacaagaagaggacgcatctgaggaggaaacacaggaattggatgaaacaggggaggcgcagccattcaatcctagcaacaccatggcaggtagcactatgaggtcaggaggcgatggcaagcaagtctttaggaggagggtttttgagggcatatatttgcctgagaatccacacaggactgttggcaagggcatccaagggcggacgcgatcacagcgaaaatgcaaggacaagaaactgctgaaacgcggaactttcagtaaaccttacaacattgatattccagactcgacttctgattccgaagaggaaatcgaaccaccagcgccacagcaagggctactgtcgtcaagtgaggaagacaacatgacttttggcaaaaggaagcgcagaagagcagcgataaacaagagatgggacaagaggctgagtgccagtagtgacgaggaggattacggagcatctgccatggatgccaaagagaggcctttccggaggctgaagaaggggctatccaatcttcaggctgccaaggaaggttgcagaaattacgaaggctcaaatcctgggcatgccaggtacagtggtccaaatggcgggaatctagagaacatgtccagtgcacaggatgatatctccttcaaaagaaatgtacatatgattcgaataaagaagcgcggtcgagcagcgaaagccgtctatgatgagctccttgattccttgttttctggctgggaaaatcatataggtaatcctgttcacgcagaggctggaaacagtttgcctctcgtgttctcattcggagatgaggatgcagaagagaacacagaaaatgacaagtatcaagaacaagaagacctgtggatggaatgcggcattgcttttcaatccatgaacattggttccaacggctgtgaagaggatgggaaagaaattcctccagtgaaagtgacttcttgcaatattgggcagcatgaattcattattgacgaacaaataggagttcggtgcaagcactgtcatgttgtcgatctcgaaatcagagatgtactgcctactttggggaaatgttctgcagaaaggggatcagcaatcaaccctgagtttgacaggatgcttaaggaaatgctcaatgtttttgaacagaatgatgtgctggtatcaaatggacatgaactaccatgcaactttggtgatcacaaagctggttcagtctggaatctcattcctggagtcaaggaaactatgttcccacaccagcaggatgcatttgagttcatgtggacgaagctagcaggaggtactacaattgaacagctaaagcacaccataaaatctgatgctggaggtggttgtgtgatttctcatgcacctgggacgggaaagacgcgactggcaatcacatttgttcaatcctaccttgaggttttcccgcactgtagcccggttatcattgctcccagggggatgctagcgacatgggagaaggagttcaggaaatggaaggtaaagctccctttccatgtactgaattccactgagatcaactggagtgaggacaagaccctccaagaacaggctgcgaagaatggaacttttcaccgtaggctactgacagataaaatggatcaaaattataggcgactggtgaagctagggtcctggatgaacggtaccagcataatcggtctgagctactcgctttttaggaagctagctaatcacgaaggcatggacggggataaggtgaggaagctgctgctggagaaacccaacttgcttgtccttgacgaagggcacacgccgaggaacaagaagagtctcatctggaaggttcttaaaagggtccacaccgaaaagcggataattctatcggggactctattccagaacaattttgaggaactctacaacaccttgcgccttgtcaggccaaaggatgcagatgcattgcatctagagacggacgagagcaaagatttctggtcttcgttgagactgaatgacatcacaaaggcaaacattaatgaagtgaggaaaaaactggaccctattgtgcacatccatagtggcagatttcttcagaagtctctcccaggactgagagaatccgttgtgattctgaaccctcttctctaccagaaagaagtcatcgcaagtatggagaagactgtggcaatgggtcttgatgcagaatacaaaatctcgcttgcatcaatacatccttccctgcttgccagcgcaaaactgtctatgaaagaggaatctatcttggacaagcctaagctagagagtctacgctccaatccatctggaggggttaagacgaggtttgttttggagattgttcgcctgtgtgaagcgcttaatgaacgggtgctagtgttcagccaataccttgaaccattgtccttgatcatggagcagctgaaagaaaggttcagttgggcagaaggcgaagagatcctgctaatgagcggaaaagttctagttaaaaaacgccaaaccatgatggaggtcttcaataacatgaaaagcaaggccaaggtgatgcttgcatcaacgaaggcatgctgcgaaggcattacgcttgttggggcgtcacgtgtagttctacttgatgtcgtgtggaacccctccgttggaaggcaagcgattggccgggcttacagaattggtcagagaaagattgtgtacacgtacaatctgattgcagaaggaacgacagagaagagaaagtatgacagacaagccaagaaggaacacatgtctaaattgctcttttcaaatgaactggagcgtggaggatgcaacttgcctccagaactgacgttcaatgatagggttttggaagaattgactgcacgtgaagacctaaaaaatttgtttgtaaagatttatgttgacaatcaaactgatggatcacgtgtgtcctttattgactgctttagcttgccagttgccactgacatcacccagtgtccacaccaacggtatatgtgggtggccgtggattctgccaaatga

SEQ ID NO: 32890 - DNA, 171 bp, Zea mays
  Peptide Sequence Number=SeqID_76265
atgacaagtgagactgcaacagagaagaagactggaacaaaagaagagggctcacatggtcataacatgagaagcagcagcgctaagtacctgccagcatcaatattgagatatgtgagcctcatcaaggttcaggcctacacttatgtcagtcgtctctcagcgatatag

SEQ ID NO: 32891 - DNA, 444 bp, Zea mays
  Peptide Sequence Number=SeqID_76266
atgtctggacagtcgagtcacctggagagactgcaccggctcctgcgcgaggagaaggagcaccgacgccaggagagggagcaacatgactcttccccctcgccgcagcaggaggtggagtctaggaggcatccctcctctatgccccaactagaggtgccccctgcaccaccacagggcaccccagctgctggaggagaccccgacggagacgacgacggtggcagttcgagccacagcacggagccttcggatgagcaagagccagaaggatgggtcgcccgacccatcacgcgtgacgcctctcgcggttgccattttcacgacgctctcgacaccttgctgcgtcaggcctttgaccgacacacttggtcaatagagtaccgttgtgtagtctaccagcacagtcgtgggttatacccggaccagtgggattctacctga

SEQ ID NO: 32892 - DNA, 429 bp, Zea mays
  Peptide Sequence Number=SeqID_76267
atggttggcggcactcaccgttgggtggaccgagtcgctgaccggctgggcctccttgtcagcgttctcttcccgaacgcaacggagtcgcgcgagattgccgccgcgcggcgcggagcgtggcgaagacccttccctcctcccaggtcggaacttcggaagttaaataggagctcccgtgacccgttctcccctcatctgccgtcatcgcacgagcgccttccccagaaacccccgccgccattgttcagaccgcggaagaaccgtgtggagatctctgggacacagggagcaaccagacagcggggaattcctcgccggaagcacttctccgccgcgggccgcactgctccagaggtggattatgtcaagacgccattgaagaagagcccgttgctgaggatcctggtgagcagcaggttgaagtag

SEQ ID NO: 32893 - DNA, 207 bp, Zea mays
  Peptide Sequence Number=SeqID_76268
atggccatgatgggttcaacatcggaaaagacatacctctaccagatccccagctgggtattaatcgattcggatcgccattacttctcggacatgaagacttggtcactgccctacatcgtcgccaaaggtacgtccttcatgaccttcgtccgaagatcattatatcctaagagaaataatgcttcgaaggacgaagggcattaa

SEQ ID NO: 32894 - DNA, 1836 bp, Zea mays
  Peptide Sequence Number=SeqID_76269
atggcgcctcctgttgacgtggcggtctgtgccccaagcagggcgacgtggggggcggagtccgagccctggggtcgggcgaggcggagtttcgtcgtcttccgggttttagcccgagtccgagccctggggtcgggcggagcggagttcgccgtcttccgggtcttagcccgagtccgagccctggggtcgggcggagcggagttcgccgtcttccgggtcttagcccgagtccgagccctggggtcgggcggagcggagttcgccgtcttccgggtcttagcccgagtccgagccctggggtcgggcggagcggagttcgccgtcttccgggtcttagcccgagtccgagccctggggtcgggcggagcggagttcgccgtggcgcctttggcaaggcctgattgcctgtcagacttcactctgtcgagtgacactgcagtcggagtggcgcaggcggcgctgcccttatgtcagactggccagtggagtggtggagtgacggcggtcacttcggctctgccgggggcgcgtgtcaggatagaggtgtcaggccacctttgcgttaaatgcccctgcaatttggtcagtcggtgtggtgatttagtcaaggttgcttctgagcgaagccaaggcctcgggcgagccggtgatgtgtccgccataaaaaggggggcctcgggcgagacagaactttatgctgatgggggttaccagctgagaattaggcgtcttgaggcccccgagcctctgcacagggcgagaggacgatcagggacagacccgactttttacatacgcccctacgtcgcctttccgcaaggaggagggggggagtgcgccatgttaccctcgatgggcaccgaacatggtgtctccggtgagctgcaagcggttattacggtgaaggtgaagcgtctcgcgctcctcctgccagaggcgccgccaactggcgcgccggttgctcgacgcgtgggcctgggttccaagctggcgtgtcagaagtcggagaagcgcgtccatctggcgcggttgcatgccgcctgcatggctgcccgccccttctgcccgttggtctgggcgaaaatggggggtcgcctcgtcgggtcttcccatcttccaagcccccggatggggggtatccgccgcctttccgcctcctcgttggaggaacgcaactccatgggagttggtacctttcagccatcgttcggcttcaaggattttcatcacgcagcctggccacaccccgccaccggcggtcacccaagatggccaagatggaagatgaggcgagtcggggggccgcctccgcgtgggtcggctgcccctttcttccccctgcgcccgggggtgaagggcgtccttgagccccacggagacttcctccagccatgccaggatatgcagggtgctagggggcctgggtccccgtctccctgcctgaatggctggttctcgtcctcagcggggggaagcccttctgccgcgatacctcccccaaagctgctacctaagccgcttagctgtctggggcaggggtggtggccgtcgcggttggaacgggcggcagcgagccgcccatcgttcttcagttactccgcaggccttccccttcggaggggggttgctcgtacctgcggaggagggaaccggagttccgttggtagtggcatctcgtatgccagtgttcttcgttcattgcggctgtcgaggcctgaacgtgaatccctcggcccgttcggccttgttgtctggggctcctctagcttagttaaagagaccccccggctgcccttcggtggaccgaggccaggggtagcgatatcagtatga

SEQ ID NO: 32895 - DNA, 255 bp, Zea mays
  Peptide Sequence Number=SeqID_76270
atggcccatgaaattataaagaaaagtgaaaaagatacccatgatgcccgagcagaagcaaggcgagttgaagaagctgcagagcgtgaaaaacgtatagctgaattatctccgccgccggaaccattcgatcccctagcggatctagaaatgaaggaagcgctggacattataaacatggcagaatctgttgttgatgaagttgttgacaaattactgcacgaagttgcagagaaagtccttaaagaggaatag

SEQ ID NO: 32896 - DNA, 336 bp, Zea mays
  Peptide Sequence Number=SeqID_76271
atgaggaccaggctcaagatgatgaagatgaagatcaagaggatgagccacctcaagaggaggacattgatcaagggggagatgaagataataaagacaaggaagatgatcaagaaattagggatcaaagaccgccacatccaagagtccaccaagcaattcaaagagattaccccgtcaactccattcttggtgacattcacaagggggatagaggatgcactaagagatccggattgggtggtggctatgcaagaggagctcaacaacttcacaaggaatgagcttcagccgaaaactgcttcttcctacaagaccttcggcgacgaagcataa

SEQ ID NO: 32897 - DNA, 438 bp, Zea mays
  Peptide Sequence Number=SeqID_76272
atggcccgaacgtactggcgctccatcgagtgcgtcgggctcggtgggtcggatgactcggaggaggtggaagactccttcgacttcgaggagtggagcgacagcgagggtgatggcggcaacgacgacggtagcagcggcgatgacgacggcaagggcggcggtgacgacgacggcaaagatggcgacgacgagggcgatggtgacaatgacggtaggggcaacggcaaaggcgacagcaagggcgacggtggtgacggcaagggcgatggcgacggcaagggcgatgacagcgacaagggtgacgagtcaagggcgactgcgacgactacgagccaacttccattcgtcggcaaccgcatgtctattgtttccgaggctgaccttctgcacctcatcgaaactggtgttcttccgccaaaagagttgtattcctag

SEQ ID NO: 32898 - DNA, 321 bp, Zea mays
  Peptide Sequence Number=SeqID_76273
atgaggaaaaaacacggctccgtgccaaaattacatacatgttcaggcctcgacagccacaatgaacaaaaacactggcattcgaagtgccactacaagcggaactctggttccgtccccgcggggctggagggcgattgccaccaccagaagctggaagaagaggtggcccgccaacccgcgcaggaggtagagccccgtctcgcctcgctccccgccctagcaaggatgacgaacaccctcgacgctgagggcgggatcgagatcacagcccggcttgcctctccccatccaggagctggaggtcaccgtcttgggtga

SEQ ID NO: 32899 - DNA, 1689 bp, Zea mays
  Peptide Sequence Number=SeqID_76274
atggcggtgttgaccaagggacttgatcattttcgctctggaattctgcagcagaagccatttatgcaatctccacagcaatttcagcagctccagtttctgaccccacagcagcagcagcagcttttgctgcacgctcagcaaaatctgtcgtcctcgatgtcaagcgatgttgataccaggagattaaggatgcttcttaacaacaggaatgtggtccttggacaggatgggcagacaaatagcggcggtgatgttatcccaaatattggttcgccagggcaaagtggtggatcgcgtaatgatatagatatactaataaagcagcagcagcagcagcaaagtcatagccagcagcagcagcttcagcaacctgcgctctctggacagcaatctcaaagttcaaaccagcttctccatcagcatggaaaaccaggagttgggagcttgcctattgatggaaacttgccaaactcttttggatttcctgaacaaggatcaaagaagagaaagaaacctgtctcatcctctggtagagctaatagttcaggaacagcgaacactgctgggccatctcctagctctgcaccctcaacaccatctactcacacgccaggagatgcaatgtccattccacagctgcagtataatggtggcccttcaaaaccattgatgatgtttggctctgatggcactggaagcttgacttctccagcaaacccgctgcaagataacaaaaactctcaccttcagggtgatgttgaacgtctgttggaagatggttccttggatgaaaatgtagaatcttttttatcgcaagatgacatggatcctcgagaaacaatgggacgctgcatggattctagtaaagggttgggttttactgaggttgcaaaagcccgtgcgagtacaaacaaagttgtttgttgccatttctcattggatgggaaacttcttgccaccggagggcatgataaaaaggtcgttttatggtttacagatgtgctaaaacgtaaatccgcattagaagagcactcttccctaattacagatgtccgattcagccctggcatgacccgccttgccacatcttcctttgacaaaaccgtgcgggtttgggacgctgacaatccagattattcgctacgcacttttacaggtcattcagcatctgtcatgtcacttgattttcatccgaacaaagaagacatcgtttgttcgtgtgatagtgatggtgaagtgcggtgttggagcataaataatggtagttgtgtgacctgcgttagggttttcaatggaggagctactcggttaagatttcaacctcgccagggtaaatatctggcagctgcctcagaaaagggaatatccatactggatgcggagacattacaagtttgtagaactcctttgcaggtatgcaacttagcggctattctaagttataacttcactggccacgtacagattattcagtcagtatgttgggatgccgcgggcaactatctggcgtctgtcagtgaagattctgtcaggtccctagagctttgggacataagggagaagaacacggtgacaatcagcaacgctcatgacggcatggttgctgccctagccgcgtcaagtgcatcggggctggttgcatcatgtcgtggcaaaagcgaaagggcagctgatctgatctcctag

SEQ ID NO: 32900 - DNA, 327 bp, Zea mays
  Peptide Sequence Number=SeqID_76275
atgcccatggatccggcaccaacctccttgcagccacctcataggaaagaggatgttgtgccgtgcccacaagccctctgctccaccgctactgagccatgccctgcaccaaactacctctggtgcgccctcagctatgccgccaccatcagcagcatgccctctgctgcgccatcactgagtccacccaccaccgcgcacgcctccgctgcaccgccgccggtcccacatgtcacccctgcggacatgtggcttggatctccagaaactgggggtgtgaagagagagcacaagggcaagagcagtagagcacttgggaagggatga

SEQ ID NO: 32901 - DNA, 588 bp, Zea mays
  Peptide Sequence Number=SeqID_76276
atggcggtccgggatgagcgagcggcgacggcgcgacctcggaggcgcgagcgacggtgcccccttcgcacgacagcggtggttccccgacgagggggcggtgacgatgaccccggaggcgcgagcgccggccgtggcccagggagccgcgagcggccagaggctcgtgcggcggtgtcgaccaaaggtgtgcgcgatggtggaggttcctcgagtgcgcacggcagcgacgaccccatccagaggtcgcgcgaggcgggactgtctccagcggcggcggccacacgaggcacgcgtggctccggcagtgtcggtggtcgcgcaaggcgcgtgctgcaagggtctgtggtccgcacgacggttcaggcgtccttcgatcaccaattcctccgatctagtggatctgccaagagggagatggaaatggccacaagccacgggaaggcttcatcaagggagtccggtgacaaacgaagggaggaatcacctccccacgttaagtcgcaccggagtggcgacaagaagaagaagatgaataaggtggtctactacgagaccgattcttcgtcgccattgatagtcgcctag

SEQ ID NO: 32902 - DNA, 207 bp, Zea mays
  Peptide Sequence Number=SeqID_76277
atgaaggcgcagagcgagatcagtggcgcaggtccatggagcgagctggagccggccctagcttcctatcgtttggcgcggcccacggagaggcaaggcgcggcggccttgtgccttgtgcggaggcctaatggcacactgtggcgccgccttgaacacgaccacgatgtacttccgttcttggcgaacccagagggagcgttctga

SEQ ID NO: 32903 - DNA, 216 bp, Zea mays
  Peptide Sequence Number=SeqID_76278
atgtcgtcgagggggaagaagaggctagtggtcgaggtggatctcgatttagatcctgcagctgaggtcaccgccgccttcgatcgactctgtgtttccgtagtgaacaagccgccaccagctgccgccgttgtatgccaggcaacttttaattctattctttctctgtcgaccaacagatcgtttcccaagtggtgcccctacttcgtcggctag

SEQ ID NO: 32904 - DNA, 489 bp, Zea mays
  Peptide Sequence Number=SeqID_76279
atggatgcaagccaggatttgtgggactgggactgggaggtggtcctgccagatcacaggagcttctccctgagcaatggcgttaagaatcttgatgataaagaaacagaaactgaggagcaggatctgctgcccccgtcaggagacgttgacgtgcacaacgagtgcaagggcatcggcgtcgtgctggatgagacctgcaaatccgccgtgcctagtgttgccgatccgataatggcttctgagggtggcgtggaagagaaggcgatccagagccctgatgccgaggagtccgtcaccgccgacagcaagtttgctcaagaggaggaggaggaagaagatatcaagaaggacgtcgacgataagaggatccagcaagttgtccgccaggcgtcaaggctgaaccagaaggccatgtcgtttgcgatgggggcaggagcgtcacggcattttggaaggccacgtgtaaaacgtagcaaaaaacattag

SEQ ID NO: 32905 - DNA, 225 bp, Zea mays
  Peptide Sequence Number=SeqID_76280
atggtggacaaagtgcaaatcaaggataaagagactaatgtattgtgtctaagtgctggaaacaggaaaaatccaattggaaatgtcttggctcgagcagccaagaatctgctcagtctgggagcaccggactgtccggtggtgcaccggacagtgtccggtgcgccaggatggctcgagcaaaatggctgctctcgggacttcgacggcggtgtacgactataa

SEQ ID NO: 32906 - DNA, 1143 bp, Zea mays
  Peptide Sequence Number=SeqID_76281
atggatgcaagccaggatgtgtgggactgggactgggagctggtcctgccagaccacaggagcttctccctgagcaatggcggcaagaatcttgatgataaagaaacagtcgagcatgatctgctgcccccatcaggagacgttgacgtgcacgacgagtgcaagggcatcggcgtgctggatgagacctgcaaatccgccgtgcctagtgttgccgatccgataatgaattctgagggtggcgaggaagagaaggcaatccagagacctgatgccgaggagtccgtcaccgccgacagcaagtttgctcaagaggaggaggaggaagaagaagatatcaagaaggacggcgacgataaggttggagccctgatcggcgcgctgtgctcgtttggggtcgcagccgccaccgcctgcgtctttctcatcggcggcaggctgcatcatcaccacacgcagcagcacaaaattcagctgcagttcttcggcgatgataagggtgtgaagtccgcatttgacggtgtcgtacgggttggaggtggcacgtatagcatcaaccatcaagtagagcgtgctggcttgtggtggactcatggctcggccccctcagctaacgttgttaccaagggtgaggatgttggggaagtccctgtcgacgacgacggcggcgatgacccatggcacgacgttgatgactgtgtcatcataggggctgaaattgccgctggagtatacgacggagacaccatgcatggcggcgtggagggagccaagcgtgacgggctcatggaagaaggacttggtatcgtaagcgagagacgcgtccaagccgaaggagacgaagatgacatcagtaccgtcatggatgtaggactcgaagccagggaggacgccgacggcggcaacgcactccgccgaccagcagaccttctaggccgcgacacgtgtccgtggcgtgccgcttttggcggtgacagtggcgtatccgaagaggctggcacggggtacagagctgtcgacagtgatggagagcgtgtgggtgccgcggccctcggtgtcgtacgtccagttagcgccatggtcgatttgctgagtagcatttctttgttgaagaaccaggtgccgatgatcttgcggttgtag

SEQ ID NO: 32907 - DNA, 2019 bp, Zea mays
  Peptide Sequence Number=SeqID_76282
atggatgcgagccaggatgtgtgggactgggactgggaggtggtcatgccagatcacaggagcttctccacgagccatggcagcaagaatcttgatgataaagaaacagaggagcattatctgctgccaccgtcaggagacgttgacgtgcacgacgactgcaagggcatcggcgtcgtgctggatgagacctgcaaatccgccgtgcctagtgttgccgatccgattatggcttctgagggtggcaaggaagagaaggcgatccagagccctgatgccgaggagtccgtcaccaccgacagcaactttgctcaagaagaggaggaggaggaagaagatatcaagaaggacggcaacgataaggttggagccctgatcggcgcgctgtgctcgtttggggtcgcagccgccaccgcctgcgtctttctcatcggcggcaggctgcatcatcaccacatgcagcagcacaaaattcagctgcagttcttcggcgatgataagagcatccagcaagttgtgcgccagacgtcaaggctgaaccagaaggccatgtcgtttgcgatgggggcaggagcgtcacgacattttggaagggcacgtggctctgccctctcagctaacgttgttgccaagggtgaggatgttggggaagtccctgtcgacggtgacagcagcgacggtgatgacccatggcacggcgttgatgactgtgtcatcatagaggctggaattgccgctagagtatacgacggagacaccatagatggcggcgtggagggagccaagcatgacgagctcatggaagaaggacttggtatcagcgagagacgcgtcctggccgaaggagacgaagatgacctcagtaccgtcatggatggcggactcgaagcccacgaagacgccggcatcggcaactcactccaccgactagcagaccttctaggccgcgacacgcgtccgtggtgtgccgcttttggctgtgacagtggcgtatccgaagaggctggcacggggcacgtagctgtcgacagtgatggagagcgtgtgggtgtcgtggccctcggtgtcacatgtccagttagcgccatgtttgctcaagaggaggaggaggagggggaggaagaagatatcaaaaaggacggcgacgataaggttggagccctgatcggcgcgctgtgctcgtttggggtcgcagccgccaccgcctgcgtctttctcatcggcggcaggctgcatcatcaccacacgcagcagcacaaaattcagctgcagttcttcggcgatgataagaggatccagcaagttgtccgccagacgtcaaggctgaaccagaaggccatggtcgagggtgtcaagtccacatttgaatgtgtcgtacgggttagaggtggcatcaaccatcaagtagagcgcgctggctcgtggtggactcaaggctcggccccctcagctcacgctgttgccaagggtgaggatgttggggaagtccctgttgatggtggcggcgacgacggtgatgacccatggcgcggcgttgatgactgtgtcatcataggggctggaattgtcgctggagtatacggcggagacattatggatggcggcgtggagggagccaagcgtgacgggctcatggaagaaggactttgtatcgtcagcgagagacgtgtcctggccgaaggagacgaagatgacatcagtaccgtcatagatggtagactcgaagcccacgaggacgccggcggcggcaatgcactccgccgaccagcagaccttctaggccgcgacacgcgtccttggcgtgccacttttggcggtgacagtggcgtatccgaagaggctggcacggggcacggagctgtcgactgtgatggacagcgtgtgggtgtcgtggccctcggtgtcgcacgcccagttagcgccatggtcgttttgctgagtagcatttctttgttgaagaaccaggcgccgatgatcttggggttgcaggcaaaaccgtgcttcacagagtcatggtag

SEQ ID NO: 32908 - DNA, 666 bp, Zea mays
  Peptide Sequence Number=SeqID_76283
atggttgccctccaagggggtcgccccctttttaaaggcgactctccccccacttgcgccctcaaccgttgcgggttgagtcttctccgacacgctccaagatcctcccctccacggcgtgggggctgggtcccacatgtcatgcaagccggtccatgggagaagaagccaaaccgccacgtgcgcgcggtgcatgcaaccgcacagcggttacaagcagttctccactttcgcccagaccagtgggcgaaagggcggacagccaagcaggcggcatgcaaccgtgccaagtgggcgcgccccttcgacttcaacgagcccagcatggaggtccaggcccacgcgtcatgcaaccggcgcgccggttgctacgttgccagccaagcgcgatggtcaaatgcggtcgaaattgggccggcagtaatggcggtgacaggcgggcagaagcagcggtcgcgtcgtcaaccaagctggcgtcccatccaggggcagcgggggagccctctctcacggcgtgaagacagcgcgcccgtgatccgttcctcgaacggctcgcgcacgcgcaacggccaccccgcgaaccgctcgccccgtcgcattaactccgcggcgggacaggcggcgcctcaggcgggagaagcaagcgacgctttgccttcgccataa

SEQ ID NO: 32909 - DNA, 939 bp, Zea mays
  Peptide Sequence Number=SeqID_76284
atggatgcaagccaggatgtgtcggactgggactgggagctggtcctgccagaccacaggagcttctccctgagcaatggcggcaagaatcttgatgataaagaaacagtcgagcatgatctgctgcccccatcaggagacgttgacgtgcacgacgagtgcaagggcatcggcgtcgtgctggatgagacctgcaaatccgccgtgcctagtgttgccgatccgataatgaatcctgagggtggcgaggaagagaaggcgatccagagccctgatgccgaggagtccgtcaccgcggacagcaagtttgctcaagaggaggaggaagaagaagatatcaagaaggacggcgacgataaggttggagctctgatcggcgcgctgtgctcgtttggggtcgcagccgccaccgcctgcgtctttctcatcggcggcaggctgcatcatcagcacacgcagcagcacaaaattcagctgcagttcttcggcgatgataagaggatccagcaagttgtgcgccagacgtcaaggctgaaccagaaggccatgtcgaagcatcgaccatcgagtagagtgcgctggtgtgtggtggacataaggctcgtcccccctcaggcgcatgatgttgccgagggtgaggatgttgggaaagtccctgtcgacggtagtggcagcgacagtgatgacccatggcacgtcgttgatgacggtgtcgtcataggggctggagttgccggtggagcatacgatgaggacactgtggatggcggtgtggagggagccgaacgtgacaggctcatgatagaaggacttggtgtcgtcggagagaggcgcgtcctagctgaacgagacgaagatgacgtcagcatcgtcatggatggtagactcgaagtccatgaggatggcgctttggcggcgacacactccgccgaccaatag

SEQ ID NO: 32910 - DNA, 177 bp, Zea mays
  Peptide Sequence Number=SeqID_76285
atggagtcttggtgcttagagatgatcaaagaatgcttgggttactcctccatgcgcctaggggtcccttctatagccccaaggcagctaggagccattggaggcaatctgggaaggacagtccggtgcaccaccggacatgcactgttcatggtccggtgcagatcgccttcctaa

SEQ ID NO: 32911 - DNA, 372 bp, Zea mays
  Peptide Sequence Number=SeqID_76286
atggctcgagcaaaatggctgctctcgggacttcgacggcggtgtacggctataattcaccggactgtccggtggtgcaccggactgtccggtgggccgttcacaggcgaactcgtcgctctcgggaattcatcggcgacgtacggctataattcaccggactgtccggtgagccaacggtcggccgggccaacggtcggccgcgcaatctacgcgggacacgtggccgagccaacggctagaagaaggcaccggactgtccggtgtgcaccggacatgtccggtgcgccaacggctctcagcctgccaacggtcaactgcgccatttatggaaaggaatcgggcaccggacagtgtccgattcctctctag

SEQ ID NO: 32912 - DNA, 492 bp, Zea mays
  Peptide Sequence Number=SeqID_76287
atggggagagatggtgactgggccgagccgagacagaggcgcctgccccttgcgatcgcgcgacccgccaggtggtcggccaccggaacaccgacccacccgtccagccgttcgccccgggcgatgggtggaacaccgaccatgcgattccccgccccgtcggtgctcgcgatgtgtgttcttatctatgttgggaccaacggtgagacattcttcaacacaaccgcacttgttacatgcatacagaacttccccaagagcagaggtcagacagtgactcgaaatatgaccactgcataccagaatgatcagatgctcgacaaagtcatggtggtgatgggagctcctcaaggccaacaaaatggtttcaaggaggcagccaactcggtggagttcctaggtagggagatgctgggaatgcaactgagggctgccaagcctgataccgatgatttatatgttctgatatttcttttcctgtggcaagagtaa

SEQ ID NO: 32913 - DNA, 1098 bp, Zea mays
  Peptide Sequence Number=SeqID_76288
atgtggccaggagtaggcaagctgccgaactggcacgtgtacccccagtggaagcccactaagctgtccactcttgtccctggtcttgactccgatggctatgatttacttgagaaaatgcttgcgtatgagccagggaagcgggtctcggcgaagaaggccctggagcacccgtacttcaatgatgttaacaaggagcaccgggatccaccgtacccccgctctggcgccgcggttccccgccatggactccctagatctgccctgccacctgcccccgatgcacaactccaccgcgccctgtccccgtctccggcgccggttgcgggggcccaggctggcagcagtgaggtccgggagcgagacccccacgacgtccccgtccccgtctgcgtccccatccccatccgcgcccgggacgcccatggccgcggtcgcatctccggccggttgcggggcctaggccgtcggcagggtttacggagaaatcaccgcttcacctcgccgcctcccccaccgcgcgtctgcaagagcaatagtgggcttacggtgaagcacctgtgccggttctgcaaggtggtgaagcgccggggaatcgtcttcgtcaaatgcatggccaacgccaagcacaagcagcgccagggcttctccaccatcgccgaagcagccgtcgtctcgtgcgttcacctgcctccgccgccgcccgctagcggttccgcctctgccgcaacgttcgcagataagacacgtggtatgggagctaggcgcaagctcaagacccacataaggaaccagaggtgggctgacaaagcctacaagaagagccatctcggcaacgagtggaagaaaccctttgctgggtcatctcacgcaaagggaatcatccttgcgaagatcggctttgaggctaagcagcctaactttactatccgtaagtgcgctcgtgtccagctggtgaagaacgggaagaagattgctgcctttgtgccaaacgatggttgcctgaactacatcgaggagaaccatggggtgcaagagcggggaagggagcgacggtggtgcatggtgaataagcaggtgagagctgagaggcgatag

SEQ ID NO: 32914 - DNA, 399 bp, Zea mays
  Peptide Sequence Number=SeqID_76289
atgcatggcggcgtggagggagccaagcgtgacgggctcatggaagaaggacttggtatcgtaagcgagagacgcgtcctggccgaaggagacgaagatgacatcagtaccatcatggatgtaggactcgaagcccacgaggacgccgacggcggcaacgcactccgccgaccagcagaccttctaggccgcgacacgcgtccgtggcgtgccgcttttggcgatgacagtggcgtatccgaagaggctggcactgggcacagagctgtcgacagtgatggagagcgtgtgggtgccgcggccctcggtgtcgcgcagctccgctataattcaccggactgtccggtgcaccagcagagcaacggctatctgcgagcaatggtcgactctgacggatga

SEQ ID NO: 32915 - DNA, 576 bp, Zea mays
  Peptide Sequence Number=SeqID_76290
atggcgcctcctgtcgacgtggctggtctgcgccctaggttgggcgatgtggaagttcctccgaagccgaggtcgaatctgtcttccgtggccgaggtcgagtccgagcccctggttcgggcgaggcggagaccgtcggctgaggccagggcggagtccgagccctggggtcgggcgaagcggacccgagtccgagccctaggtcgggcggagcggagttcgtcgtcttctggggctgagcccgagtccgagccctgggtcgggcggagcggagttcgtcgtcttccggagcttagcccgagtccgagccctgggtcgggcggagcggagttcgccgtcttccgggacttagcccgagtccgagccctgggtcgcgcggagcggagttcgtcgtcttctggggctgagcccgagtccgagccctgggtcgggcggagcggagttcgtcgtcttccggggcttagcccgagtccgagccctgggtcgggcggagcggagttcgccgtcttccggggcttagcccgagtccaagccctgggtcgggcggagcggagttcgtcgtcttccggggcttag

SEQ ID NO: 32916 - DNA, 264 bp, Zea mays
  Peptide Sequence Number=SeqID_76291
atgaggatactcctcaattgcaaagaaaaacagaagcacacagtttttggcaagcttgttgttggaagtgatgttctaaagaaaatcgagcaagtagatgtgcaatcccctgattcaactcctgttattccagttactatagtaaattgtggagagctcattgaacacaaagatattggctctatgtcaatagaaattggtaatgcttatgaactgattggaacatttgcagcactcttgatccatttaatctataaggattaa

SEQ ID NO: 32917 - DNA, 201 bp, Zea mays
  Peptide Sequence Number=SeqID_76292
atggcaagctacttccatgtagccttgaccggaccggcccggacctggctcatgaaccttaccctagggttggtctactcctgggaagagctctgtgcgcagttgttggggaccttcggcttccgaaggtatcttcggactcaagtcggcatcatagtagaccagaataatacgaaggttgatacagcgccgaaggtgtga

SEQ ID NO: 32918 - DNA, 297 bp, Zea mays
  Peptide Sequence Number=SeqID_76293
atggttcagatcatcgagcaccgtgacttgtctcccgaggacttcctgatggaggaaggggcaacatcttccatgccacggggctctcaccaccctgcgcctggtactgatgctatgcacgctgcgcagcagcacacgcccacgcagacgtccagggctccgtcgagggctgcacatggtggggcgttgtctgcagccagggagttgctgcgtaacccaccaagttccatggcctcgcccggggcactgaggcagtggcgtgaagatgtcgatcgcctcctcggcatggcccattga

SEQ ID NO: 32919 - DNA, 1364 bp, Zea mays
  Peptide Sequence Number=SeqID_76294
gcaagacattcgataccagggacccacggaccggcgacgtgctggcccacgtagcagaggcagacaaagctgatgtggacctggcggtgaagtccgcccgggacgccttcgagcacggcaagtggccccgcatgtcaggctacgagcgcgggcggatcatgagcaagctggcggacctggtggagcagcacacggaggagctggcggcgctggacggtgccgacgccgggaagctgctgctgctgggcaagatcatcgacatccccgcggccacgcagatgctgcgctactacgccggcgccgccgacaagatccacggcgacgtcctgcgcgtctccggcaggtaccagggctacacgctcaaggagcctatcggcgtcgtgggcgtcatcatcccctggaacttccccaccatgatgttcttcctcaaggtcagcccggcgctcgccgcgggctgcaccgtcgtcgtcaagcccgccgagcagacgccgctttccgcgctctactacgcgcacctcgcaaagatggccggcgtccccgacggagtgatcaacgtcgtccccgggttcggccccaccgccggcgccgcgctcgcctcccacatggacgtcgacagcgtggccttcaccggctccacagaggtgggtcgcctcatcatggagtcggccgcgcggagcaacctcaagacggtctcgctggagctcggcggcaagtcgccgctcatcatcttcgacgacgccgacgtcgacatggccgttaacctgtcgaggcttgccgtcttcttcaacaaggaagggatctatgacgagttcgtcaagaaggccgtggaggccgcgcggagctggaaggttggagacccgttcgatgtcaccagcaacatgggccctcaggttgacaaggaccagtttgagagggtcctaaagtacattgagcatggcaagagcgagggagcgactctgctcaccggcggcaagcctgccgccgacaaagggtactacattgagcccaccatctttgtcgatgtcactgaggacatgaagatcgcgcaggaagagatcttcggccccgtcatgtccctcatgaagttcaagacggttgatgaggtgatcgagaaggccaactgcaccaggtacgggctcgccgccgggatcgtgaccaagagcctggacgtcgccaaccgggtgtcccggtcggtgcgcgccggcaccgtgtgggtgaactgctacttcgccttcgacccggacgcgcccttcggcgggtacaagatgagcggcttcggccgggaccaggggctggcagccatggacaagtacctgcaggtcaagagcgtcatcaccgcgctcccggactcgccatggtactga

SEQ ID NO: 32920 - DNA, 714 bp, Zea mays
  Peptide Sequence Number=SeqID_76295
atgactccgtcaagcacggtgttgcctgcaagcgcaagatcatcggcgcaaggttcttcaataaggacatcctactcaacaaaccgatcatgcgctaactggacgcgcgacaccgagggccactgcacccacactctccaccgctatcggcagctttgtgccccgcaccagcctcttcggctacgccacagtcaccgccaaaagtggcacaccgtgggcgcatgtcgccgcctagaaggtctgttggtcggcggagtgcgttgccgccaaagcgccatcctcatggactacgagtctaccatccatgacgatggtgacgtcatcttcgtctccttcggccaggacgcgcctacctccgacgacaccaagtccttcttccatgagcccgtcacgttcagctccctccacacagccatccacggcgaccccatcgtatgctccaccggcaactccggcccctatgacgacactgtcatcaacgccgctccatgggtcatcattgtcgttgccaccaccgtcgacagggactttcccaacatcctcaccctcggcaacatcatgcgcctcggggggacgagccttatgtccaccacacgccagcgcactctactcgatggtcgatgcttcctgcgccacctccaacccgtacgacaccgtcgaccctgtgaggggatcacggatgaaagcatgattaatgagggagggattctctaa

SEQ ID NO: 32921 - DNA, 1191 bp, Zea mays
  Peptide Sequence Number=SeqID_76296
atgactgtgttgcatcattcccatttgccaactgacacaaaggcagagcgaaagggctggtggccgcacacgagcgtcagcaccgccgagatcgcggccttgtgccgcgcgtcagagcgagtcacgcagacgtgtagcgggcggtggtgcgcctgcgggcatcgcaggtctctcatcgtctcgttcacctaccgcgagcaccgacggggcggggaatcgcatggtcggtgttccacccatcgcccggggcgaacggctggacgggtgggtcggtgttccggtggccgaccacctggcgggtcgcgcgatcgcaaggggcaggcgcctctgtctcggctcggcccagtcaccatctctccccatcccctttgccaccctcggtcttctccctcctcagggcaggcaggggcgccggtcaccaagcagaagaagggaagcgagagcacgaagcctgatttggtttgctttttgttgcccagactcggagggagttggtgcctctgtgtctctgtgtgtggagatggaccccaagttcccccacccccaccgctaaacaaaacggagcccaccaccgcgacgaccaccaccacctcgaccgcgcagcagcagcagctggatcctaaggactaccaccagcagcagcagccggcgcagcacctgcaaatccaaatccaccagtcgccgcagcaggacgggggcggcagagggaaggaggaggagcagctgcaggtggtggcgcagcccggggagaggaggcagcagccgctcgcgcccaagcggagctccaacaaggaccgacacaccaaggtcgacggcaggggccggcggatctggatgcccacgctctgcgccgcgcggatcttccagctcacgcgggaactcgaccacaatggagaacgtgaggatatggaaaggaaccgtgtgcgggcgtggcggctgtcctcgtctgtggtcgcgaggacggcggcgggggctgcgggcgcggggaggggaatcgctggcgggggcatgcgtccgcggatcttgccgcctgcgcggtatggaggaggaatcgggatggaggaggaatcgcgcgatggcacagggcggccggtgttcgcggcggggatggcggcaggcggatcgtggcagacgagcgggcggacgggattaggaagcgggggcagtctacagtcctctcttaatagttaa

SEQ ID NO: 32922 - DNA, 1440 bp, Zea mays
  Peptide Sequence Number=SeqID_76297
atggacaaaaaccagaacttagcctatgctccgtacattatggctctcattaaagccaagaccagatttgaggggcactgtgaaatagttcacacaccttttaggcccttcaagaatgagattgggttcctcaccaggcctctcactcccttcccagatgatgaggaagaagctggttatgatgcgggagacgctcctgaagctgatgcagagcagatgcctcctcctccacctcctcctcagcctcagcagtactggcagccttgtccaggctattttgacccgtactttcagaacttgcagcagagttttcatgacaacatgggggctctgtctagtcagtttgataatctctccactaatgacagcatgcaagatataagtcagagtcagcagcagctccagcagaactttgggcagttctcctctcactttgacaccttcaacactcactattatagcatgtatcctccacctgaacttcaaatcaagataagccttatgaaactcatctctaaaatccttcttatacctaagtcaaaaccgtctattcacccccctctagccggtgtcctagatcctacagtcgacatccttgaggaggcagctaaagctaaagaagccggtgtagatgtgatcattgatcagggatgtgaggcagggggtcatgtaattggtcagatcatcgattacgtcgacgtcaaggtgaacaacaccgtccacaaggggatgccgcacaagttctaccatggccgcaccagtcgcgtcaggaacaccaaatgtgccatcggcgtcgagataaacaagcagtggagtaaacaatctaaccgtacaaaaatgattacaacgataaataatctagatgagtggcacaaacgattaactgttgtaggtagggatgaaaacagtcggaaacgatataggtacaagtgtaagtataatgatttaaagaaaccgaatacttattatgtggatagcttaggaatagtggagattcttttcaagattttggtgctgaatatttttggtgaatggatcaagttactgttgcgggagtcttcagcaggtcacttgtgcctttcagcagtgctcttgcgtgtactggttataaacaataaatgctatgatggtgctaagggtgatatgtggtcatgtggagtgattttctttgtcctcatggcggggtacctcccatttgaagattcaaacctgatgtcgctttacaagaagatcttcaaagaggatttcagttgcccgtcctggctctccacaggtgcaaagaagctcatcaaaaagatacttgatcctaatgctaacactataagttctgttgtctgtagccatcattttaactcattttgttcaacatctgcagggttaataactatgtaccatcgttctgtggcctatgtagataatagctattgcggagcacattaa

SEQ ID NO: 32923 - DNA, 1026 bp, Zea mays
  Peptide Sequence Number=SeqID_76298
atgcatagagatattgcggtgcaaaaacttagaggagatggtggacggagtgatgctgcccactccacaggaacactactgatacgagaacttaaaacaaatggtggacaacatgatgcggtccagtgcatatcaagtctacatgtgcaaaagcttagagaaaatcaaatcaagctttatgggtcctcgtccttcctagaatctattgtagatgacacaagagtgcaccatgttcccctcgtcaagaatcaagagtttgatgctgccgccaaagagatcaccaaggcattaacaactgttggtatctcccatattattgacactactgcaatttctattgggaggagatatgagaggaccgatgagattggtgttccatttgttgtggcaatggattcaacaaatgtgacaatccgagagagggatgacaaggagcagatccgtgtggacatcaacgaggtggcgtccatggatattttggacttggcaaaatatgcatatgtacctgtcataaatggtctcactgactataaccatccatgccagataatggctgatgcacttactatgcttgagcagattggtcgtattgaaaacactaaggttgtctatgttggagatgggaacaacattgtgcactcatggctgttattggctgatgtgcttccttttcactttgtatgtgcttgtcctaagggatttgagcctgatgcacacacagtggagatggccaggggtgctggaatcagtaagattgaaataacaaacagtcccagggaagcagttaagggagcagacgttgtgtacacagatgtttgggccagtatgggacaaaaggaagaagttgattatagaaaacagaagttccagggattcacggcctaccttatgcactgtttgcttgcagagagaggagtggaggtgactgatggcgccattgaggctcccaactcaatcgtgttcccccaggttgagaacagaatgcacgctcagaacgccatcatgcttcacgtgctcggtgcttaa

SEQ ID NO: 32924 - DNA, 207 bp, Zea mays
  Peptide Sequence Number=SeqID_76299
atggggaagatctacagcgcggtggaggttgaggctggcaagtggggccgcttgtctggtgacaccgagcgcgcgctagggaagctgacgggatgggcccgcacgtcagcgcgtggatgcaagaggaaatggccacgctggggtaggttagaatctcttgctaggttaaaattgaagggttatgcatctatcggatggttaaggtag

SEQ ID NO: 32925 - DNA, 540 bp, Zea mays
  Peptide Sequence Number=SeqID_76300
atgtcgtgcccctgcggccttcccccctataggagcccgcgaccgagcctcacctcgccgcgccacccatctgcgtcgagctcgtgccggtgcttcgtcacgcgagtactacaccctgcctcggcccagcgtagcggcacgctgctgccgatcagccagccagtggccgagctcccctgcgcgcgtcgtccgtcggccgaccagccgcgtgcgcaacagcagcgttgccgccgtcgagcatcatcgtcgtcgttcatcgcgctgaagtcttcgctagcagttcatcatgttccgcgtccatgcctaaacgtcatgcatctgcgcctcgccgttcgctgttgtctgaggaatcgacggtcaagcttcggcgaccaaatgatccaggtcttcgagttctacaaagttgaagaccctgagcatctatttggtgaaggtcataatgaggatgatggttttgattatgattatggttacggtaaagaagaaggtgtcgaggcggatctccaggagttccaggacttcgacgagtttgaggattag

SEQ ID NO: 32926 - DNA, 603 bp, Zea mays
  Peptide Sequence Number=SeqID_76301
atggggtggcgctcgccatcttcggcatcgtgctcacacacatcttctcgtgatggaccgctgccttgctctacgtctgcatcacctgtggtgaggatttcagccagctccaagctcctgcgtggcagcttcactagcgtccgtgttgctggaatgtctgttggctggtggctgcgtgcagttcaacttgggcctggcgtcttctctagtctcagcttgggtagggaggtggccaccgtcgtcggagaagggatccttgtccagcttctcttgtcatatcgccgggaagaagacgttttgggtagtcgcgtagacgctccccaaaaacctaattgccgatcccccgtgcaaggtctcgaacggcaagggctccggaggcacctgccctctcgcttctccgtgcgcgcagagtcacgagatgggaacactctcacttgcggctgggttgtgactctgaaattgtggttctattcgcgtgtactaagtgccaggggtctcctctatttaacctctcacagagggaagctgaaggagaagggactgcacgccaagggacagtcagctgaaggacaagagtctcgtatgcagctgatgaagagataa

SEQ ID NO: 32927 - DNA, 498 bp, Zea mays
  Peptide Sequence Number=SeqID_76302
atggagcacgaaggggggaagagaacaggcaaaggggaatcccgcggccttcgtgttgccctgcgcccaggtcgggcgaggcggaggctcctccgaggtcaaggtcgagtccgagccccgggtcaggcgaggcggagaccgtcttccgaggccgaggctgtgttcgagccctggggtcggacgaggcggagttcgtcgtcctacgtcgaggttgagcccgagccctggggtcaggcgaggcggagaccgtcttccaaagccgaggctatgtccgagccctggggtcgggcgaggcagagtccgtcgtcttctgagtcatggttgagcccgagccctagggtcggtcagtggagcggcgaagtgactgcggtcacttcggctctatcgactggagcgcgcgtcaggataaggtgtcaggcgatccttgcattaaatgctcatgcgatacggtcggttggcgtggcgatctggccaaggttgcttctctgtgaagactag

SEQ ID NO: 32928 - DNA, 756 bp, Zea mays
  Peptide Sequence Number=SeqID_76303
atgatgaccgcgtcaaaaaaggtgcgccacgtcattcgatttcgtatccttttccacttcctctttctctctcttgctacagggaccgggaaaggggatactccgaaagggacccttgtccacgaagggagcgggccccgagcccccctactgatcagaggttcgaaggctggcccctcggaagggttcaacagccgcctcagagcactcgggctccgcgcccactactggtcagaggttcgaaggctggcccctcggaagggttcaacggccgcctcaggccactcggactccgcgcccactactgatcaggggttcgtaggctggcccccgaagggttcgacagccgcctcagagcatgcagagcgagggatgactctggggctcggcccccatctcggcctcagaagatggactttgcctcgcccgaccccagggctcgggctcaaccatgactcagaagacgacggactccgcctcgcccgaccccagggctcggatatagcctcggcttcggaagacggtctccgcctcgcccgaccccagggctcgggctcaacctcgacgctggacgacgaactccgcctcgcccgaccccagggctcggacacagccttggcctcggaagacggtctccgcctcgcccgacccggggctcggactcgacctcgacctcggaggagcctccgcctcgcccgacctagggctcagaccgaccacgtcacaggggggcatcattaccctacccctagctag

SEQ ID NO: 32929 - DNA, 384 bp, Zea mays
  Peptide Sequence Number=SeqID_76304
atgctgaagtggggtgacccccttcttcgtgggctggtttgcttcgttggtgaggcatttggcggaggcgggacagaggatcaaggctttgaaagtctcgctttggtcgtcgtgtttcctttggtcatgtgtggtgcccgtcttggaaagtcagagctgctcgtcatttgtgttgaactcggcaactatgcctcaggatcaccattggcttctccaaacagcagcacaaggctgactaatttatctgtcgctgagcataaaagattaaaagatgacatgaagaaaatagacgaggaggtccaacgacaaaaagatcaggtgctcagggtggcggataaaaagatcaaggtgctcaaggtcagaccgttcggcaccctacgctag

SEQ ID NO: 32930 - DNA, 609 bp, Zea mays
  Peptide Sequence Number=SeqID_76305
atggatgaaggagctcccctcggtggtctggagtctgaggacaacaccgagccgagccacgggcttcacaccgttctttctagtctatggagccgaggccatcttgcccacagacttagaatacggttccccgaggacgagggcgtacgacgaccgaagcaatcgaaccaaccgagaagactcactggaccagctggaagaggctcgggacatggccttactacactcgacgcggtatcagcagtccctgcgacgctaccacgcccgaggggttcggtcctaagacctccagaatcaggcgtcgcccggagaaggagccgcgccctcggctttgtccctaccctcggcgagatccgccccggcctcggacgacggcgcgagcgagaggatccctgcttcgaaggtggtcgccagcactgcgcttggacccgcggcggccgcgtcaagcctctggacttcggccagggcagcttcatcttcgtcaggaaggcaatacccctcgctgacccgctccagatccacgtcatagtgggaagcgagcacggcgaaggcccgcctgacgccatggtgcagcgcctcgcggagtctgccgcgcgcgtggtcacctaa

SEQ ID NO: 32931 - DNA, 349 bp, Zea mays
  Peptide Sequence Number=SeqID_76306
gacgcaggagccacccacgcctcgtgtggccgccatcactggagacaaccgcccctcacgcaaccaccggagccacccacgtctcccgtggccgccgctgccactgccgaagccacccacgtctcccgtggccgccaccgccgctgccgaagcctaccgcgccgtgcgcaaccgtcgtcgccaccgggcctgggatgcgccgccgcagctcgtttgcctcgggagcgtcgttgctcggttttggggaacaccgtcgctggttgcctgcctcgggacaccaccgtcgctcgcccccggtatcgccgccgcttgcacgtctgatggaaccgccatcgccgctaaaacctaa

SEQ ID NO: 32932 - DNA, 198 bp, Zea mays
  Peptide Sequence Number=SeqID_76307
atggactgtattctaatcttatcccttgatactaaatcttatctcataaagcagcagtacctcgtctggacggagaccatcagggccaagcgccgccgccaccggatgccggcaaacctcgacagccacagccgccgtgctgtcttcggcacggcgcttaacgtcctaaaatggacagggaggacggaggatacttaa

SEQ ID NO: 32933 - DNA, 327 bp, Zea mays
  Peptide Sequence Number=SeqID_76308
atggcaacgacgtttgtcccgtccgtctctgtgatggccaccgccgctgccgctccagcgtctgtggcgccgtcccctacgccaaaggccaacaacaacaggaaggcggtggtgcctgggatgactgggtacgagctgctcaagcgcgtcaaggagtcggtggcgctcagggacatcctcgtcgtcatcatgtcatcggagaacgtgcccacccgcatcatcccgctgcctgcccaaataactgcctttcacccatttgatcccaatatagtggagtccggcactttctgccatacaaagcctcaaacggtgacatcttcaaactag

SEQ ID NO: 32934 - DNA, 492 bp, Zea mays
  Peptide Sequence Number=SeqID_76309
atgacacataagccctttgacaagggcgccaataccagcagaggaaagagtacgacccagatggcactcagggatggcctcaacatacatgcattaaatgtggttttgaatatactgatgacacgtggtatcctcgagcaaagagcatgtctcgacactctcttagcgttgctggtgaattgttcaggaaacctgacggatttcaaagaacaagatggactaaataaaattgctgtcattgtaaaagatgcaaatagggatgaccatgtaaggttaaaatgttccgagtttctgcttctttactctggaaacgcaaaagaaaaatgtggcgcagattccgagtctaatatgcgagaagatttggcaaaggttttcggagaaaaatgtgcatcatttatctcctcaatgaacctattcagctcaactctagagtcacaaatgaggcaatctgagctaagctttcttgcagagcatgtgttggattacatgtag

SEQ ID NO: 32935 - DNA, 1029 bp, Zea mays
  Peptide Sequence Number=SeqID_76310
atgtgggatcctcagatgtggcacgcccaaggtttggacccaacccaggcttctatttttagtaatcctacatcccatatgaccaatcctacttggtcccagggacctaatgacccatcttcatatacctttcgtaatccatggaacccatattttggtatgacgaatactgggagtcctcctacacaaacatctttcggtcaaccacagatggtaccacccattgcaggtccacaagtttccacccatgttcccagccagactgaccctataaattttgaatccaaagcagaacacagtgtccatgaagttaacagccctaccaaaccttcagatacacctgcgacatttagaaggacaaaggaacagaacttcaaacctgatgaagacctgttgctttgcaaaacatggctagagattagtagtgacccagttattagcacagggcagaggaaggagggtttgtgggctagaattgagaaaaggtacaatgaacttaggggtgagtttccattgagacttaatagggctctcagcagcaggtgggacaaaattagagctgaaacaggaaaatttgctagattctacgctcgagtactaagggagaaccagagtggcctcatagataacgacaagagaggcaatgcggggacggagcctgttcgtagtctaacacctacagggtctgttaatgaagtggaatttgatgaaggtggttcgaaaggcaagagaccattaggacgtgactcgacgaaagcatcaaggaagaagtcaatgtccagttcatcccagtctactgactacctgtcaagaatccatgacattcaaatagcaagattgaagcaaagtgaagaaaaatccgacctgaaacaacagaacattgagttcatgaaggaagttgaactcaagaagttggaggttcaatccaaggaaatacaagtgcaggaaaaaattgatgatggaagacaggaagcaaaaggacgaagagctgaagaaactttatgctatggacatggatgctttacctga

SEQ ID NO: 32936 - DNA, 426 bp, Zea mays
  Peptide Sequence Number=SeqID_76311
atggcgctcgcctccccctcggccggtagcttcccagacaagcgcgcgcggtcggaaaactccgacgagggaggtccaggcgattcaagggcgaccgcaccgctccaggagaaggcagccgtggatccgccgtcggccgtggatccgccgtcggccgcgaatcctttctgttggtccgggcggcgagcagcagacgtcgtcggcaacgcggatccagcggccaagttcgcggagcggcgacccggccgatccgtgcgaagacgccgccgccggtcgtctgtgtccgccagttcgtcgtctgcggggtggaggtcaacgggagttcatcgattcgccgacagatctacgctgagccgatctgcgtcattcgagcttcaaggtccaaggtacatcaatcgctgctccaagttcttcagctcggattga

SEQ ID NO: 32937 - DNA, 543 bp, Zea mays
  Peptide Sequence Number=SeqID_76312
atggcttcagggtcttctaggggcaagggtgcggtaaatgagagacgaaaggatggagggaagttaactccaatgtcttttgatggccctcttggtccagatttttttgaagaggcggtttttaactttccagttcaaagtaaaaaagatttcaacaaagagcattcattggtcaaggagaattgtgggttcactcgttgggtagatcctcgtccaatttttcctcatgcggaatacatatcctacctacagaataggatatttgatctagagagaagtgcaagtatgcccagatccatattgttgctgcccttgtcacaacaagaatgttggtcctccgtcgtctccaccgcacccacagcacacgccaacaatgggaggatactatggggaagggtcaactcaatttggaatgtgggagcactactagaaaactcttatgtatcaattgcttttagcgtgttggttatctatttcaaatgcttcaagtcgccttcaagaattgctttaaatctacttttcatcaattatgtatttatgtaa

SEQ ID NO: 32938 - DNA, 423 bp, Zea mays
  Peptide Sequence Number=SeqID_76313
atgcaggcggcatgcaaccgcgccaagtggacacgcttctccgactcccagcgcgccagcacggaggcccaggcccacgcgtcgcgcaaccggcgcgccggatgctgcatgcaagcaactgcaccgccacttgcgccaccgccgcgcctcttcggttgcggaaccaatgccgcgactcgaggcgacccagcggcgccagcctggcgcgacgaggttcgaaggctggccctccgaagggttcaacaaccacctcagatcgcgtgggcccgacacccactactggtcaggggttcgaaggccggccccccgaagggctccatggccgcctcaggctactcgggctccgcgcccattactgatcaggggttcgaaggctggcccccgaagggttcacagtcgcctcagacgccgagcgagggatga

SEQ ID NO: 32939 - DNA, 606 bp, Zea mays
  Peptide Sequence Number=SeqID_76314
atggcctgggcaagacacaagcagcagtgttcgggtaattattgtagagttcaagaatcatcaccaggaggtccagaactaaaatgtttggaagctgtagaagcattcaatgagggcaaggttgaagaacctgcctgtacaagttggcacaccacacatacatcaaataagagcagaagaagcaataaaaacgagcgggaagatgcctctgtggagttccttcatgttgcacataatgcagttgtctgttcaggactggattcctcttcaaaagacagtgagtcggatgaagatgaggtgccgttgatcaataagcgaacagaaagaaggcgccgacaaagattacatgaaatgtatctagccagggaatccaatgatgttgagtttggcagctcaacttctcataaggttggttcttgctcactagctcccaaggacaataacaaaggtgaaagtgtgccagcttctcaacctgaagaaagatcctgctcaagtcatcctgtgagtagcaacggagttgctggaaatcaagctggtcatgaacatatgtcttctccaacggattcaccaattagaggtgaaattgtagacatttcagatggttga

SEQ ID NO: 32940 - DNA, 309 bp, Zea mays
  Peptide Sequence Number=SeqID_76315
atgggactctgtcaccgacgcagtcgagaaggctcgaagaatcgcttcggcagaagagcttccgaacctacgtcacccgaccgttgggttctgactgttggagcttctgatagctgggccaccgaacagtccggtggtgcaccggacagtcactgttcactgtccgattgcaacctcgctgacggagagtacatcctcgtgccggagcaaggagttgctcaggaggtagcccaggatccagcaccagaacctgccatcgaggatctgcctgccccagctttggaaggcaagccccggttttatgcataa

SEQ ID NO: 32941 - DNA, 564 bp, Zea mays
  Peptide Sequence Number=SeqID_76316
atggctgatttggagtcaattgtcagaaatctagggctatctctacaactagaatacacattctggtatcgtgatgcttctctgattgagcaattgccactgatggtggctcttcaacggcctcctcaatatgcttgcggatgccttttcattctgtcagaagtccttaaggcaaagccaccattatgggggattgtgctccagaatgaatctgttgatgatggtgatgaacactttgaagacattttagagattcccgaggactcttctgttgcctcagcagtgctacataaacataatgaaaaagtagctgcacatgagaaacacaaccttgatgctgctgatggaattgatagtgtaaaacaagtaaatttggtagatgagaacaatgcatcaactgactcgtccagacaacatgcattctatgatccacgacacagagagccttcttactggtattttctatttaatctcatttttgtgcatggatctacatttacgtatgagttctttgttttgttgaactatgtgattgttattcacaagtaccctcactctgtttaa

SEQ ID NO: 32942 - DNA, 349 bp, Zea mays
  Peptide Sequence Number=SeqID_76317
gtgccgccgacgacctccgccgcctgcgctcgtggccagagcagctccagccacctccgacgctgacccgcacactatcgtgaccgccgtgacctccccgacgtctctgaccaccccatcggagctctactgccgctgggtcagtgaggcattgtacgccaaggcggtgagccctgatctgttggcggggaatcgatggggacggttgatgtatgtggggttggagtgcctcgccaggtcgtgttctctggaggacatggttgctggagtgacttggccgtccatcttgccaccgggttcgacagtcgagtgggaccctacctccgctgaggaggagcatgaggagtga

SEQ ID NO: 32943 - DNA, 608 bp, Zea mays
  Peptide Sequence Number=SeqID_76318
taaccggggcaaagatcacggcggcgaggcttaccgacggcagtagagctccggtggggtggtcggtgacgtcggggaggtcacggcggtcacggcggtgtgcgggtcagcgtcggaggtggctggagctgctctggccacaagcgcaggcggcggaggtcgtcgtcggcacctgcttcggccaaaccatggcggtagggttcaatcaaggtgcacgaggagctccactgggtgatgtagaggctatgcgcacaaggaatcgagaaatggttcagtggattacccagtccacgtgctccggcggggtcacgaactccggcgagcgtgatctcactgttctggtggggctggtcctcggctcaagcttgggaaagcttcacgacctcccgaggaagctatccgcgggctcggatcgagcggaggtgggcgggaatggtttggccatggcgggcggctctggcgggtcgcggggaggggcggccgagggcgcgcgggggcacgcgtgcgagcgtgctctgggcgcgttcccgagtgtctgcccacgtcgaacacgtggtggtttgcttctgccggtgttcaaaggcctttttggtcgccttagcgtgtag

SEQ ID NO: 32944 - DNA, 834 bp, Zea mays
  Peptide Sequence Number=SeqID_76319
atgactaccagccttgtggtggggagaagcaaaccgggctgcggcctccctcctgcccttagcttcaaggatgttcatcatccgtgctggggaggagggtgcgtcgagttgggacccgcctccgcatgggcacctgcccttagctttaagtgtgttgcacgggcgacggtcgcgacgtgcgcgggttggccacatctacggcttctcctgtggcacctgtcgtactgggaggtcgtacaagacatcgtacgccgtgcgggtggggcggcgttcttggatggtcttgtcctcactcccgtagtgaggacgggagtgaagacctcttcgtgcacgctggcgcggccaccgtttgctgagagacggggacgaggtccttcctgcagcggcacacatgttgggatgattgccgttgctggcgagtcgtcggtgcagaggcggccgtcgccgttggtgttgatgcggttgcctctgctgcctaggaagcccagtcgcgtgtctgaaccccctggatggtggcttcaagtactaagacacctgccgcagggcggtggagtatgcaggctcacgatacgggaccaggctgagcggctacatggcttccggacccccccaggagaccagtgcctgttcttcaaaactggacctccagttcgttggacgcacaggactatagttttaaatactaggacacctgtcatggagtggtggagtgtgcagggttttgggtacgggactaggctaactggccacacaggctccggaccaccctatggaacgggcatccgttccttagaaccggcccccaggccttcccctgtttttgtaaagcaatag

SEQ ID NO: 32945 - DNA, 528 bp, Zea mays
  Peptide Sequence Number=SeqID_76320
atgacgtcgtgcaaagatggtctgcgagggcggcgcagcccacagccccacgctgaccaaggggacacccgtttgggaccgggcgcccactggtgtctgcggtgcctccgcagcgaaatctcggtcgaggttgtgaccctcaatgttctgacggcgctcacgctccctttccaaagagacccgggcgtcttctcccgtacgcctacggttgagctccgcccggaggtcgtcgacagcgtcgtaggcgctgccctcaacggagtccgggacgcctgcgctggcgtgtgctgcttcacggcgtgcacgacagcagtcccagagtcggggcggtcgggcactcgtggcgcggaggatgcaacctcttggtccatcacgaaatcctctgaagtttcgacgcggtgctccatgatccgcaccatcatgctgagcgagaaaacaagcacaaacttgaagcctggcccctacctggcgcgccaaatgtcagagaggaaatctcctcggccgggtggcggattgcacccgccctaa

SEQ ID NO: 32946 - DNA, 516 bp, Zea mays
  Peptide Sequence Number=SeqID_76321
atggtgggttacaaggttgaacctagctgcccaggtatagataagagcggaaaaaggttattgcctgaccgtaagctgaaaagtcttatccaacgcccgctagacattttacctgaaacaaaagatgggtactcacttctgctcttctggcattgggaggactgcttaaaacagagatacgaaaggtttgttatggcattggaggatgcggtaaaagatatgctgccaaatcttaaggacaaagcaatgaagattagacgtgtcgttgtagatgggcttttggagctaggctgctgcatctgtgggcttctagggttggccaacaggcacaagacaaaagcttggagcattggacgccgagcacccactcgtgctcctgcagtcctttgccaagagcgtagccgctaccggtactcaaggccgtacaaccgccaacatcgcacaaggccgcggccaccgcagcagcacaaggacgccgccgcccgcctccgcccgaagacggagtgccacccctag

SEQ ID NO: 32947 - DNA, 1008 bp, Zea mays
  Peptide Sequence Number=SeqID_76322
atggcactttctttttctgtgccaattctcttgatcaagctgatgttcctgcctgtctcttattcttgcaacattcaaacagttttcatgcttttgaaaagtaagtcagaacaggaacgtcgtttgctcacagctcttgttaacaaacttggtgatcctgaaaggagagcagcatcaagtgctgcatatctgttaacatgtctcttggctgctcaccctaatatgaagatggtggtgatagatgaggtggattcttttctcttcagaccacatgttggacttagggccaagtaccaggctgtcaatttcttgagccagattcttcttacaaacaagggagatgggcctaaaattgcaaaacggttggtggatgtctacattgcacttttcaagttctattacccatcacatgggcatctcttgtatgaattacctttaggagcattttgtggtttagtcaatggggctttgtggcacatggaaggtgctattgtgtcacttcaagtttgtacagagatgggcatgatcctcgatggaggggaacacactggtaaaaagcgtcactcaggtgtggtactaatgagctctggtgataccaaaggagatacatatagcaaggacagcaagaaaaaggtaggaaaaatagagggaggaaataacaagatggactccagatccaagggaaacaatgaagtgggttcaacagcaggatcagatttggagctggactccagaatcctttctgcgcttttaactggtgtaaatagggcattaccatatgttgcaagctcagaagttgacgatattgtggaagtgcagacacctattcttttcagattggttcacgctgaaaatttcaatgttggtgttcaggcattgatgcttttgttccaaatatctataaagaataatatagcaagtgatcgtttgtaccgtgcattatactcaaaactcttgagtccttctgctgttacttcctcaaaggttcctttcttatgtgcattctga

SEQ ID NO: 32948 - DNA, 252 bp, Zea mays
  Peptide Sequence Number=SeqID_76323
atggatggcggctaccacccccgcggcggtgagccctccgtctcgcagctcctgcaagtcctccagaaggggctggagattcttctgtctctcgcgcggggctccatagcgccagttgctgccggcggcggtcaccactcgttgagaaaacgatgggagcctcccatcgtcgttccggagggactaggaaaggggatactccgaaagggatccttccctgcgaaggaagcgggccccgagccctcctactga

SEQ ID NO: 32949 - DNA, 66 bp, Zea mays
  Peptide Sequence Number=SeqID_76324
atggcgacttggccaaggttgcttcttggcgaagactgggcctcaggcgagccgaagattctttag

SEQ ID NO: 32950 - DNA, 414 bp, Zea mays
  Peptide Sequence Number=SeqID_76325
atggttgcccctcctcctcctccgtcggcggggaaggtgatgggacagacccggatgctgttcttctgtcacgcggggaaaacgtcgtcgattctgccgccggcgggcgggctgacggccgccattgtcgttgtcgcgcggcggaggaaggagtatcatgtcgtagctgccatcgagggacatgaactcgagactcccgaaacggagcactgccccgggttggagaggttgctggagactacacatccggagcttgatgggaagctgttcgtcaacacgcagcaggcccctacttggcgcgccaactgtcggcgtttcgaccccggggggtccctggaccgacgagtaaattgtcgctgcgtgtcccagcccagatgggtcggcgcgagaaggaacacaagggggaaacaataa

SEQ ID NO: 32951 - DNA, 393 bp, Zea mays
  Peptide Sequence Number=SeqID_76326
atgcagtcggcatgcaaccgcgccaaatgggcgcaccccttcgactttaacgcgcccagcatggaggcccaggcccacatgtcatgcaaccggcgcgccgattgctacgtgcgagcgactgcaccgcccctcgcgccactaccgcgtctcctcgactgcggagccagtaccacaactcgaggcaaccctgcgtatgacccaacagtgccagccaagcgcagcggtcacgggccagtcagccgcggaccaggaaaggggaaaaccccgaaagggatccttctccgcgaaggaaacgggccccgagcccccctactgatcagaggttcgaaggctggcccctcggaggggttcaacagccgcctcagagcgctcgggctccgcgcccactactga

SEQ ID NO: 32952 - DNA, 1209 bp, Zea mays
  Peptide Sequence Number=SeqID_76327
atgtcttcttcctcccttaagcgtcgggtcttcccgtcttccaagcccccggatggggggaacgcaactccatgggagctggtacctctcagccatcgttcggcttcaaggattttcatcacgcagcccggtcgcaccccttcaccggcggtcacccgagatggcgacctccagcttgatggtgggggaaagcgagccgggctgcggcctctgccccttcctcagcctcaaggattttcatcaccaaggccggggaggggagagtgccgagttggggtcggcccctgcgtgggcggtggcccgctccttcactcagtgatggggggagaagcgggcattgcccgtggcgtccggcagctgcagcgtgcctggtcttcagccgcgagtggcttcggggccacttgcggcgtcggcgtctgccacggcagccggaagaggttcttccgccggcgcggcggccgggaccggccacgggctgacctccaacttctacggccttctgcccgtccttgcctcacgagttttggcacgggcgggggcctcctggcagcggcatccaccctgaggtcagcgttgccgctgttcggccccccggagcagaagtcgccgtcgtcgccactgctggacactaggtctcgcctgtttgattatctgaaccgctttaccaagcatgagttgccccgtgtcaaggtgacgggtgaggccgggggtagcgatatcagtatgaacagaggcggagttggctcgagaatgggaacctggggtaaccggttgagccgcctgctcgggccggattcccggaggagcccctggaccgcggcgccgcccgaggctgggtcgggctttgctgaaggcgtcgtcgatgccgagggtgctacagctcccttcggcgtgaagacccgagcctgcaggatccgatcatcttgtagcgtgtgcttcctgcggccgccgaggccagaagaaaacaccctcgctgcacttgcgaagctgcgccttttttcctcctgtttcgagcatctggacttcgtcgaggcgtgggaatccctcggctcggtcggccttgccgcttacgcgtactttcacccgtccatgaggccctgcccccgacttagtcgagaaagcttgaaggcctgcttcggcaggagagcttccgaacccttggctgcttacgtgtacctcgtcgtttccaggatccgctttccgaagtag

SEQ ID NO: 32953 - DNA, 1503 bp, Zea mays
  Peptide Sequence Number=SeqID_76328
atggaccgcggcggccacgcggcgctgctgctgctgctgctggcgctggcggtgatccccgtgacgggcgccgccggcgcggcgttcctggaggaggacgcgatcctgggcgccgtggagcgcgcgatgatgcgcggcggcggggggaagggcgccgcgaccgcgaacgcgagcgggaggcaccagcaccggcgccagcgctacggcgtgggggcgccgtggagggaggagatcgcggggctggcggggcggcccgagctggcggcgtggctgcgctcggtgcggcgccggatccacgagcgccccgagctggcgtacgaggaggtggagaccagccgcctggtccgcgacgagctgggcgcgctgggcgtcgggttccgccaccccgtcgcgcgcaccggcgtcgtcgccacgctcggcaccggccgcccgcccgtcgtcgcgctccgggccgacatggacgcgctgcccatccaggaggccgtggagtgggagcacaggagccgggtccccgggaagatgcacgcgtgcggccacgacgcgcatgtggccatgctgctcggcgccgccagcatcctcaaggctcgcgagcaccaactcaagttaaggatcgtgtggtcgtcatgccattcctcacgtttcggtcggcacgcgttccagggcacggtgaagcttctgttccagccggcggaggagtcgggctgcggcgcgaagcggatgatcgaggacggcgcgctggagggcgtggaggccatcttcgccgtgcacgtgtcgcaccagcacccgacgtccgtggtcgggtccaggacgggggccctcctcgccggctgcggcttcttcaaggccgtgatacgcggcggcggcggcggcggcgaccgggcgtccgaccccgtcgtcctggccgccgcctccaccgtcatcagcctgcagggcatcgtctcccgcgaggcggacccgctggactcgcaggtggtgtcggtggcggtggtgaacggcggcagcgagcaggcccagcctcaggagcaggagctggtgctgggcggcacgttccgcgccttctccaacgccagcttctaccagctgcggcggcggatcgaggaggtggtcacggcgcaggcgcgcgtgcacgggtgcgccgcgtccgtcgacttcttcgagggccagagcttctacccgccaacggtgaacgacgcgcgcatgtacgcccacgtgcggcgcgtggcgaccgacctcctgggcgcgcaggcgtaccgcgacgtgccgcccatgatgggcgccgaggacttctccttctactcgcaggccgtgcccgccgggttctactacatcggggtgcgcaacgagacgctgggatccgtgcacacgggccactccccctacttcatgatcgacgaggacgtgctccccaccggcgcagccgtgcacgccgccatcgccgagaggttcctcgccgaacacgactccatcatgggcgtggccgcctccgacgaccaggacccctag

SEQ ID NO: 32954 - DNA, 324 bp, Zea mays
  Peptide Sequence Number=SeqID_76329
atgggcccacgtgacagtgaaatggatgagacgggcgtggggaagagagaccggccagtgggtccctcgtgtcggcgcacgcccacgcgcgagatatgggccgcgcggcgtagggaaaaagcaaattacaaagtgggtgttacaagggtcgacgacgtcgaagtagcgaaatcaacagggtcgacgaggtcagaagatcacgagcagtcgcgtgaagacgctttccaaaaccttattcgccctctcccagtgcaggatcttgaaggcgaaggatttcagagacctgctctcctgatcgcagatgcacgtctgcggtcgggatga

SEQ ID NO: 32955 - DNA, 375 bp, Zea mays
  Peptide Sequence Number=SeqID_76330
atggagaaccacccggaaaaacagtgctaccgcaagggtggggagaaaaagatgttcacctccaatgtcaagaataaggattcccatgacacgattatacttggagatgggaaccaaggcaaggtccgtaatgcgcagcggccacgcaaggcctgttacaatgggccggatcacacgtgggcctccatgctggacgaggtcgcaagatgggacgacctcgtcacaggtcttcgtccgatgacgtatggggtgaagggtgagcctgcccgttgtcttgtctccgttggtccaacgattacggcaaaggcatcgagcgaagggtggcgtcttcgccttcgccccaacatttgccctccgagggaccagttcgactaa

SEQ ID NO: 32956 - DNA, 261 bp, Zea mays
  Peptide Sequence Number=SeqID_76331
atggcacccggcggctggcgcggcgacgctctatcacgaacacgctatcgcggcctcgctggcgcgacacgtctctccgcctcttcgtcgcgtggtcgcgaggcgcgacacgagcccacggcagcacgtcggcaccgttgcaccggcccgtgttcgtcctcccgtccatttgctggacgactgagcgctagatacacgatgcagttgggcggctggacgctgctgcctgttgctaaacctaacgccagccagactccctga

SEQ ID NO: 32957 - DNA, 516 bp, Zea mays
  Peptide Sequence Number=SeqID_76332
atggagaacgagtggaaaactagacacacggcctgtggcctgtgggtggccgggcagccgccagtactggcggacctgggagctggaataatacaggcgcaagcatcactcatgctcatgcatcagcttctttctctgtcaagaagaatgggaagaggaatagagagattcagaggagtacgacagtcgtggcgtaatgctcagagtcacaactcacaggtgacgccacgccagtctccagccctgctgtcgtggtcgaggcccaaaacatcagaaatggccgtacgatccttgggcctcagcgggaggagtgtgtccatggggccgggccgggccaaggatgcgtgccagaacaagatgacctccgctgtgccgtttggcttgggcatccccgcgttattccagggtgttgggccgtggatgcttgttcaggggcaacactccgacagaatgtcgcgtagaagcaaccggagagggctcctcgcgcttccttgccgcgaggagatgagcctctag

SEQ ID NO: 32958 - DNA, 1338 bp, Zea mays
  Peptide Sequence Number=SeqID_76333
atggacgcccccgccgccggcgcaaccagcagcagcgccacccatgcaccgccggcgcctcaccatgccaccgcgaagaagaggcaccactccggccgcaccaagaccctcctcctcttcgtcgtcacaaactccatctccatcctcctgtccgtcaccttctcgcgcgtcaccggccttgggaccggtggcagcggcggcgactccgcactcgacttcgcgttcagcgtcctctcctccagccagagcctcgccgtcgacctccacaatcgcgtcgaggccaccgacgcgatcatcaagaggctcatctccaactccggaaagatgaagcgggacgcgctgccgccgaagctgacgccggacgaggagctcacggtcgcgctcggcccgcacacgctcccgttcggctacaccccgaacctcgactccgacaagctgtatccggcgatcggcgcggcgtgccaccgccaccgcgacgagctcaacaagtacatgcggtacaacgtgaccggcgactgcccgcccgacgcggcgctcgcggagcgtctgatgctcaggggatgcgagccgctgccgaggcgccggtgccgcgcgcgcgggccagccgggttcccggacccgacgccgttcccggagagcctgtgggtggtcccgccggacaagtccgtctcgtgggcgccctacgcgtgcaagaactactcgtgcctcgtggacagcgcccgccgccgcccggggagccacagccaccaccacggctgcgaggcgtgcttcgacctcgccgccggcaaggagcagcggcggtgggtcgggcagggcggggacctcgactacgacatcgacaccgtgctggcctccaagccgcgaggcacggtacggatcggcctcgacatcggcggcggcacgggcacgttcgcggcgcgcatggcggagcgcggggtcaccgtggtgaccacgaccctcgacctcggctcgccgttcggctcgttcgtggcgtcccgcgggctcatcccgctccacctcagcgccgtcgccgggcggctcccgttcttcgacggcaccctggacatcgtgcactcaatgcacgtgctcagcaacagggtcccccgcgcggtgcttgaggccgagctgtacgacatctaccgcgtgctccggccgggcgggatattctggctggaccacttcttctgcaccgggaaggagctgaccgaggtctacgtccccatcatcgagggtgtggggttccgcaagctccggtggaacaccggcaagaagctggacaaggggcccaacgccgacgagtggtacatctcggctctgctggagaggcccatgatgtga

SEQ ID NO: 32959 - DNA, 231 bp, Zea mays
  Peptide Sequence Number=SeqID_76334
atgggtggcacaggcagcatggacgacggaaagcaacaacagtgtccacatctcctccgtctcgcagcgtacgccggaggacaccgtagccgtgtgccttctactgctccggaggctctagctacatctgctgttgtttctgcctggagacccaggctgcccaacgccgcggccatgttgcatggcatgggggcggccgcgcgcaagaagggtgactgcggtgaccggtga

SEQ ID NO: 32960 - DNA, 1575 bp, Zea mays
  Peptide Sequence Number=SeqID_76335
atggcgccagcggtggggctcaagcgctccgccacgcagaccatcactctgccgccgcccgacacgcggctggctgtgcgcgatgtcatgcgctccacgatcccgtcgcagcccgccgtggcgccggcgtccacggagaggcaggcgcccgccgcggcgttgcaggggttcctgtgcctggaggaggtggacgggaggcggtggagctacgtggtggacggtggggccgcgaaggggaggagcaggggcggggccgtccccgctggggccgccgtcagggccgtgccgctgcagtcgccgcttccgcctgccgaggagagacggtgtaccctgctcataggactaggagagacggtgtaccctgataattgcagtagcatcggtaatttcgaggaaataatggcattcataagatcatatgtggtgcctgaagggtttccagacagtgttactccttcatatgtaccttacatgacctggagggctctgaaggtatattgtcgaacttacattcaacagtcagcttttactgctattctcaagaaccgaccaaagtttaatgtcctgttcactattcagcatttctttggtggagcgatgggagtgtttacgacaagaaccttgctgagttctgttggagtctctcaaagcaaggtaacaccaggtgccattgctatcaactggatcctcaaggatggtgctgggcgtgtcgggaaaatgctttttgcacgtcaaggaaagaagtttgactatgacctaaagcagttgcggttttctagtgatctcttgttggaaataggagctgggatagaattaactactgctgcattccctcagtttttcttgcctatggcttgcgtagccaatgttgtaaagaacgtcgctgctgttacatcaacttcaactcgcactccaatctataaggcctatgctagaggagaaaatattggagatgtcactgctaaaggcgaatctgttgggaacattgcagatctggtgaggtctgttgtgctgaataccctaaacagggcaaggtttaccgtcgcagtggattccttcattaaaactggtcacattccctccttgaaggaaggaaactcacaggagacgatatttaatccaccttggcggcatgagccagtcgcaataggttcaaggtttggagaagcatttcaagagccagcttcatttcttgccatacgacctctgtttgaggacgagagatacatggtaacatataacccaacaaaggataaagtatatgctttgctcaaggaccaggcaaaatcagacgacattattaaagctgctttccatgctcatgtgctattgcattttattaatgcatcacatgctcggagactgaagcagaagcagaagcaggcaaaccctgaccgatcagagtatctgtactctagaaacatggatttcctggcacacatcgctgaatcttgcaaaatagtttcctcatcatatggaacattcaagaagaaagctagggaacagggttggataatgtcagaatctctgctcaaccctggcaaggctcgattatgtgcagcaaaaccacaatga

SEQ ID NO: 32961 - DNA, 615 bp, Zea mays
  Peptide Sequence Number=SeqID_76336
atggcgtgcccgcccacgtggccaaggctggccggagccgctggccgaagccgatgtggcctacgccggtcggagccgcctggattcgagggcggccgagttgcccgccgccggctgtgcgcgtccgcggaggcaagtcagagccagtccgcctgggagcagccgccagggaggacgtccgcgcctggggctcggcgattggtcatggccgagggcctgaccgtgccgagcgcagggagccgcgccgccaaccgccaagggtcgcgcccgcggctggcttggctgagccgcgcttgcaccgggctccccgccccatgcgtcggggaccgtcgcgccccgcgccggtgccgctgcacccgcgccgagggccgtcgcgcccgctgccgggccgccgccgtttgcgcccgagccgagaagccgggggctcagccgctagactcagggccaaccgcgcccgcacccgggccggccgcgcctacgtccagagaggtcgaccgcatccgggagcctgcggggccgagcgcccacactcgtgccgagggccggccgagcagcatccgcgcgctcacgccgggacgcgcgcctgtgccgcggtatcaatccgtgccatgctag

SEQ ID NO: 32962 - DNA, 693 bp, Zea mays
  Peptide Sequence Number=SeqID_76337
atggccacagaaggcctcggcgaggtggtctgcgagtgtgacgaagtcgtggaagcagcagtgcacagaatggcggcgttggtcggggcggcatacgctggtgacgaggtaggagacatagctgggcgcagatctggggacgagcgaggcgacgacaggctcggcttctccgggtcgaagacgcgtgcggatctcggcaacgtggaggctatgacgcgtgcggatctcaagaacgtggaggagggcgaggaggcggagcacaaggaggagacggcgagcgtggaagcggcgagatcccagccattgaagtatgtggcgacctcgacggccaggaggagcaaggagatgacgacgagggccttgatgaagtggagaccaccacaccggcttcgcacatcggtcctccccacggccaccttatgcctggccgcacctgccagtgcgacggtggcggaggctagcgaggctaggcacccagcagtcggtgcgcgccttgaggagcagcagccacatggtctggttggtgttcttggaaggccccgttggagaacgacgagggcgaccgagaggccctaccgtcggcgtcaacgactggagatctggcggccggtggcgaggaaggactggagcgagggtttccttggagacctttctgagacggggaatgcgaatcaggtgcgcatgagagagtga

SEQ ID NO: 32963 - DNA, 780 bp, Zea mays
  Peptide Sequence Number=SeqID_76338
atgtcggggggactaagaaacgaaagtgcttctaagcttgaaaaagttgaggttgcctcgacttcatcttttggtgcagatgttgatcctagggcaatagatcttgccatgagaatcgccaaaaggatgttcctcaaaatgaaggaagatgaggcgaagaacaagattgaagaagaagaaaatgatcgatggagaccaaacgatgaatccacctcttcacaaggtttgtctttcaaatccacttctcatatgtgctttgtcactaatgggagtgatagtgaaagggaaagtgaggatgaggaggagcatgaaagtgatagtgaagacgaggatgatcttcaacaattcttcgctcaactaagcaagaaaaatcgggtgagcttgctcaaactcatgaaaagagcggaagaacaaaaagaaatgcttcataagcaagaatatttcctcatcagaaaaattgaagacttagagaagttgactaaagagcatgagaagctaaagtgctctcatgatgatttggtccaaagttatcaagcaagccagtcttccattgagctagaaatttcaggaaatagtgatatttctatcacacaagaaaataaagagctcaaggaagaagttggaaggctaagaaggagcttaactcttttgaagggaaagtgtcatgctcaactttctcacgataaccatgataacatggtgaagaagcttgagaaggggacaaccgtagcatgtacaaacccccttcaaaagaatgctaagttcccaagaaaggcatga

SEQ ID NO: 32964 - DNA, 201 bp, Zea mays
  Peptide Sequence Number=SeqID_76339
atgggagaccacgtctcaggtcgcgtgaggagggcaatctgctgtcaggttcacttagggcttgcagatcctcgctggggcatgcagatcctcgctggcatgctctggtgctggctcctggactacctcttgagcaactccttgctccagaacgaggatgtactctttgtcagcgagattacagtctatcgaatgcaatga

SEQ ID NO: 32965 - DNA, 771 bp, Zea mays
  Peptide Sequence Number=SeqID_76340
atggccgccgcctcgccgccgccctccccaccccacgcaaagcgccccaagatgtcctcctcctccgacccggaagccgatgctgagcccacctcggcctccgccgccgttgagggcgccgatcctgcgcagcgtcgtcccaggtacaagcgccgcaaggtcgccatccttctcgggtactgcggcgcggggtatcagggcatgcagaagaatccgggcgcgcgcaccatcgagggggacctcgaggaggcgctctaccaggcgggcgccgtgcccgaggccgaccggtccgcgccgcgccgttacgattgggcacgtgctgcgcgcaccgacaagggcgtcagcgccgcggcgcaggtggtgtccgggcgcttctacgtcgacccgccgggcttcatcgatcgcttgaacgcgcagctcgcgccgcagatccgcgcttacggctacgtgcgcgttaccaactcattcaacgcgaaaaagttctgcgaccgccggaggtacctgtatctgcttcccgtatttgctcttgaccccagcgcacacccggaccgcgaggccgtcatggcgagcatggggagtgggagcgagcttaccaagtgcctggagtgctccgagagaggcaggaagattcctggtgtcatgggccgggaggggaaactgcccagccccgggcagaatgttcagctgatgcagatatttatattgggaacgaggagaagaaacttgagcctgcagccactgaaaataaagctcaagggatgtcaatcttaa

SEQ ID NO: 32966 - DNA, 702 bp, Zea mays
  Peptide Sequence Number=SeqID_76341
atgggtgaggttatgatcattggcatccttgacgcaggcatcaccaccataggccaaatcaatgccaactccaaagccaaagggatgccaccgcctccggtcaagtggaaggacaggtgtgacaataaccaagcatgcaacaacaagttgattgggttcaaaacattcgtagataccagtgatacgtgtgggaattccctgctgcagcgcgcatccgttcttggaatcgagtacgacaaggcgttcgcggtggcgcccaaggcgcacctcgtgatgtaccatgtgtgcgacgaggagtgccaccccaaagaagtaagagcagggatggactccgcggtggacgacgacgtcgacgtcatatcgatgtccttcaatggcaccgaggacaacatggtgttccatgacgatgtcgtgaccgcaccgtggtataatgttgtcgcccaatgcctcttatatgacctcactgtcggtgagttcatcccgtatctatgcgttatgagcctcgatgcggaccggaaatgcaagatcgtggagccgacgcacgcctcgtgcgcggagatcggggagatcgcgacgaaggacctaaactacccttccatcatgatcttcacgggcaacgacgtgtggcaagtggaggcgaagcagtcagtgaccaagccatacatggcccagtgcaagtggcctgggcccctaaaaatctga

SEQ ID NO: 32967 - DNA, 771 bp, Zea mays
  Peptide Sequence Number=SeqID_76342
atggaggttcgctgccaaactagcttttgccagaatgaagatggtttccccaagttgctgagagcatgcacagttcgcctcagaatcaggagccagccagagtatgatggtcgtgaattcgtcgagcatggcacagagaagtgtgtcgtgactgtatacattagatccagtccgcaccatgtggaatggagtgtcactgctgctaggcacagattcaaagacacctgccaagtcattgtccgtaaggcattgagggccctgtgtcagatctatgaagaagaagtggctgacaccccgctcagattctttccgtcctttcagagagatcgtccagtttggatggccaggatgcgtgtcttggaagggcagcagctgcttgaggatgaccccatagtcatgtacctcactgcatacctgctcaccctggatgcccagtatgatttcttggctcggcaccaccgtcagatgattgaccgagcagaagatgcagagaagcgcaaccgcttggataagcaagagcaccccgagtccccccaagatcccccaccagagttgtttgagcccctcaccatgaaaaagattccagcaccgtcccgtgagatcaaggaagaagctgcaagcaccccgccagcaccgccaccctttgaggagctacaagagccagtcccgcttgaagaagagttcaaccccgtcttgccatctcagtcgctgccagaagaagtcatcaacatcagctccctcttgacccatccaggagatgtctcagattga

SEQ ID NO: 32968 - DNA, 300 bp, Zea mays
  Peptide Sequence Number=SeqID_76343
atgccaagaatggctagagatgatcaaactatgtgtaatgaaatactgggaaattatacgaggaaagaagatcaattgatgacagcagccttcggcacccggcccaagcgaaggtgtaaaagaaaaagaatcgtcagcattctgagcagacaagctgctagaatggtaaaggaagacgaaaaagcttcaaagaaaataaaatccactcctgagccgaaagatgttgcttcgaagaagaggaaggctgagagtccaaagccgaagatgaccaaggcagcagaggaaactgagagcacctag

SEQ ID NO: 32969 - DNA, 1536 bp, Zea mays
  Peptide Sequence Number=SeqID_76344
atggaccaggcgcgaagcaagagcggcctgcggtcgcacgggtccggcaaggcttcctcgcggccggggtcggggacgctgggatcgccggaggagcaaccgatgctttccgaccgccgggaagtcgtcgtgaaggtcgatgggaacgggaacgggcacgcgccgttttccttccacggcgcggacgcaggtggcgggggaaaggcggggaatgcgacctccagcacgcactccacggcgaccacgacgccggccgagagcaggccgaggtcgagcgaggcgaactcgcctcggtcgccgcccaaggtgtggcgggaggggagctacgagttctggaacaacgatggtggcggcgccggcgccgccgccaccgaggcgttcagcttcaagaaccgcccgccgccgcaggcgccgcagtcgtcgtccccttcgatgtcgccgacgcagccgccgcggccggaggggggcggcgtggaccctcccacgcggctcatcggcagcttcctccggaggcaggcggcgtccggcggcgaggtgtcgctcgacctcgacctggagatggaggagctcggcaggacggcgcagctgcgctcgcacccgtccttctccagctcgctcgagagggacggccgcgtgtcgttccaggaaccccagaagagtcactccacctcgtcctgttcctccgactctgacaccgacgacggccggaagcgccgcggcgacgacggcgaggtcgtccggtgcacgtcctcgtctaccgcagcgggaacggggccgttgctgcgagtcaagacgcgctcccggctaatggacccgccgccgcagtcgcagcccgcgccggcaccggcaccggcgccggcatcggtacctgccgcgtctcctgtcatcgacgaggagcggaaatcttcaggcttgcggacacctaccaagtccggtcgcctcttctccgggcttatgcacggcaacaagtccggccccgttggtggcaagtcaggtcccatggacgacgacgaggacgacccgttcgtggacgaggacatccccgatgacttcaagcgtgggaagtttgacgctttgaccgtcttgcagtggctcggcttgttcctcatcgtcgcggccttggcatgcagtctcagcataaagatcttgtccacgaagaaagtgctgggtctgcacctctggaagtgggagctcctcgtgttcgtgctcatctgtggccgtctcgtctccggatgggtcatcaggcttgccgtcttcggtgtcgaacgcaacttcttgctgaggaagcgcgtgctctacttcgtgtatggcgtgcgcagcgccgtgcagaacgctctctggctcggcctggtgctcgcctcgtggcacttcttgttcgacaagaacgtccagcaggagacgaactctccagtactgccctatgtgaccaagatactattttgcttccttgttgccacgctcatccgccttgtcaagacattgctgctcaagattattgattttgaatgtgtaaatcgtgcaggtgaatgcatttag

SEQ ID NO: 32970 - DNA, 324 bp, Zea mays
  Peptide Sequence Number=SeqID_76345
atgacttggttgtgggctggattaatagcgcgtcgccggtttacgctggcggtgctgctcgcgggacggcggggcggaaagttccggaacaacgtggagcagccgcatgcctccaacgctcgtctgcctttatgcctgtcctcctgcctcgcattgatccgggcgccggggccgtgtggtcagcgtgtgtcgtgggggcgcgcgcactggcgcctgctgcgaccgagcgccgcgccgcccgcacagtccacagagcacgggttgggtagccacgtcgcgtacgtggcatggcatggcaggggttcggtgcaaggctgcgattag

SEQ ID NO: 32971 - DNA, 834 bp, Zea mays
  Peptide Sequence Number=SeqID_76346
atgtcttcgcgctcccttatgcatcgtgtctttccaccttccaagcccccggatgaaggatacccgccgtctttccgcctcatcgttggaggaacgcaactccgtgggagttgcccggctgcacccctccgccggcggtcacccaagacggtgaccaccagcccctgggtggggagaagcaagccgggctgcgatcttggtcccaccctcagcttcaaggatgttcatcatcctcgctggggtggaggccgggctgagccggagctctacctcccgcgcgggttcgtgggtcaccctctcctgcggcgttcgagggggagggcgctcactggccccgcgggcgggtcggacttcgacaacgcggggctagtcgacggcgggcgtcgccagcctcagcgtgtcgagctcgtcggcttggcccccggtgccccctcctgccggaaggcagctgccgcgccgtgtcggtgccccactcgtccgggaggatctgagtggggatctgccggagggctgacggcccctgtcgtcggtgccgaggtggaggcggctcgagaagtccccgtcgccgacgggatcaccgccaccatccgcgcttcgggcttccggctctttgtacttgtcctcgctcctcgagcgtcggcgtgggcgagggcaagattgcagcagcacccgccctggggcttacgctgctgcagttcggccacccggagcggggagccgcccgagtccctcggctcggtcggccttgttgtccgaggcttctctagcttagttaaagggaccccttggccgctcttcgatgagccgaggccaggggtagcggtatcagcatga

SEQ ID NO: 32972 - DNA, 1395 bp, Zea mays
  Peptide Sequence Number=SeqID_76347
atggaggcccaggcccacgcgtcatgcaaccggcgcgccgaatgcttcgtgcatgcaactgcacctccacttgcaaccagacattatgctttccgtttgcatgaagagccgcctccggaactcgccagtctcgggaattcacttcagccgctccgctataattcaccggactgtccggtgtacaccggactgtccggtgtaacagcggagcaacggctatttcggcgccaacggctacctgcgacgcatcaaatgcgcgcgctgcgcgcgcagacgtcaggcgtgcccatactggcgcaccggacaatgaacaggacatgtccggtgtgcaccggacatccaggcgggcccagaagtcagaagctccaacggtcagaatccaacggcattggtgacgtggctggggcaccggacatgtccggtgtgcaccggactgtccggtgcgccatcaaacagacagcctccaccaacggtcaaggaccgggaaagggggataccccgaaaaggatccttccccgtgaaggaaccaggctccgagcctccctactgatcagaggttcgaaagctggccccccagaagggttcgacagccgcctcagatcgcgtgggccctacacccactactggtcagaggttcgaaggtcggcccctcggaagggttccacggccgcctcaggctactcgggctccgcgcccattactgatcaggggttcgaaggctggcccccgaaggcggggaacgatcttgtaatggaatcccatcggagggaggcatcgagccctcggaccccgtcgctaggggaccggggtccggcagatcacccgcagaggctcgggggctgctcttgcaaacccggctccggccgaactgttgacagcgtcaacataccagcccgagaacttgggacccgaccgtacacccgggctacggccagctcgcatgagggaacaaccagaccagccgaagcattacgcaaggcattaagacctcgaaggagtgaaaccactccttcgaggcctcgggggctacacccggcgggtgcgctcgcgcgcacccaccggaacaaaacgcaaccgagaaaggctggtccccttgcaaaaaagtgcgacgaaagcctccaagcgagtgctaacactcccttcgaggctcgggggctactgtcggggaccataattaggggtaccctcaaggctcctaattctcagctgggctcggactcgggctcagccccagaagacggcgaactccgctccgcccgacgcagggctcggactcgggctaagtcccggaagacggcgaactccgctccgcccgacccagggctcggactcgagctaagtcccggaagacggcgaactccgctccgcccgacccagggctcggactcgggctaa

SEQ ID NO: 32973 - DNA, 321 bp, Zea mays
  Peptide Sequence Number=SeqID_76348
atggcgcctcctgttgacgtggctggtctgcgccctaggttgggcgatgtggaagctcctccaaagccgaggtcgagtctgccttccgtggtcgaggtcgagtccgagcccctgggtcgggcgaggcggagttcgtcgtcttctagggctgagcccgagtccgagccctgggtcgggcggagcggagttcgccgtcttccgggacttagcccgagtccgagccctgggtcgggcggagtggagttagccgtcttccgagacttagcccaagtccgagccctgggtcaggcggagcggagttcgccgtcttccgggacttag

SEQ ID NO: 32974 - DNA, 222 bp, Zea mays
  Peptide Sequence Number=SeqID_76349
atggcggagccggggctcgaggacagccagccggtggatctgtccaagcacccctccagcatcgtccccacgctccagcttactcctcttggcgaacctccttcaccaagagctgcacatgtagcaactgctgttggaaccatggtggtcattcagggtggaattggtcctgctggcttatccgctgaggaccttcatgttcttaatcttaaacaacaatga

SEQ ID NO: 32975 - DNA, 1266 bp, Zea mays
  Peptide Sequence Number=SeqID_76350
atgggcggcttctggcaaatcttcgtcatgttcggactgcactggggcctggtgccgctgtgtatcaataacttcaccgtgctgggctacgacaccatgatcccgctgttaatgcccgccattatggcgcaggtcggggcggcgctcggcgtcttcctctgcgaacgcgatgcgcagaaaaaagtggtggcgggatcagcggcgttgacgagtctgtttggtatcaccgaaccagcggtatatggcgtcaacctgccgctggggctttgggggccaccattattggctacgcgcaaacgaaagtctactcctttggtttgccaagtattttcaccttcatgcaaaaccatcccgtcaacgggaattgatttcaccgtctgggccagcgttattggcggtgtcattgccatcggttgcgcatttgtcggtacggtgatgcttcatttcatcaccgctaaacgtcagccagcgcagggtgccccgcaagagaaaacaccagaggttattacaccacctgagcagggcggtatctgttcaccgatgacgggagagattgtgccgctcattcacgtcgctgataccacgtttgccagtggcctgttgggtaaaggtattgccattctgccctcggttggtgaagtgcgttctccggttgcgggtcgaattgcttcgttgttcgccacattacacgccattggcattgagtcagatgatggtgtggagatcctgattcatgtcggtatcgacaccgtaaaactggacggcaaattcttttccgctcacgtcaacgtgggtgacaaggtcaatacaggcgatcggctgatttcttttgatatccctgctattcgcgaggccggatttgatctgacgacgccggtattaatcagtaatagcgatgattttacggacgtattaccccacggcacggcgcagataagcgcagctgccaatcaggtggaaggtgcctggcaggaagatggcaaagggatctcgacctcagatttacagcctcatggcgtaatgggaaaaatggaaccgcgcatcctggggaaagagaatatcaaagatgtcgccatcgatttttatcaccgttacccggaagatatcgcgttatttgccgagatgggcttcacctgtctgcgtatttccattgcctgggcgcgaattttccctcagggcgacgaagtcgaaccgaatgaagcggggttagcgttttacgatcggctgtttgatgaaatggcgcaggcgggatcaagccgctggtaa

SEQ ID NO: 32976 - DNA, 159 bp, Zea mays
  Peptide Sequence Number=SeqID_76351
atggcgctccacaagctctatgacgacggcggcccccagctctcttacggaagcaggacaacctacgacatgacacttcttccaccgccgcgcgactacgacatggcggccgacaacccgcccgctggcggcggaatcgacgacgtcttccccgcgtga

SEQ ID NO: 32977 - DNA, 678 bp, Zea mays
  Peptide Sequence Number=SeqID_76352
atggacgagggttgcactcaacccctttcaagtgatccaatgatcaacttgaataccacactggtaacccccatcagcacaaagctgcaaaggcctgatgggcgcgattcaggtcaaggctccgtccactcaagggacacgatctcgcctcgcccgagcccagcctcgggcaaagacagccgactcaggaggattcacgtctcgcccgaggggctcggactcaacctcgacaccggaagacggtctccgcctcgcccgaccccagggctcggactcaacctcgacctcggacgacggactccgcctcgcccgaccccagggctcggactcagcctcgacctcggacgacgatctccgcctcgcccgaccccaaggctcggactcagcctcgacctcggaggagcctccgcctcgcccgaccttgggctcggaccgaccacatcacagggggccatcattaccctacccctagctagctcaggctacggggaacaagaccggcgtcccatctggctcgccccggtaaaacaggtaatgatggcaccccgcgtgctccatgacgacggcggttctcagccccttacggaagcaaggagacgtcagcaaggacccgacaaccccgacagctatgctttcacagggctcaagcgctcctccgacgaccacgacatcacatga

SEQ ID NO: 32978 - DNA, 738 bp, Zea mays
  Peptide Sequence Number=SeqID_76353
atggccatcatcggagcaatcggagaggcagtagtcacatgcggtcatgaagtcctgcatggcactgggtcaccgagcccagagaaatcccaaccagagtcgggctcgtcatcttcctcggaacccagaggcccgtacgaggctaacgcccagcaagcccttcgcgagcgtgctggcgtcatccgtctgcttggggttggtgtgttgcggggaaatgacgctcgtcttcgtctcagacacgaggtcaacgcccgtcgtgtcccccgctggggcgccggctctgtcgactcgctcgacagccgacgaggtgccgcctcctgcttggccatggctgccccgcctcctcctccgtcggcggggaaggtgacgggacagacccggatgttgctcttccgccacgtggggaagacatcgccgattccgcagacgggcgggctgacggccgcgattgtcgtcgtcgcgcggcggaggaaggagtatcatgtcgtagctgccgtcgagggacatgaacttaagactcccgaaacggagcagcgtcctgggctggagaggttgctggagactacccatctggagcttgacgggaagttgttcgtcaacacgcagcaggcccctacctggcgcgccaactgtcggcgtttcgaccccggggggtccctggaccgacgagtaaattgtcgctgcgtgtcccagcccagatgggtcggcgcgagatggaacacaaggggaaaacaataa

SEQ ID NO: 32979 - DNA, 768 bp, Zea mays
  Peptide Sequence Number=SeqID_76354
atggcgcctcctgtcgacgtggatggtctgcgccctaggttgggcgatgtggaagctcctccgaagccgaggtcgagtctgtcttccgtggccgaggtcgagtctgagcccccgggtcgggcgaggcggaggccgtcggctgaggccagggcggagtccgagccctggggtcgggcggagcgaagttcgtcgtcttctggggctgagcccaagtccgagccctgggtcgggcagagtggagtccgtcgtcttccgggacttagcccgagtccgagccctggggtcgggcggagcggagttcgccgtcttccgggacttagcccgagtccgagccctggggtcggggtggagcggagttcgccgtcttccggggtcttagcccgagtccgagccctggggtcgggcggagcggagttcgccgtcttccgggtcttagcccgagtccgagccctggggtcgggcggagcggagttcgccgtcttccgggtcttagcccgagtccgagccctggggtcgggcggagcggagttcgccgtcttccgggtcttagcccgagtccgagccctggggtcgggcggagcggagttcgccgtcttccgggtcttagcccgagtccgagccctggggtcgggcggagcggagttcgccgtggcgcctttggcaaggcctgattgcctgtcagactcactctgtcgagtggcactgcagtcggagtggcgcaggcggcgctgtccttctgtcagactggccagtggagcggtggagtga

SEQ ID NO: 32980 - DNA, 1449 bp, Zea mays
  Peptide Sequence Number=SeqID_76355
atgcgggcgctccccatccgggggctcggaaggtggaaggacgcgatgcatgaggggagtgcgaaggcatggctgccatccaagggggtcgccccctttttaaaggcgactctccccacttgcatcctcagccgtcgcgggctgagtcttcaccaacacgctccaaggtcctccccctacgacacgggggctaggtcccacacgtcatgcaagctggcccaggacagaagaagcaaactgccacgcgcggagcgcgtagctgcccagcggttacaagcactcctccacttttgcccagaccagcgggtgaaagggcggaccgccatgcaggcggcatgcaactgcaccaaggggatgcaccctttcgactttggcgcgtccagcatggaagcccaggcccacacgtcatgcgagcggatgcagcagtcaaatcgtctgcaggctcacgtcccctcctgggacagcgagagagccctctcccacggcgtgaagaccacgcgcccatgttccgtccctcgaacggctcgcgcatgcacaacggctgccccgccaaccactcgtcccgtcgcattaactctgcggcagggcaggcgacacctttggcaggcaaagcgggcgacgcttcacctccgccatgatgaccgcgtcaaaaaagggaccgggaaaggggatactccgaaagggatccttctccgcgaaggaagcgggccccgagccctcctactgatcagaggttcgaaggctggcccttcggaagggttcgacagccgcctcagagcactcgggctccacgcccactactggtcaggggttcgaaggttggcccctcggaagggttcgacagccgcctcaggccactcgggctccacgctcactaccgatcaggggttcgtaggctggcccccgaagggttcgatagccgcctcagaacacgcagagcgagggatgactctgggtacatccgaggccgaggctcgggctacgctcccgaggtcaaggctccgtccactcaagggacacgatctcgcctcgcccgagcccagcctcgggcaaagacagccgacccaggaggattcacgtctcgcccgaggggtgaggctgatagcctccaagttcggcctcaggcgccataggaagctccgcctcacccgaccccagggctcggactcaacctcgacaccggaagatggtctccgcctcgcccgaccccagggctcggactcaacctcgacctcggacgacggactccgcctcgcccgaccccagggctcggactcagcctcgacctcggacgacgatctccgcctcgcccgaccccagggctcagactcagcctcgacctcggaggagtcaccgccttgcccgaccctagggctcggactcagcctcgaccttgggctcggaccgaccacgtcacaggggggccatcattaccctacccctagctag

SEQ ID NO: 32981 - DNA, 507 bp, Zea mays
  Peptide Sequence Number=SeqID_76356
atgtccggtgctccaaggaagcgcggtcttcggaactcgccagcctcgggttcgcgtggcagccgctccgctaaaattcaccggactgtccggtgtgcaccggactgtccggtgtaccagcggagcaacggctccctgcggcgccaacggctccctgcggtgcatttaatgcgcgcgcagcgcgcgcagaagtcagaatcgcccataccggtgcaccggacatcaaacagtacatgtccggtgtgcaccggacacccaggcgggcccacaagtcagaagctccaacggtcagaatccaacggcagtgatgacgtggcaggggcaccggactgtccggtgtgcaccgggactgtccggtgcgccatcgagcagaaccctccagccaacggtcaagttttggtgggtccggtgcaccacctaaaagtccggagccccttattgcataccctcatggcagtctcccacaaatcttctctttgctacttccgtctaccactgattctataa

SEQ ID NO: 32982 - DNA, 330 bp, Zea mays
  Peptide Sequence Number=SeqID_76357
atgacagccgccatagcttcgggctccagatcccagcgccagcgccagcgccccaaaggtccagggtttagggttggttctcctacgtttcaacctcgaggtatcaatgattctgaggcatacgacatattttttgcgacatggatgcacccgattttccctgccctcttctatgcctgtgaaagagtcatcaggaaatttcatgagaacgactaccattcaggtattgtgaggcaccccttctctataactctggcaccaggagataactacttgactgtgcatatccgcacgctgggtgaccggacatccaaactttcgattctctga

SEQ ID NO: 32983 - DNA, 183 bp, Zea mays
  Peptide Sequence Number=SeqID_76358
atgatgtggtcccaggttaggaccatggtgaagccagggtgctcctgggagatcctgaaggcggcgatcagttccatggtgtcggtgacggatgtgctgactgtgatgtcccaccccctcaacgccgagctgcccctctaccatttcaagctgcatatattcaacattatgaatgcatggtaa

SEQ ID NO: 32984 - DNA, 489 bp, Zea mays
  Peptide Sequence Number=SeqID_76359
atgggaacaatgggcatctcgacctcgacacgggagattattccggacaggagaagctttttggaaaaacaggccaagcgcggaccgtccgggcccttgcagcggaccgtccgcgacacaagaatgaccctcggacagaaccaatgcaaaaacacaagtttccactacggactgtccgaaggaaaagcaaagaccgtccgagctctcgcgcggactgtccggcctcaggcgcggaccgtccggtcgccgttgatctacaggggcggactgtccgcaccaggagggcggaccgtccgcgctcagcagaatggcccaacggctaggaagtggttggtggctataaatacaaccccaaccacctccattcactacacccaagcattccaaccttcaacattcaatacaagagctagcaatctattccaagacacattcaaagcctccatctctccaagttttcaattgagaaaagagatcattagtgattag

SEQ ID NO: 32985 - DNA, 372 bp, Zea mays
  Peptide Sequence Number=SeqID_76360
atggctagtaccttagcaacacgaagttgcgagtacatcggaaggtgccaaaggttcatctataactatacgaaatcgactgtccggaataccgtagattattccggacaggagaagctttttggaaaaacaggccaagcgcggaccgtccgggcccttgcagcggaccgtccgcgacacaagaatgaccctcggacagaaccaatgcaaaaacacaagtttccactacggactgtccgaaggaaaagcaaagaccgtccgagctctcgcgcggactgtccggcctcaggcgcggaccgtccggtcgggggcgggactgtccgcaccaggagggcggaccgtccgcgctcagcagaatggcccaacggctag

SEQ ID NO: 32986 - DNA, 450 bp, Zea mays
  Peptide Sequence Number=SeqID_76361
atgggcaagaacaacaagcgcaagcgtgagccgactcctccatcggaggagtttggtgactcggaatactcggaggaggagttctcctccgagtccgaggggtctccggctcccgtctctcccccggcgtcgtccgatgactcggacgactcccaggggatagccgcagaggtctggacgtacatccgggccgtcgagcgcgccgggctcgaaggctcggatgagtcggagtgctcctcggatgaggaggactcggacggcggcgacgagggtgaagacgacgacgacgacgacgacgacgacggcggcggtggcggcagtggcagtggcaggggcggcggtgatggcagcagggacagcaccaagggcgacagcaggggcagcaccaagggcggcggcaggggcagcaccaagggcggcggcggcggcaggggcagggccagtggctag

SEQ ID NO: 32987 - DNA, 57 bp, Zea mays
  Peptide Sequence Number=SeqID_76362
atgaccactgtcggcatgtggcccaggcttggagctagaggacaaatttgcttctag

SEQ ID NO: 32988 - DNA, 399 bp, Zea mays
  Peptide Sequence Number=SeqID_76363
atggcacccaagagagctagttcgaaggcagccccatctgtcgacgaagcagcaaaggcagcattgctaggtgagaaaaagggcaaggccctcgcagatcacaccccccaaaaagcctgcgaagacgaagttctcagcaagagtcagtgcaacgaacaacccactcctgaaggcaccctacgcaactgcagctccggaggacaaccacaagcaccacacccaggcttcgctccactagagggcgaggatgcaatagaggacggcgaagtcatcggcgtctcagcagaagaacagctacagctacgggccctgcgcatcaagaaccgcaacctccaaaagcagaaagaaatcctcgaggccaagcgccaacgtgtctccgcgcaagccaaggtgcactag

SEQ ID NO: 32989 - DNA, 315 bp, Zea mays
  Peptide Sequence Number=SeqID_76364
atgggggagaatcctaagaaaggcctcacacagatattcatgggtatcctctgtcggaacggtgacgccgcgggaaatctgccaagagtagagctcttttggaagcaaaaccccaacgtcaacgagatgaaggaggtcggattccaaaatgatagacatatggttaccagcgaatggcagctagctgttggggtcgataagcgggatgatcgcagcaacggtgctctgcctcttccgcttcggcgccatcgcaatctttccggtggaacgagcaggatcgagatctcagggaagcagaggagtggttcgaggtga

SEQ ID NO: 32990 - DNA, 486 bp, Zea mays
  Peptide Sequence Number=SeqID_76365
atgggcaaaggcaagagaggtcgaggctcgcctcgtcgtgccggtgacaagcagaagcgcgatccaagtcctccctcaatggacttcgtcgattctgagtactcggagaaggaggtttcctccgagttcgagggatcgctggctctcgcctctcccccgacattgtccgatgactcggacgactctcaggggctggccgctgaggtgtggacgtacatccgctccgtcgagcgcgccggactcgaggggtcagatgagtcggaggtctcctcggatgaggagaactcctttggctcgtccgaggaccaaagcagcaacgacatcgacgatgagggcgatggcggcggcgatgacagcggcgacggcgacgacgacggcggcaagggcggtaacggcgacaacggcggtgacggcgatggtggcgacggtggcggcaaggacggcagtggcggcggcaaggccagtggcaaagcgccactggtttaa

SEQ ID NO: 32991 - DNA, 717 bp, Zea mays
  Peptide Sequence Number=SeqID_76366
atgagcgacgggtggtccggcagcgtggacctcctcacgaggcctcttctcccaacgcctgtcgggttgcgggttcgcgtcgtgctgcggtgccgatggtgcagtttttgttcctccgatgaggtcctaggcccactcgttagcggtgatgtagaagtccgcctctcaacacagttgttcggatatggtcagcgctttctgcagtatggctcggacgaaggccgaatcattagatccctgatagaagtcttcaatcactgctgcctcagtgacctcagggatacgatttctcatggtctaaaacctcttgagctgaacttcaacttcaaccggggtccagggcaagttcaaccggggtccagagaggttcaaccggggtccagggcaagttcaaccggggtccagagaggttcaaccggtgtccagggaaagtttagccgggatgttgatcctagggcaatagatcttgccatgagaatcgccgaaaggatgttcctcaaaatgaaggaagatgaggcaaagaacaaaattgaagaagaaaatgatcgatggagaccaaacgacgaatccacctcttcacaaggttcgtctttcaaatccacttctcatatgtgctttgtcggtaatgggagtgacagtgaaagcgaaagtgaggatgaggaggagcaagaaagtgatagtgaagatgaggattatcttcaacaattcttcgcttag

SEQ ID NO: 32992 - DNA, 468 bp, Zea mays
  Peptide Sequence Number=SeqID_76367
atggagaggacgaacggcaaccgcgccatccgtcacacgttcgttgatgtggcgacgcgacgaaggcttcgcgcgaagggtagcatcttcgccttcgccccaacaacagatcctgaatcccctacaacacaaggcaagccccgatggaatgggatgttttcaaaaataaaacttgatggtggatccatcatggtcatgatgggttcaacatcggacaagatgtacctctgccagggtcgtaccgatgtgggcctgctgaccgaggaccctttaactggtcacatgtctagtcatgggctcacagtgtttgacgtcgatctcctgaccgtggcagccctgctcttggctacgctcgctctgccacttcgatgccccacgacgctggcacatatggctgaatggagggtagcagccagcatctatagtgccaaaaccatcaagggcgaggaaaatcagctcggcccgtaa

SEQ ID NO: 32993 - DNA, 249 bp, Zea mays
  Peptide Sequence Number=SeqID_76368
atgccgactacttgttctctgaacatgttgggtgccgtttatatagacattgcaaataacggttgcgatctatccattgatcttacaggctcggaccgtctggggcgccgttttccgccgtccgaaactacccaggcgccaacacccatcaaagtgaccccgcctgcaccaagctgtccccaccgtgtctgtgctcgtcgtctcgtcatcgagaatatcaagttaatcgaaactaagcagttgttttaa

SEQ ID NO: 32994 - DNA, 930 bp, Zea mays
  Peptide Sequence Number=SeqID_76369
atggcggcagccgacttcgccgaccatgtcgtgtcgggtgctctgacttcggagtttgctgctgaaatcgagcgtctttgggcgcagcatacggatgctgttcaggagaagtcggctgcggaaaacaaaagtcgcaggctgacggagaggctgcacaaagccgaggccaaagcttgcgcggggcggaggccagtctcgcccgccaacgcaccgaggagctggaggcgaggctcaaatagcctgcgcaaccgcgtggacaaaaccgaggtctcgacgcacgcggaggttgagcgaacgcatgcgcagttcgtggacgcgtaccgggagctaggtgcgcggaccgccgccttcgaagcacccggccaaaaggtggtcctccgcttccttgagtggttacaagaggagctaggggtgctcccgaccatcgtgacgggcctcatgtcctttgcctccctcgtcacctgtgaggggggcatgaatgctttgtcccacgaggggtgcgggcacttcgagatcttcgaccagtcagacgaaggcttcgaacgcgaaatcctccaggtcgaggacccggcgctaaagcggttggcgggggcgcttttcgacaggatgtggggccctcacggccaagagacggtctgggagaggtccgaccgggcgatagatcaaatggcgcatgacgaagaggttcaggaccttggcgatctggacagcacgctgcccgatagcgcgctgcccgaggcgtcggggtggagctggcgccgccatccgttgcggggcgagggcccctcggtgacccccgcgccgactggagttggcgaagaccccgcgctagcccccgcgctgacgggtgaggacgtctcgaagacggtgggcgaaccagctgccgaagaccccgcggcggcggtcgggccttcacaggtggcggaatag

SEQ ID NO: 32995 - DNA, 1395 bp, Zea mays
  Peptide Sequence Number=SeqID_76370
atgagagctcagacagttcagagtgagagagctcttccatcagctgctgattcggactccagtgttgatcgccttgatcttgagcatgatattcaaaaagagtgtattgaaaaggacaaagtccgtaatgcctgccacgatcagcatagaggagattataaaaggaacaggatgaatgacgaatatgaaaacgaagatttggatgcagaacaatctggtcccaaatctcaaagaaaggtggagggtactggtgatgatacaccaggggttgttaccatgtcctcattcaattgtaacgagggggacaacgatcctgaggaagagtctaaagttaggaatgataacaagaatgctataatgcattctgccatgagagctcagacagttcagagggagagagctcttctatcagctgctgattcggactccagtgttgatcgccttgatcttgagcatgatattcgaaaagggtgtattgagaaggacaaagtccgtaatgcctgccacggtcagcatagaagggattataaaagaaataggaagaatgacgaatatgaaaatgaagatttggatgcagaacgatctggtcccaaatctcaaagaaaggtggagggtactggtgatgattcaccagggattgctgccatgtcctcattcaattgtaacgagggggacagcgatcctgagaaagagagatataatgaaaggggaaaatctgaaagagtattgaccttcaattctaaggaaggagcagctcatgaagctagtacattccctagcaaagagaagtataacttatgcaaaccaatatcagagcttgatctgtcaaattgtcagtggtgcactccaagttaccgacttttgcctaaaaactatccagtaccttctgcaagcaaaaggactgacattgaagcttcagtgctgaatgatttctgtgtattggtgacctcaggaagtggagcgtttaagcatatgcgcaaaaatcagtatgaagaaatcttgtttatatgtgaagatgacatgtttgagctggacgtgctgttggaatctgttagtgttacaattaagcgtgttgaggagttggtggaaagtatggaaggcaactcactgaaacctgatagctctatccacctcgatgaacatttgactagtttgaatatgaggtgcattgagtggctatatggtgaccatggacttgatgttgtggatgttcttcaaaaaaatgctggtgtgacattaccagttattttaaccaggctgaaacaaaagcaggaggagtggtcaatgtgccagtcagattttaataaagtttgggctgaagtatattcaaaaaattatcacaagtctcttgactacggcagtttctattccaaacaacaaaacacaagaatctga

SEQ ID NO: 32996 - DNA, 723 bp, Zea mays
  Peptide Sequence Number=SeqID_76371
atgcgagagacatgcaacaacaccatggttgtgcaccctttcggcttcgtcgcatccggcggtccagcatggaggcccgggcccacatgtcatgtaaccggtgcaacggttactgcgtgcaaggaaaccgcactgccactcatgccaatgtcgcgtctactcgactgcagaaccagtgccgcgactcgaggcagccctgcgcgtgacccaatagtgccagttgagtgccacgatcacgaggcaagcgacacctccggcaggagaagcgggcgtcgtttcgtctccgtcatgatgatcgtgtcaaaaaagggaccgggaaagggggtatttcgaaaaaggacccttccaagcgaaggaaacgggccccgagccctcctactgatcaggggttcaaaggttgcgccctccgaggttcggcaaccgccccagagcactcgggctccgagccctctactgatcaggggttcgaaggctggcccctcggaagggttcgacagccgccccagagcacgcagagtcagggatgaccctgggtacgtccgttacatggccgaggctcgggctacgctcccgaggtaccctaggacatttccgagaccagcaagaacgatttgtaacggaatcccaccagagggaggcatcgagccctcggaccctatcgaatgggtccgggtccggcaaatcacctgcaggtacttttggagcgcgcctctgggccactag

SEQ ID NO: 32997 - DNA, 948 bp, Zea mays
  Peptide Sequence Number=SeqID_76372
atggcactgggatcactgagtccggagaaatcccaaccgaagtcggagtcatcatcttcctcggaacccgcgagtccggaggctgagatggccgtcagtcggtcccaagatgaccacatatggtaccccggaaggttagggtacgaggttaacgcccagcaagtcctttgcgagggtgctggcgtcatcagtccgctcggggttggcgcgttgcggggaagcgacacccgtcgttgtctcaggtgcgaggacaacacccgacatggcccccgcaggggtgccggcgtcatcgactcgctctggcccgacagccgacgaggtgccgcctcctgcatggccacagttgccccgtctcctcctcctccggcgaggagggtggcggggcaaacccgggtgttcctcttctgccacggtgggaagtcgtcgtcgtcgagatcaccgctgccgggcgagccgatgaccgttgttgctgtcgcgctgtggggggaggagtaccatgtcgtaactgccgtcaagcgacatgaactcgagactcccgaagtggagcagcgtccccggctgaagaggctgctggaggctacccatctagaactcaacggtaaagtgttcgttaacacgcagcgagcccctatctggcgcgccaaccgtcggcgtttcggacccgcgaggaccgtcaaccgactaagaagcaccttgagccctgtagacgagctaacgtggccgtcggagaagttccttgagccctgtagaagcacagctgtcggcgcggcgtggatcctgctgacattgtcttgcttccgtagggggtcgggcgagacggagacttctcctgaggccgaggctgggctcgagcgaggcgagctccctgttgcgcccgaggccaaactcgtgggagatcgtgactcagttatatcctggtggttggcacagttgccggagcggggctaa

SEQ ID NO: 32998 - DNA, 792 bp, Zea mays
  Peptide Sequence Number=SeqID_76373
atgcaggcggcatgcaaccgcgccaagtgggcgcgcttctccgactcccaacacgcccagcatggaggcccaggcccacgcgtcatgcaaccggcgcgccgaatgcttcgtgcatgcaactgcaccgccacttgcgccaccaccgcacctcctcgactgcggaaccagtaccacgactcgaggcgacccagcgcacgacccagcagcgccagcctggcgcggcggctcgggctgcgctcccgaggtaccctaggacatttccgagaccagcgggaacgatcttgtaacggaatcccatcagagggaggcatcgagccctcggaccccgtcgctaggggaccaggtccggcagatcacccgcagaggctcgggggctgctctcgcaaacccggctccggccgaaccgttgacagcgtcaacataccagcccgagaacttgggacccgaccgtacacccgggctacggccagctcgcatgagggaacaaccagactagccgaagcattacgcgaggcattaagacctcgaaggagtgaaaccactcctccgaggcctcgggggctacacccggcgggtgcgctcgcgcgcacccaccggaacaaaatgcaaccgagaaaggctggtccccttgcaaaaaagtgcgacgaaagcctccaagcgagtgctaacactcccttcgaggctcgggggctactgtcggggaccataattaggggtaccctcaaggctcctaattctcagctggtaacccccatcagcatgaagctgcaaaggcctgatgggcgcgattaa

SEQ ID NO: 32999 - DNA, 534 bp, Zea mays
  Peptide Sequence Number=SeqID_76374
atgaaactgctccgatggctgccgatcaagatggtggacaggctcctgctcctggtggcgaggatggtcctgggtgacaccgagaagcacgggctgaggaggcccaagctaggcccgctggagatcaagaacgtcaccggcaagagccctgttctggacgtgggagcatggtcgttcatcaaatctggaaacatcaagatcgtgccagaagtggagtcattcaccggcagcaacggggtgaggttcgtgaacggcgacgagatggccttcgactctgtcatcttcgccaccggctacagaagcaacgatgacggcgagctgttcaccgaggacggaaaggcgaaagctgagcagccgagcgacgacgacaggtggaggggtcccaacgggctgtaccgcgtggggttctccggccagggcttgctcggcgctggcgcggacgcgctgagggccgccgccgacatcgccgggaggtggcaggcggaggtggcagcagcggtggctggagccaaggtttcctcggcctcggtgtag

SEQ ID NO: 33000 - DNA, 345 bp, Zea mays
  Peptide Sequence Number=SeqID_76375
atggcattcgaggttgccatcgtcggccaccagctaagctccaccctcgacctttatggagacggcttaggtcgctgcccaaatgaagagaccgacgtcaatcgagaagtagaaagggcgcccccacaccatctacccataagcccggtgtggtcggccctcataaacctggtctttggcgtccatcacaaagctctctatgtatccggttataaaggttcaccaaagaggaaggacaaaacatatcaaaggcgaatcaccaagaagagctatgtccgagtcagtccagcgctacagaaccgtctagaagaaacagtcatatcttttgattcccaaaagctatga

SEQ ID NO: 33001 - DNA, 1425 bp, Zea mays
  Peptide Sequence Number=SeqID_76376
atggaggtgaaacatgatttcatggacttcttgcaggggccgagcaaggaagagatggagttgttggatcagctgaacatggaagcgactgaagttgagaaagtcttcagtcgctcactaccattgaggaagctaaggcctcatcccttccacagttccacggctacgccgccgtcgtcggctcatccctcctccccctcccgcccgcagttccaggtggtgcacccctcgaccccatcagactcgatctgtcgtttcctggctcccttaggtcccctcttcgccaccactccgccgcatgctccccaaatccgccgctctatgggtgcatcaggtctcgctgccagttccaatggagggaataaatgggcaaaggcggccaacgaggaagctacgatgacggtggtggctgtggagtcagatgagcctaggacagaatcgccgttggagcggggaacaatcatctacaacctcctcgtcacgctcccctttccctccggcctgatctcgcgcctccgccgtgcattcctcctctgccgcttcaccaccgacctggtctctagatcctccctccacatgctccaactcctggtacaagagtgcctgaggtccgctatcgacctgagctccgctcaggtcgccgctaccactgataatcggcctccagcccactgctttacttttggcgacgagtcgacgactgggcaactaccgctgcccaaggattgggtcttcagcaagtttaatcgcccgatcaacctcctcccggagactgtggggtttcttctccaatctttcattggtggcgcgacggacttattcaaggtttctcccctgtcggaccgggtctttcgcttctcgctttcttgcaaggatgtcggattcgcagtttatcagcttcgttcttatgcctgctccacattcaaagcgtatctgcacctctggaattctggcagcccaaattggatcaaagaatggcagcgtttctctgaggaagaatcaaaatcttggaagttggtttcttatcgccgttcttcgccggtttcgtttgctgatgtcgttcgtaagccagctctgtcaggtgcaaacttggtgcctttgggtcgtccggataggcccaaacgttcttcttcaagcttaaggcagcggattttgtccccagcattaatggctctgccggcccagcggcgaagggctattgtcatatttgggatcactctttttcagaagtgcaagcggtcttttggctccttccccaataagtttgagaatgcttcctggcggctcttcaccttccacggaacttgcactgttcacaaaaccccatccctccccgctgccgtggaagagtccgccaacttcaagctcttcgtggcacgtggtgctttcgtcgccttcgcgatttgctcctctcaaaaccgctga

SEQ ID NO: 33002 - DNA, 492 bp, Zea mays
  Peptide Sequence Number=SeqID_76377
atggagtcttggtgcttagagttgatcaaagaatgcttggtgttctcctccatgcgcctaggggtcccttttatagccccaaggcagctaggagccgttggaagcaatccaggaaagcaaatcttgccttctgtcgggtggcgcaccggacagtccggtgcaccaccggacaggcactgttcagtgtccggtgcagattgctttcctaatttggcgcagtcgaccgttgaagatcaggagtcgttgccgcaccggacactgtccggtgcacaccagacagtccggtgcccccatccgaccgttgccttggccatgcgtcacgcgcggattgcgcggccgaccgttggcgtgcccgaccgttggctcaccgaacagtccggtgcaccatcggacagtccggtgatttttagccggacgctgatgactgctttcctgagagcgacgacttcgccgcaggcgacgcaccggacagtccggtgcaccaccggatag

SEQ ID NO: 33003 - DNA, 663 bp, Zea mays
  Peptide Sequence Number=SeqID_76378
atgattagctgcctgagtgagcagccgttgatagccctcggcgtctggagtcccgaaggaggccatcagctttctgagccaatactccaccaacctcactcggctgcgctgagtcccgttctccagcttcgtgatgtcatcggatatttcggcatcggttcctttgtcggcgagattcccgctgaagagaggtaccagaagagcagcttgacaatcctttaccttgctcgcttcctgtgtccatttttccgtaggagaggtggacagcggggttctccgggtagaatggaccctctgctcctggcttgcaggagagcgccgccgccactaaccatcgccgcccgagccgtttcctcgtcgccggtggagctccgccgcgcccttagccccgccgccaccgtcgacccgagtctccgtcgcgtccccgtcgccgccgaggagtccccggagcccgccttgagattaaccccgccgccgagccgccccgccgtgaaccgcccccctccggtgcctctgccccgacccaaaccctaccggagaactccccgcgccctccccgacctccccgaccactcggatgaccccagggccccgccagtcgcccgtgcccctcgtctccggcgagccctccgccgcggggacgagcgccgccgccccagctag

SEQ ID NO: 33004 - DNA, 969 bp, Zea mays
  Peptide Sequence Number=SeqID_76379
atgagggttgtccgcattgtaatcactgctcaggagaaggcgaagccgtggaaggagacttccaggagtttcaagactacaatgaattctagatggctcgtcttagacacactgcactcgagtcacctggagaggctgcaccaccgcctgcgtgaggagcaggaacgccggcgccagcacggagagcagcagggctcttcctcctcaccccagcaggaggtggagaccgtgaggccccgttcctctgttgcccagctggaggcgccccttgttccaccgcgggacgtcccggctgttggaggagctactggaggagccactggaggagaccccgacgacgacgactcagcccacagcacggagtcctctgagccgcaggaggcggaaggatgggtcgcccgacccatcacccgtgacgccgctcgtggttgtcacttccacgacgcactcgacaccttgctgcgccaggctttcgaccggcacacctggtcgatcgagtatcgttgtgtagtctaccagcacagtcgcgggaggtacccggaccgctgggaggctacctgcctagttcgccgtccggaggatgaccttcggggtgcggaggccgtttcggagcactattccatctccgagagggacactgcagaggcggctatgcaggatgcagcacgacgtgcactctctcagtactgttctttgttcggtggcgtggccgacggtcttaaccttcggttgagcagcacagtcaacctagtcgcagtgcttaacacggagctggatcactctctggacgagctaagcagggctcgaacggagattgcggagttgcgtgctgagttggcagagcgccatcaccaggagggtggttcccccgctcctgttgggactcagcacccataccgctcgccgccacgtggtcaccacacttatggttcccctgtctgtaagaccaggatagatttggatccttag

SEQ ID NO: 33005 - DNA, 192 bp, Zea mays
  Peptide Sequence Number=SeqID_76380
atgcaagcacaagcaaatacaggcaaccaaacacaaggtgtgacattacgcgcggagctcgacagggagattggactagaggcacggatgtgctgtgggttcaagtgtgcatggttggatgacaagtgggtccatgtgccgacaacagaacaaataaagaaatgtgatggcgtcaatgaagcatcctcatga

SEQ ID NO: 33006 - DNA, 714 bp, Zea mays
  Peptide Sequence Number=SeqID_76381
atggttgcactgttttcccgggcagtcattgtcggtgttttgggtccaaccacgcacccggggttgcccctcgagatgtggagtcaggctcgcacgatacttaaagtaccttgggccaggctctgcaggcgcgagcaaattggtcgcatctctagagccaggctcccaccggcctggctcatgcagccaagctaccgggagaagccaaccaaacaggcggttattgaatatttgcgattgtttagtgaccgtggcaagagcaagaaaggcggaagttcgtcgcaccattccggcgaccagcggaagcgcgagccgaaccctccctcggaggatttcggcgattccgagtactcggaggaggagttctcctctgagtccgaggggtcaccggtctatgtctctcccccggtgtcgtctaacgactcagatgattcccaggggctcgcctcagaggtatggacatacatccgggccatcgagcgcgccgggctcgagggctcggatgagtcggaggtctcctcggatgaggagaactccttggactcatccgaggagggggcagcggtgatggcgacaacgagggtgacgaacgatggcggaggcgacggcgatggcgacgtcgacggcggcaaaggcgacgacaagggcgatggcaagggcgacagtaagggcaatggcaagggcggcagtggaagcagcaaggccagtggctag

SEQ ID NO: 33007 - DNA, 291 bp, Zea mays
  Peptide Sequence Number=SeqID_76382
atggacaccattggatgcaagatcaacgacgcagattacatgaacttctttatgaaccggaccacaacgacgacaacccacaaaaattctcctgctctcctcccccggcggtggtcgcgacttagctgcgaggcgcgggcgaatctagccatgggtcaaggggaagcgcatgtggtcggccatcagtccgacgcgagcgagatggttctgaaggagcgggtcccacatggcggtgacccggtgacgatagagctaggcatcacgactacaatggctctgcggtggggttga

SEQ ID NO: 33008 - DNA, 261 bp, Zea mays
  Peptide Sequence Number=SeqID_76383
atgaacgtatattgcaacctcgctgacggagagtacgtcctcgtgccggagcaaggagctgctcaggaggtagccccggatccagcaccagagcctgcaccagaggatctgcctgccccagctttggaaggcaaaccccggattgaatgtgcacgttctttggaggacatggttgctggagtgacttggccgtccatcttgccactaggttggactgtcgagtgggaccccgcctcggatgaggaggagcatgaggagtga

SEQ ID NO: 33009 - DNA, 258 bp, Zea mays
  Peptide Sequence Number=SeqID_76384
atgacggagcaccaccggcgcacaaatactgacgcgcccggctccccttttggttggcactgccccaacgatttccccaaggctccacaagcgtcccaggttggtgacgagggtgcacggcgtttgcggctccagggacggcggccaggttttataggtagagtctgcgaggatcgagtccagggaaaacgacaacagaatcctgaggaagcggaggtggataaggctggtgcgcgcggaccccgcgcgaagggctag

SEQ ID NO: 33010 - DNA, 441 bp, Zea mays
  Peptide Sequence Number=SeqID_76385
atggcacacataaagactacccagcggaaggggaacgggcctcagggtgtacctcggcaccagttggctcctcgacatgaggggagcagtagtgggagtaatgatcccataggggatctagaggctagagttgaacgtctaacgatggaactgcgccatggaggcagggagccccgggtggaagagctaagcgtagccctagaaaatctgcaaggatacaataatgctctgcacgaggaagtgcacatgctgtatgaccagctacatccgaacgtgccacccgaggttgcggtgatggaagctggtgcaacaggagcagctggcgaaagaccttatggggagctagatccctttggagcccctccttccatgaacatcgcggatgatcgccctcccgaagctagcagtggtgcgggagcagacaaggatgcagaggactag

SEQ ID NO: 33011 - DNA, 267 bp, Zea mays
  Peptide Sequence Number=SeqID_76386
atgaccagatcgccagatgcggccactgcaactctgcggctctgccaggaacatggaggagcagtggcaggcaacgtccttccttttgtttggcctggggtttcaaaattatctggatccgctactgccactgacccgcgtttcaccatgggcagaattcggtgttgcctaatcgtcggtataacaaataggtccacaaattgtaaaatgaaccccgaggacttaagaaattatacccgcagtacaaagagtaatcaaattgagtaa

SEQ ID NO: 33012 - DNA, 189 bp, Zea mays
  Peptide Sequence Number=SeqID_76387
atgtcgcgcgtgttcgacgactactatatcaaggattgtggcatcatctcggcgccagaggtgacgcagaggaggattgacaacaatgactactcgccatcatcgggagacgagaggctgacggccgggacccccatgtcggcgccacaggacctcatgggccggctcaactggtggaatacttcctag

SEQ ID NO: 33013 - DNA, 705 bp, Zea mays
  Peptide Sequence Number=SeqID_76388
atgagactaagtacggggcagtcagcctcccacgcgtttaaccctcgaattgtgtgtggttcgcttgctcatgtccgattcggccgaccccttcaagccagcgaccacatacatatggccaccgtggacgccacgacgccgacggagtccggcggcaagcagcaggcgccgtcccttccggcgtgcagaagcttctccggcgccaacccggcccttcgggtgctcctgttcgcggtgacgctcgcggggctggtcctgctggccaccgccaagcagacggtgcgcgtgccaatcccgcagttcccggggctcctcctctcccgacccgccaagttcacggactcgccggcgctcatatatctgctggtggctctcgtcgtgacgtgcttctacagcttgctgacggccctcgcctcgcttaagctcgtctccggctcgtttcccgccaccaggactctcttcctgcttgttctgctcgatgtgttatacgcagctatcatggcttcggcgaccggttcaggaggtggtgtagcgtggatcggcctcaagggcaactcgcacaccaactggaacaagatctgcaacatctacggcaagttctgtcgtcacatcggcagctccgttttcctaggcctcgtcgcctccatcatcctcgtcctgcttgccatcctcaacgcccactccttgtaccgccgcagtcgctag

SEQ ID NO: 33014 - DNA, 864 bp, Zea mays
  Peptide Sequence Number=SeqID_76389
atgaaggcaccgcactcgtgcagcacctcaaggcacgcggtgaatggcacccaaccctaccacatgggcaggtccaaggacgccacgtggcaaggaagggaagtatattccaggtgttcaacgtggggttcggaccccctcagagggacaccggacccctatgcgtacaagtccagagcccccaagaagacacaacgggccccttgggagtatcccagtccccctccaggagaggtccgagccttggcaaggtcccggggcgagaaggaccctgccatgagtaggggtccggtgctggcacgtgtccaggccttccctgcgctccccactattaccgcctggcttgaggcccgtgacgtaagccgacgggccgagcctgacgtaaagcccatgaagtcgtgcagtctctgcatttattatggagaggacacgccgcctgtcaccacgctaacgggcggtgtgccctcccagcatttaaagtgtcctgtccaatccgctggaagacgacgtcagagtcatccagcaggcggtgtgcctgaccagtctgttggcaaacagtgcgcccgtgctgaacggcgcaccgtactcatcaccccttctacaagaagcttcccttgcacgccaaggatacgcagatctcggatgtcggggcccaaggagagtgccccagcagcacacatttgtggctccaagtacaatattcgttatgtccctgggcccacatgtcgggcctcagtacctttgtgcatgccccccttcggctataaaaggggaggcatgcggcgttacaagacagacccaatcttaggtagacactcacaagttcatacaagctccagagcaatacatcacacagtggagtaa

SEQ ID NO: 33015 - DNA, 192 bp, Zea mays
  Peptide Sequence Number=SeqID_76390
atggcgcgcgaatgcggacagcgatggcgaagcgataaggcgaatcggaggtgcgtggtccaggtcgggacacctgcggaacatagtgcgtcccctatatatacagaaagaagatttatgtctccttgtataataggagctatagaaaaaactgttggagaggaaatccctaccgctctcccatacagttag

SEQ ID NO: 33016 - DNA, 273 bp, Zea mays
  Peptide Sequence Number=SeqID_76391
atgtcgaacgaggagttcgacaacctcaaggaggagctcatgtgggaagggagcagcgtcgtgatgctaagcccagatgagcagaagcttttggaagccgccatggcgtatgtctcgggcaaccccatcatgacggatgatgaattcgatcaactaaagctgagactaaagggcccaaatttagcacagaggagggagaggaggacaagaaggtttcccataagatcaactccaaaaaccataggaaacgccacggatctggattctcactaa

SEQ ID NO: 33017 - DNA, 519 bp, Zea mays
  Peptide Sequence Number=SeqID_76392
atgaccgactcgctagggtccataaaaccgaaagtcgagttttcccctcctccatttgttcgctgtgtgcaagtttccctcaacaacgagaaagagaggttccgctgccgggcagtgacggtgagggagcttgtccgtgtcgcgtcaccaaacctcggcgcgcccttagcactgctggtgttctgtgttggcgggcagtgggttacagcaggtgtcgacgacaccgtgcgaaggttcgccatggagggagaagctggtaagggcgtccgattggagaagggtcgtctcgggctccggctactgctgcgatgcgtgtgcgccgccgctggtatgcctcatgctgtgggcgggtctcggcgcaacatccctgtggctcctcctctcccagccgccgctcaggctcgcgcgcgggcatgcccggacgcgcgcaggcgcatgcctgtgcacggcgccgccgcctcggcccggccgctcgtctcctcgcaccggctcggccgccggcccctcgcctccccatag

SEQ ID NO: 33018 - DNA, 642 bp, Zea mays
  Peptide Sequence Number=SeqID_76393
atgaaggcgccgcacctgtgcagcacctcaaggcacacggtgaatggcacccaaccctaccacatgggcaggtccaatgatgccacatggcaaggaagggaagtatattccaggtgttcaacgttgggtctggaccccctcagagggatgccggacccctatgtgtacaacatgatggtgcggatcatcgagcaccgcaccgaaacttcggaggattttgcgatggagcaagaagttgcatcctctgcgcagcgagtacccgaccgccctgacactgggactgctgttgtacacgctgtgcagcaacacgcgcctgcacaagcgtcccggaccccgtcaagggcagcgcctactgcgttgtcggcagccagggagttgctgcgccaaccctcaagctccgcggcctcgctgggggccatgaagcagtggcgtgacgacgtcgaccgactactcggcatgacacattctacttcgaccagatcgaggcctcggtcatcacggcgccaatgcgaggcgacgacttctgtgcgctcgccctccgtaaggggtgcacagaccgacgacctccgggcagagctcaaccggaggtgtacgggagaggatgcccggatctctttggaaagggcgcgtgagcgccggtag

SEQ ID NO: 33019 - DNA, 1488 bp, Zea mays
  Peptide Sequence Number=SeqID_76394
atggggacccagggtcaggacctaatcttacgggagtaccagaccaaattagggctccgtaacactcccccagccggggaggaccctacatgcgcatacgtgtacgccaacccggaggggtctatccccataagcccggcctgttgtttccggattgagttttatctaaccaacccgaccagctcccatcccatcaggcaaaatgacatctggattgaacagccaggtttgcagtttaggacctctatgcgaaagcaggagggcccggcaacctgggggccggctctgaagaacgagtgcccgttccatggggtggtccggagcctgtgcggccggtccgataacctgggggctggaactagagaagagacactagtctccgggggtggttcggagccatatccaggtctcggcgaggctgcctcccgaaggccgttgacaattctttcatatacgctggtgcccaacctcgatacattgagcctgcaccccaggcggggggccaggtaccaagggaagtcaacagcaggaacaatccggagccgtgtagccgctcagcctggtctcataccgtgggcctgcacactccaccgccttgcggcagacatatttgctacattcccttatgagtgggaccctagctccatgtctgcaggaatggattacgctgcatcaacaaaagtcgcgatggaagctgaccctggacagccccaccaatggcggcgaccacctctgcatcgacggatcgccggcgacagcgaccacctctgcaccagcagcgacaacgacctccgctccgtgcggcttgccagtaacagcgaccacctcaggcggcagatggctctgatgccctcgccagcggaggcaaccacctctgcaaggggtagcctcaccagcggtgcagcaagaagaaaacaagaccgccgacaccaccacgagcgtgaactccccagcggtgagatcgccggagggaacgaccctgacgcggatctctccagaagacaccagcgcaccccatccgggggcccgggaggcggaagggctcaaggaatgcgagaggagcaaggcatggctactgcccgggagattggtccctttttaaaggcagatctccccactcgcgccctgaagcatcacgggcaaagtctcccccgacggtctccagggttcctaccctatggcataggggccaagcccccacatgtcatacagactgactcgaagcacgaacaaggcgaaccgccacacaaggggcatgcaaccgcctcgcggttaagcgcccccttgtcttcgccgaaaccagcggtcgaaagggggaaccaccacgtaggaagcatgcaaccgccccgcggttatacaccccctcagcttcactgcaactggaggtccaacgtggagacccagacccacatgtcatacaaccgacgcaccgagccagtgcaacaactcgaggaatcccgcatggctcagcagtggcatcaagtgtga

SEQ ID NO: 33020 - DNA, 1113 bp, Zea mays
  Peptide Sequence Number=SeqID_76395
atggtgacctccagttcgatggcgagggaaagcaagccgggttgcggcctctgcccctccctcagcctcaaggattttcatcaccagggctggggaggggactgccgcgtgcctggctctcggacccgagtggcttcggagccgctcttggcgccggctcccgccacggtagctggaagaggttcttccgccgacgagatagccgggaccgcctacggaccgacctccaaccctacggccttctgcccgtccttgcatcacgagtttgggcatgggcgggggcctcctggcagcagcatccgccctgaggtcattgctgccgctgttcggccccccggagcaaaagtcgtcatcgtcgccgctgctggagcgggtgacggcgcgccgttcatcggtcttctgttgctccgcaggccccccccccgtcgagtggggttgttcgtacctgcggaggagtccctcggctcggtcggccttgctgtccgaggcttctcttgcttagttaaaggaacccctcagccgctcttcgatgagccgaggccaggggtagcggtgtcagcacgggcagaggcagagttggctcgaaaagaagacttggtcggccggagcctagccgggtcgtccgttagcgggactgatgccggagttaatctgctgaggcctcgagccgggctgatgtcttcgggggacagctggctgaggcctcggggtgaccagccgagcctcctgctcgggccggattctcggagaagacacgggcggcgatggcccgggtgtgatgacgaagtcgtccttcagagtggagaccctcggactgcgtcgccgtccgaggccaggtcgaacctcgccgaaggtgtagctgacgccgagggtgctgctcctcccttcaaccgtcaagatccgagcctgcaggatcggattatcttgcaaattgtctgtgtgagcgagagttgcttctcgcggaaggtgatgagtgagggttctgtcaccgacgcagtcgagaaggctcgaagaatcgcttcggcagaggagctttcgaacgagtccctcggctcggtcagccttggctgcttacgtgtactccgtcattttcgggatccactttcgaagtaa

SEQ ID NO: 33021 - DNA, 453 bp, Zea mays
  Peptide Sequence Number=SeqID_76396
atggaggcccaggcccacgcgtcatgcaaccggcgcgccggatgccacgtgcgagcaactgcaccgccgcccgcgccactaccgcgcctcctcgactgcggaaccaataccgcgactcgaggcgacccagcgcacgacccagcagcgccagcctggcacgacggtcaatacggcggaaaatgggccggcagtaatggtggtggcaggcgggcaggagtagcggtcacgttgggaagcgagcgacgcttcgccttcgccataatgaccgcgtcaaaaaaggctccgagcctctctactgatcagaggttcgaaggctggcccctcggaggggttcaacagccgcctcagagcgcgtgggttccacacccactactggtcagaggttcgaaggccggcccctcggaagggttcaacgaccgcctcaggctactcgggctccgcgcccactactga

SEQ ID NO: 33022 - DNA, 711 bp, Zea mays
  Peptide Sequence Number=SeqID_76397
atgatgtacggatttaaaacaaataagcacctcaatgctgctctcgcgggcttgggcatccattacattgttatcgaagttaacgcgccggaaatcccgatcatggacggcagcgccgctccgtttgtatacctgctgcttgacgccggtatcgacgagttgaactgcgccaaaaaatttgttcgcatcaaagagactgttcgtgtcgaagatggcgataagtgggctgaatttaagccgtacaatggtttttcgctggatttcaccatcgattttaaccatccggctattgattccagcaaccagcgctatgcgatgaacttctccgctgatgcgtttatgcgccagatcagccgtgcgcgtacgttcggtttcatgcgtgatatcgaatatctgcagtcccgtggtttgtgcctgggcggcagcttcgattgtgccatcgttgttgacgattatcgcgtactgaacgaagacggcctgcgttttgaagacgaatttgtgcgtcacaaaatgctcgatgcgatcggtgacttgttcatgtgtggtcacaatattattggtgcatttaccgcttataaatccggtcatgcactgaataacaaactgctgcaggctgtcctggcgaaacaggaagcctgggaatatgtgaccttccaggacgacgcagaactgccgttggccttcaaagcgccttcagctgtactggcataa

SEQ ID NO: 33023 - DNA, 904 bp, Zea mays
  Peptide Sequence Number=SeqID_76398
atgcaccggatgcgcaaagtggtcaacatcatcaatgccatggaaccggagatggaaaaactatctgacgaagaactgaaagggaaaaccgcagagtttcgtgcacgtcaggaaaaaggggaagtgctggaaaatctgatcccggaagcattcgccgtggtacgtgaggcaagtaagcgcgtctttggtatgtgtcagtttgacgttcagttattcggcggtatggttgttaacgaaccctgcatcgccgaaatgcgtcccggtgaaggaaaaacccaaaccgcaacgctgcctgcttacctgaacgcactaaccgataaaggcgtgcacgtagttactgtcaaagaatgcctggcgcaacgtgacgccgaaatcaaccgtccgctgtttgaattccttgtcctgactgtcggtatcaaccttccgggcatgccagcaccggcaaagcgcgaagcttacgcagctgacatcacttccgaaaaagaagactccgaaaccttccagggcgaaggccacttctcggtggacgaaaaatctcgccaggtgaacatgaccgaacgtggtctggtgctgattgaagaactgctggtgaaagagggcatcatggatgaaggggagtctctgtactctccggccaacatcatgctgatgcaccacgtaacggcggcgctgcgcgctcatgcgctgtttacccgtgacgtcgactacatcgttaaagatggtgaagttatcatcgttgacgaacacaccggtcgtaccatgcagggccgtcgctggtccgatggtctgcaccaggctgtggaagcgaaagaaggtgtgcagatccagaacgaaaaccaaacgctggcttcgatcaccttccagaactacttccgtctgtatgaaaaactggcggggatgaccg

SEQ ID NO: 33024 - DNA, 711 bp, Zea mays
  Peptide Sequence Number=SeqID_76399
atgcagcacgagccgtggcggcctggcgctgagcccgccgccggggctggggcgggccctgctcccaccaccgtcgacgaggcatccatggagcggagcatgagcttcgtcaaggcgcttcaggagctcaagaacctgcgcccgcagctctactcggcctccgagtactgcgagaagtcctacctccgcagcgaacagaagcaagtggtgctggacaacatgaaagattacgctgtcagggccctggtcaacgctgtcgaccatcttggcacagtggcctacaagctgacagacctatacgaagagcaggcttcagaaataacaaccctcgagttgaaagtagcatgcttgaaccagctagatgcgggaaacaaaagaatgcaggccttctctgttacgcaagccgatgctgatttcgacccaacgccaaggcctttctcttcagcaaggacccttgagtggcatttggtttccgagaagaattccaaaaccagtagaccagatcagtctgaaattgccttaggagaaacaaaaactactaaggcttcgtcaagtggtttccgccttctcggcaaggaatcatctgcatctcccttgtccaggaatgtgcagtccaacataaccagtttggatattgtcagtgccggcatgaagatcagcaaagatgaaaaacgtctctgtgcgttgatcaactgcaagccaagcctgtag

SEQ ID NO: 33025 - DNA, 1602 bp, Zea mays
  Peptide Sequence Number=SeqID_76400
atgggcaaccgtgcgtcgcgccaccaccgccacgccaccgagcagcagccagagacgccgacccttcccaagccccagatccagccgccgccgccgccgacgcagacgcagcagtaccagcaggccccgccgccgccgaagccgaagccggcggcggacgcgagggcggtggggcgcgtgctggggcggcccatggaggacgtcaaggcgacctacaccttcggccgcgagctcgggcggggccagttcggggtcacctacctcgtcacgcaccgggagactgggcagcgcttcgcctgcaagtccatagccacgcggaagctcgtccaccgcgacgacatcgaggacgtgcgccgggaggtgcagatcatgcaccacctcaccggccaccggaacatcgtcgagctccggggagcctacgaggacaggcgctcggtcaacctcgctatggagctctgcgagggcggggagctcttcgaccgcatcattgccaggggccactacaccgagcgcgctgccgccgcgctttgccgggagatcgtcgccgtcgtccacagctgccactccatgggggtcttccaccgggacctcaagcccgagaacttcctgttcctcaataacaaggaggactccccgctcaaggccacggacttcggcctctccgtcttcttcaagcccggggacacgtttaaggatcttgtgggaagtgcatattatgttgctcccgaggtattgaagcggcactatggggcagaggctgacatatggagtgctggggttattctttacatccttttatctggtgttcctcctttttgggcagagaatgaggatggcatatttgatgctgtcttgcacagtcacattgatttctcttctgatccttggccttcaatatctaatggtgcaaaagatttggttaagaagatgctgcgacaagacccaaaagaacgcctgactgctgctgaaattttgagtaaggctactggtcttcccttgctttaccacccatggattagagaggatggagaggccccagataagccacttgacattacggtcatcagtagaatgaaacagttcagggcaatgaacaagctcaagaaagttgcattgaaggttgtggcagagaacttatcagatgaagagattatgggcctaaaagaaatgttcagatccctggatactgataacagtgggacaattactcttgaagagctaagatctggtttaccaaaacttggtactaaaatttctgaatcagaaatcaaacagttgatggaggcggctgatgttgatggaaatggtaccattgattacgcggagttcatatcagccacaatgcatttgaatagattggagaaggaagaccgtatactcaaagcttttgaatattttgataaggaccatagcgggtacataacagtagatgagttggaagaagctctgaagaagtatgatatgggagatgataaaacaataaaagagatcattgctgaagtagatacagatcatgatggaagaattaattaccaggagtttgttgccatgatgaggaacaatacccctgagattgttccaaaccggagacgcatgttctaa

SEQ ID NO: 33026 - DNA, 210 bp, Zea mays
  Peptide Sequence Number=SeqID_76401
atggaaggtgggtgtggcaggaagcgggacccagacgcagacccagacccacaacgtaacctggcagcagggccagggagggagcccgaggaggaagaagaagacccggagtcacctttcttgtacaagtattttccagttctagttctacagggaatccgcacggcgaccctgcagactactaggacactcactgtcactgctagctaa

SEQ ID NO: 33027 - DNA, 2058 bp, Zea mays
  Peptide Sequence Number=SeqID_76402
atggagttcaccggcaccaagaaggacgtcgagatggccgggcagctgaacaccgagctgtcgtcgagagaacacgcgctcccggcgctcctgatcaaggttccgtcgcaggccatcgccggcttcgactgcgtgcccgccgccgccgacgccgccgtcgtctccctgaacgagccgggtgacagggcggaggacgtcgccatcagcatcctccccgcgccggcgagagcctacggcggcgacgcgcacggcgtcccgtactccgtctcgctcagcatgccggcgtcgccgtcggggttccacctgtcgtcgcacttcatgtgcgcgggcgacgcgcccgtggcgacggccgacgtccgcccggtgctgctggaggatcagcggcaggcggcggcggcggcgcactcgccgcggctgatcaagcagacgcggttccactcgcagcccatcctcaacctgcacccgccgtccaagaacgtcgtcgacgaggctgcggcacggcggtgggacagcgcgcgcgacacgcggttcgacccgttcaagaccttctcgggccgcctcgagcgccagctgtccaacctgcgcggccgcccgcaggagcccgtcgacggcatatccccggactccaagatctccgaggaggagaccgaccaggtccccgccgccgaccgctacttcgatgccttggaaggccccgagctcgacacgctcagagccacggaggtgccggtgctgccgaaagacgagaagtggccattccttctgcggttcccgatcagcgcgttcggtatgtgcctgggcgtgagcagccaggccatcctgtggaagaccctggcgtcggcggcgccgacggcgttcctgcacgtgagccccgcggtgagccacgcgctgtggtacgcggcgctggcgctgacggtgctggtgtccggcatctacctgctgaaggtggtgttctacttcgaggcggtgcggcgcgagttctaccacccgatccgcgccaacttcttcttcgcgccgtggatcgcgtgcctgttcctggcgctgggcgcgccgcggctggtggcggagatgcaccacggcgtgtggtacgcgctgatggcgcccatcttctgcctggagctcaagatctacgggcagtggatgtccggcgggcagcggcggctgtccaaggtggccaacccgtccaaccacctgtccatcgtcggcaacttcgtgggcgcgctgctgggcgccaagatgggcctccgcgagggccccgtcttcttcttcgccgtcgggctggcgcactacatggtgctgttcgtgacgctataccagcggctgcccaccaacatgacgctccccaaggagctccaccccgtgttcttcctcttcgtcgccgcccccagcgtagcgtccatggcctgggccaagatcaacggccagttcgacgccggcgcccggatcgcctacttcatcgcgctcttcctctacatgtcactggcggtgcgcatcaacttcttccgtggtttccgcttctcgctggcgtggtgggcgtacacgttcccgatgaccggcgcgtccgtggcggcgatcacgtacgcgacggaggtggacaacgtgctgacccgggcgctctgcatcgggctgtcgggcatctccaccgtcaccgtcgccgggctcctggtgaccacggtgttccacgccttcgtcctcagggatctcttccccaacgacgtgtccatcgccatcacgaggaagaagcccaagttcagcaagatcctggcgcacttccgctcgtccagctccgacatgaaggagctcgtgctgtccctccccaggacggcgcagtctgactccggcgaaaccgagaccgagccgtccgtgaccgccaaatcccgagccgagccatctggaccttgcaaactgcgggcattccgcgcgtacgacgtcgcatttgccgttctgccaggcttggtccacgagcgcatcatcactggagaattggagaccatgtgtttgctgaccattgttgcggggtttcttcggacagcgaccgacagccgcactgcagaatga

SEQ ID NO: 33028 - DNA, 471 bp, Zea mays
  Peptide Sequence Number=SeqID_76403
atggcaggcgtctgcgttggcgggctggcggagtcgcggagatgtggaactgtcggcctgccgctgcaggcggggcagcaagcagcgacaggcgacagcgacatacggacacttcactggagttctggacagtggcagcctggtagtggtcggaggcgggccggcggccacccgcagccggacgttctcccaatatggtggaggtgcaggcgcagacttaggccgaggggaagagtcacgagggctccaatttatacccagggtcgaatcctaacaaccacggctggtttcacgcggcagagtggagcttccgtgatacccggcggcagttttgcaacaaaccagagctgggagaaggttcttacgagttggtcccacacgtcagcgtccaaccccaggcagcacgcggacgccccaaacacggtggctgccaccccgggcccgcgtgccagcgcgcaggtgaacagctag

SEQ ID NO: 33029 - DNA, 753 bp, Zea mays
  Peptide Sequence Number=SeqID_76404
atgcccctcaggaagctcttcaagtattctcctgttggtaggtcattttactctcccaacttagggagacgtcaaaaacttggtgagggattagaaagttggcgtggtttttaccaaagcataaggccgacacagatgggcctttcactgaatattgatatgtcctctactgcatttatcgagcctctccctgtgattgattttgttgctcagcttcttaacagagatatctcagttagaccattatctgattctgatcgcgtgaagattaaaaaagccctaagaggtgtgaaggttgaggtgactggaaacatgcgcagaaaatatcacatttctggcctcacctcacaagcaacaagagagctatcgtatgtgtctttcattgctggtatgagattccctgttgatgatcgtggtactgtgaagactgtggtgcaatacttcatggagacttatggttttagtatccagcacaccactttaccatgcttgcaagtgggcaatcaacaaagaccaaattatctgcctatggaggtttgcaagatagttgaaggacagcattactcaaagagactcaatgagaaacaaatcactgctctactgaaagtgacctgccagcgccctcaagagcgtgagctggacatcttacaggattccggctctcatcaagtgactcctccccctcacgatgactttgcggacaaatgtctccattctagtggtggagctatgaacaacaatccgatgtcctga

SEQ ID NO: 33030 - DNA, 444 bp, Zea mays
  Peptide Sequence Number=SeqID_76405
atgggtaacagtaacaaacgcaagcgcgagccgactcctccatcggaggacttcggcgactcggaatactcggaggaggagttctcctccgagtccgaggggtctccggctcccgtctctcccccggcgtcgtctgacgattcagacgactcccaggggcttgccgcggaggtctggacttatatctgggccgtcgagcgctccgggctcgagggctcggatgagtcggagtactcctcggacgaggaggactcttcggactcgtccgaggagggcggcggcggcgatggcggggacgacgacgacgacggaagcgacggtgacgacgacgatgatggcggcagcaggggcggcaatggcggcggcaagggcggccacggcggcagcagcaggggcagcaacggcggcggcagcagcaagggcagcaacaaggccagtggctag

SEQ ID NO: 33031 - DNA, 864 bp, Zea mays
  Peptide Sequence Number=SeqID_76406
atggctcccttcttcgacgcttattattcttccctagtgccgctactcttttcctgcgtgctgtcgtcaggtgcaggtgcagctgaagcggcggcggcggcggcgtacaagtacaacgtcgccggtttcggagcgaggcccgacggccggacggactcggccggcgcgttcgccagtgcctggcccgccgcctgccggtcgcaggagccggcgaccgtgctacaccagccgtggcggcagcagcagccagcagggacgacggcgcctggatcgtgttcgaccgcgtcgacggcctcactgtgtggggcggcaccgtcgacggccgcggcgaggcgctgtggcctgtgggcgtgcaagcaggctgctgagcacggcggctgccccagcggagcaacatcgctgaaggtgctgaactcgagggacgtggtgatcagcggcctgacctcggtcgagagcgagctgtaccacgtcgtggtcgagggctgcgaaggcgtcacggtgcaggacgtgcagatcgtcgcgccggggagcagccccaacacggacgggatccacgtgcaggcctcgtcccaggtcacggtcacccggaccagcatccggaccggggacgacgactgcgtctccgttggcaccggcaccaccaacctgcgcgtggagcacggatggagcctggggaaggagagagaggagagtggcgtggagaacgtgacggtgacgggggccgccttcgtcgccaccgacaacgggctgcgcctgcggatcaagacgtgggcgcgggccagggtggacggcgcgtacgtgcgcggcgtcgtcttcgagcacgcgctcatgcacgacgtgcgcaacccgatcatcatcgactag

SEQ ID NO: 33032 - DNA, 249 bp, Zea mays
  Peptide Sequence Number=SeqID_76407
atgtctgcattggaggacatagcttgcatgctggagcaagactctctggtgttgcaagagaatttggacaacgtcaacaacgtaaacaacccgggtgacagcagctacgaaccatcagcattgtccgcaccacccccagctgacgactaccttagtccagactgggactttgcggaacacttcgaaaacttctggggtcttgaatatgactccgaccagatgccttcgtttagtgacaatgacgtttaa

SEQ ID NO: 33033 - DNA, 207 bp, Zea mays
  Peptide Sequence Number=SeqID_76408
atgacagaaacccattcctgtcccgacttggacccgggagtccggaggcgttcgttgtgcagcttgtgtgtgatcgccgtggtgttcgcttgtgtcttttccaggcatggcccccagtctcccgggccaggccccatggtgttcgccagtgttggcgtcagggccgtgccgagggaaaatgagaccctatgcaaaactattgaatag

SEQ ID NO: 33034 - DNA, 873 bp, Zea mays
  Peptide Sequence Number=SeqID_76409
atgcagatcctacgcctcctcgcggcgcggcgcttccgccggcggcggcgcggggtgtccacgatcacctcgacggcgactgcgccggccacccctcgcagcggctgcgtcgccggcgtgtacggatacggcgaggaggaggaggacgagggcccgttcttcgacctcgacctgacctgctgctccgcgcccgcgtccagcgcgggcagccaggcggccgagtcgggctccgagtccgaggacgcctcgtcctgcgccaccgccaccgccgccgccaccgagcgcggcgacctcgactttgtcgtctcgctgcagcggagccgtatctacgatgagccgccgccgccgccgccgccgctcatgttctgcgcgtccgagccgagcccgagcgacggccgccgcagcagcgccagcgccagccgcctcgggagcaggctgcagctgcggacgctcagcttcgggtccgccaaggccgccctctacggcgggcgcgccagcttctcccggagcaccggcagcgcgcgctcggccaggctcttcgccgcgtacgggtacgggtacggctcgcccgaccaggacccgcgggacgaggggaaggccaggccgccctccggcgacgtcatccgccggtacctgagcaagatctccagccggctgcagcgccggcgcggcgcggccactgacctccggctacggaagagccgctcggcctccgcctccgccgcagcggcggcccggcgcgacgactcgctcgtcgagaagcaagacggcatcgccagcgccatcgcgcactgcaaggagtccctccaccgagttcgacgctttttgtacaagaggcttgcaacaggacctgtaattagtagtagctgttag

SEQ ID NO: 33035 - DNA, 2691 bp, Zea mays
  Peptide Sequence Number=SeqID_76410
atgctgctgctctctctcgccggagcagaggggagcaggcgcgcagcggagctgcacaaggtggacgccatcccagtcctacgactacgaggcgcccccgctctcggaattttcagcgggtcgcgtcgcgttctgtgcggggtgtcgcagtgccgaggtataaatggcggtcagtccctgcggccgcagcagcaactgaatcatccgaggaaggagggtggagggaggagggattttgccgatcacggggatctgcagctatttttggtaaacattagctcatgtatgttagtatactgtgttcatgtggagaaatgcaattgcctgcagtcaatttgtcagtttattgagacatccaacttgcatgagttgatcaacaagcccatccctggttccttatggaggcatcatcttccttgcgcttccaagtttctcgttttagttcgttcaagatatggctatgcctttttctgctatgacataacagggccagcagcagacgttaacatgatgggatatgcaaatgctgagcagattgcatcaggaattcactttaggctaaaggctcgtgcctttatcgttgctgagcctaacggcaagcgtgtcgtgtttgtaaatcttgatgcttgcatggcatcacagcttgttactataaaggtgcttgaaagacttaaagcaaggtatggagatctttataatgagaataatgtggctatcagtggaatccatacgcatgctggtcctggtggttatctgcagtatgtagtttatattgttacatcacttgggtttgttcgccaatcatttgatgtgattgtcaatggaattgagcaatgcattgttgaagctcacaacaatctccaccctgggaaaatctatgtgaacaaaggtgacctccttgatgccagtgtgaatcgcagcccaagtgcatatctaaataaccccgctgaagagagaggcaagtataagtacaatgttgataaagaaatgaccctcatcaagtttgtagatgatgagtctggtccgattgggagtttcaattggtttgcaactcatggaacatctatgagtcgtacaaattctttgataagtggtgataacaaaggagcagccgcacgtttcatggaagattgggcagaacaaaatggcattccaaaacaggcagctcatgtaaatcacgatggtttggaatcttcacacatgacctctcgacttccgagaagagtctccccaataattcctgaaccaaatgagataactgatgacttagtacaattggcgtcatcctacgaagcctcaggtggacggcgattatcaagttcaagtatcaccaagcgtatcagaagtacccaacaaaacagacctaaatttgtttctgcattctgccagtcaaattgtggtgatgttagtccaaatgtcctgggaactttctgtatagacactggccttccttgtgacttcaatcacagcacatgcaatgggaagaatgaattatgctatggacgagggccaggatatcctgatgaatttgaaagtacccatatcattggcaataggcaatttcaaaaggctgtagatctttttagttcagcttctgaagaaatacaaggcaaaattgactacaggcatacttacctagatttctcaaaacttgaagtgaatgtccgtacaagtacaggaagtcagcaagttgtgaaaacatgcccagcagccatggggtttgcctttgctgctggaaccacagatggtcctggagcttttgactttaaacaaggagatgtcaagggaaaccctttctggagattagtaagaaacttacttaagacaccagggaaggagcaagtcgaatgtcaagcaccaaaacctatcttgctagacactggtgaaatgaaggaaccatatgattgggcgcctgcaattcttccaattcagatcataagaatcggccagctggctatcttgtgtgtccctggagaattcacaacaatggctggcaggaggctacgtgatgccgtcaaagctgtacttacaagtgacaacagtggtgaatttaataacattcatgttgttcttgcggggctaacaaatacatattcgcagtatattacaacttttgaagaatatgagatccaaagatacgagggagcatcgacgttgtatggcccccacacgttgagcgcctacattcaggagttccagaaacttgctacagccatggtggcaaacaaagaggtcccgacaaattttcagcccccagacatgttggacaagcaaataggactcctcccaggcgttgtgttcgactccacacctcctggggtggagttcggagatgtcagctcagacgtccccgcaagctcaactttcaggaagggcagtgtcgtgaacgctacattctactcggcgtgcccgaggaatgaccttctcacggacggcacgttcgcgctcgttgagaagctggacggcagcaacagctgggttcctgcctacgacgacgacgactggtcactacgcttcaagtggtcgagaccgtcgaagctgagcccgagaagctttgcgacgctggaatggaccgttcctggagacgccccgtcgggcgtttataggttgaggcattttggtgcctccaaaccactgattgggtccatcaaacattttacagggacctctcgggcgttcgcagtgcgttag

SEQ ID NO: 33036 - DNA, 174 bp, Zea mays
  Peptide Sequence Number=SeqID_76411
atggaggaggaggcgcaagtcatggagggcggcgctggtgacggcctccgaggcacgcttgaccacgaagtagcacccgacggctccttccccaactccatggcagcggcgacatcaccgcccccgaccatacgaggttccaggatgcagtcgccgaagatgtgcccgtactag

SEQ ID NO: 33037 - DNA, 429 bp, Zea mays
  Peptide Sequence Number=SeqID_76412
atgactggggcggaaggctggagcgctagggtttggtgcttgcgcgttgtgggaggagtgttggtgggcgtagacgttgacgacgaagccgggtgcgcctttcggttcccaggctcgttgccgacgtcgcagcggcgacagatctgtagtggaagggagaggcagtggcggtggaagcaccatgtgctcgacacttctccccatccaacgcaacaacacataatgaacccccaagtgcagagctcggccgtgaagatcagcgacgtgaggtacacggacatccaggggacgtcggcgtcgcaggtggcggtcaagttcgattgtagcgtgagcaacctgtgtggcgggatcggcctcagagacatcaagctcactttgcaatgtacctacgctaatcactcagtattgtttgagcatttgattgtctag

SEQ ID NO: 33038 - DNA, 411 bp, Zea mays
  Peptide Sequence Number=SeqID_76413
atggcggggaatgcgaggatgactaggagcacggcgagcaagacgacccgagacaaacctgccaccgtcgtcgagcaccgtgaggtccacctagtcatcgtcgttcgagccgcatcgtccccggtggctgcacgcccgtcctcctcgtcggtggttgcgcggtcgtccgtgcagccggcagttgcgcgagctctttttctccttctgatgagttgtcgtgtctgcgtccccggtggctgcgcgcccgtcctccttgttggtggtcgcgcggtcgtcttcgtccagccggcagtcacgcgtgctcttctcctccttccgacgagctatcgtgcctgtgtccctagtggctgcgcgtccgtcctactcctcggtggccgcgcggtcgtctccgtccagccggcagccgcgtga

SEQ ID NO: 33039 - DNA, 543 bp, Zea mays
  Peptide Sequence Number=SeqID_76414
atggagttcaatggcgtcgtcaatagatcgacgtcgaagagacgcacgaccttcgccactggctccggaggcgatgatcccatggggcatgtcatcgagatggatgaactgcatcttgctgcctggttggcagctggagaagtaaaagcacatgcatcttcgtgcttttctgcaattattcctgcaccggttcgagttggagaagacgaacttccaccgtcttgggatccaatatcatctcctttagttctagacttcgaggggtcgagttatgtcttctcaatgagttttatgtacttgttctatcaaagatgcacctgtttgaaatgtgtactgaacgttagggcacctgttttgagttattttgaggctggtattttctctatccctggattaaccgaacaatattttagtgccagggattacaatctgaaggggattatacacccaaggggtttaagtgataggagaggattaactcaatccctctctggaatgaatccctctctggaacgtatccacgtgaaccgaacatggccctag

SEQ ID NO: 33040 - DNA, 253 bp, Zea mays
  Peptide Sequence Number=SeqID_76415
atggcggcgcaaggggcaggaagggcggtttcttcttctctggctaaaggaccgggaaagggggataccccgaaaaggatccttccctgtgaaggaaccgggctccgagccccccctactgatcagaggttcgaaggctggccccccgaggggttcaacagccgcctcagatcgcgtgggccctacacccactactggctggcccccgaagggttcacagtcgcctcagacgccgagcaagggatgaccaggg

SEQ ID NO: 33041 - DNA, 189 bp, Zea mays
  Peptide Sequence Number=SeqID_76416
atgaagtggtctaattccttgcacttgaagcacctcctttttcctcttctctttttgctcttggatgacacagagaggaacatccttcttatggagtttaacacttgctgcggtttctcccgtctcaagcttcttcaccacgcgtccgtggatatctttaggaggttgaggaatgtgtcttctccttag

SEQ ID NO: 33042 - DNA, 228 bp, Zea mays
  Peptide Sequence Number=SeqID_76417
atgaacatatttttcctagaacacctaagtgataaagaacatagcaaaaatgcagagaaccctagtccagagctaatccaagattgcaacctcgctgtcggagagtacgcgctcattcccgagcaaggagctgtccacgaggaagaccaggagccagctcccgagcctgccacagaggatctccccacaaccccatcatttgaaggcaagccccggttttatgcataa

SEQ ID NO: 33043 - DNA, 885 bp, Zea mays
  Peptide Sequence Number=SeqID_76418
atgaaaaatccatctgaacatgatctaagatgtttgcgtcaaaattatcaagcctatgacatcctagtcaattcccttagcaaggatgtttattttgttgtcataggtagtaatagtgatgttcttgtcgatgctcatgatctatggactagaattaaaataaaatattatgagtccaattgtactacttctactccctatgttgctggtggtactaacctttcaaagggagaagaaaaacgatggcaaccaaacgatgaatccacctcactgacaggtatgtctaccactagttataaatgtcttattgctaacaatgatagtggatacgaaagcgatgatgaagaggaatatgaggatgatagcgaggatgagtcttcatcaccacaaggtacattttcctgtattgctttcactaataataatgacagggaaaatgacaccaacaatgtggaagaagaggagattcatcggttctacaccaatctcaacaaagaagacaaagtgctcttggttaagctgttgaggaggaataaggaacaaggcaagatgcttctcaggctggaggagactcccatcaaaaccaatgacagcctggagaagatgaccaaagaacatgaggagctaaggtgctctcatgatgatttggtccaacggtatgattcagttttaattgagcaaagaaataatgatgatgctttatcttgtgttactcaacttaaaattgaaaatgccatgcttgagaggaaagtagaattgctaagtcatgaaaaacttgctcttactgaaaaatatgatgtgttgtcttattatcatgataatcttttggatagacatattgttgggggccttcggcttacgaaggtcctcaaaaacaggatttaa

SEQ ID NO: 33044 - DNA, 282 bp, Zea mays
  Peptide Sequence Number=SeqID_76419
atggcccgcacccacgcctataaagcacccagggacttcgaccgtacccctccgcacgcgctcgacctcaccggagcccaaaaccaccggcgttcgcccgtgcacgactgcaacctcgctgacggagagtacgtcctcgtgccggagcaaggtgttgctcaggaggtagccccggatccagcactagagcctgcaccaaagaatctgcctgccacagctttggaaggcaagccccggtttatgcataacatgttatttatgctattttactacacttattga

SEQ ID NO: 33045 - DNA, 195 bp, Zea mays
  Peptide Sequence Number=SeqID_76420
atggcgttaatggagagcaaatgggagagggagaagaaacggcgcgggacattcatggtgcgaggaggccggtcggctgcctgcttgcgcgaggtcgcgggctcgcctgcgcgcttggtcggcctcaggtggcgcgcggcgcttgggctcctgatagctcaaaaattctcagaaattcaccaaaagtatttataa

SEQ ID NO: 33046 - DNA, 369 bp, Zea mays
  Peptide Sequence Number=SeqID_76421
atggcattacaaccagctgaactcaaaccatctgatcggagaaagtacaacacacgaaaaacggagcacgcacttgatgaagtttctagcattgaaggagttgtcctgatacttggaggaagccttgtacggcccctatttgtttatgacattacaatttctcatggtatctttggtccaggaagtgccaaagaacatgctctaaccaagttagcccaatctgtttctcggaagaacttgtatatttctaggctatccgtgctcttgtatcacgtggagctgggagtctgtcctacacaggttccagtgcaagcatacaataagaggtttaccaggcaaggcgtcactagaagggtgatgtgttcatga

SEQ ID NO: 33047 - DNA, 780 bp, Zea mays
  Peptide Sequence Number=SeqID_76422
atgggtcggcgcgaggccgagcgtgaaggggggagaaaggtggccggagacgggcgtgagagaggtggaaatcccgcggtcttcgtgttcgtcccgcacccaggtcggcctgagtcagcttggggtagggtaatgatggcacctcccgtcgatgtggccggtccgcgccctaggttgggcgatgtggaggctcctccgaagtcgaggtcgagtctgtcttccgtggccgaggtcgagtccgagcccctgggtcgggcgaggcggagaccgtcggctaaggccagggcagagtccgagccctggggtcgggcgaagcggagtttgtcgtcttttggggttgagcccaagtccgagccctgggtcgggcggagcggagttcgccgtcttccggggcttagcctgagtccgatccctgggtcgggcggagcggagttcgccgtcttccggggcttagcccgagtccgagccctgggtcgggcggagcggagttcgccgtcttccggggcttggcccgagtccgagccctgggtcgggcggagcggagttcgccgtcttccggggcttagcccgagtccgagccctgggtcgggcgaagcggagcttcctatggtgcctgcggccgggcctgactgcctgtcagcctcactctgtcaagtggcaccgcagtcggagcggcgcaggcggcgctgtctttctgtcaagccgctttatgctgatgggggttaccagctgagaattaggagacatgagggtacccctaattatggtccccgacagtag

SEQ ID NO: 33048 - DNA, 456 bp, Zea mays
  Peptide Sequence Number=SeqID_76423
atggggagattgaaagctctctttgctgtcgagaagattgtaagcagccacgacatcgttgtaattgatatcaacatagtggaaggctctatctgtcgcactggcagatctgagcaaacggaggaaggagttgaaatagactacaagccaaggtcgggtattttgggtcggctagtcaccggaccttcgttccgcccaaccgagcaaccaaccttcccaaaatttcgaactcgtattaacggtcggcggtgggtgtggagcgggacggggcggcgagatcacgacgagatggagactgacatctcttcatgcggaggcggcggcgcccaacagcggggtataggacctgtggaggtgcaagcggcgacggcagcactgcggcggtcagaggtgttccacgtcttgaaggagctcgtaggcttcgtcctctacatgcaccaccagatcccctcgtaa

SEQ ID NO: 33049 - DNA, 141 bp, Zea mays
  Peptide Sequence Number=SeqID_76424
atggagtacacgaacatctccaactgcaatgcgctcccgaacgaagtgaagatcgacatcgatgtgtttgatgagacggacaccttcaacgcactggacctgcacgtgtgcagccaccgggatcccatggacgccatctag

SEQ ID NO: 33050 - DNA, 345 bp, Zea mays
  Peptide Sequence Number=SeqID_76425
atggaaagtagaggcactggacaagatgagcgcgaccagcgaacctcggcgaggggagacgtggtcggtagagagctgcatgggagttgtctacggagccgagggcgcacacaagaccatggcaaggagccgtgcgctggaacaggtgttgtgcactgtgcgtatggtggcctaagcgcggagaagagcagcggcatgagatccgccccggtcgagcaccatggaggcgagggcaccatggctgagggcgagcggcacgatggagagctgagccatggagaacaccgacgaactccagcaaagagcgcgcgttggggcagagtcactgggcgcactgtagcttga

SEQ ID NO: 33051 - DNA, 306 bp, Zea mays
  Peptide Sequence Number=SeqID_76426
atgaaggcccccaacagaggtttatcaacatattcttttattgcagctaggctttcacccccgccggagccgtacaaccctaaggccgacccggcgccattggtcggggtggtggtaattgagcccaggaggcttgggagtgactcgctgaagccacagaagtcgccggaatactcgccgccgacgaacttccccgcctacgcacgtggaccgaccacctctgacgccgacctgtacctcgacgtgaccgacgtaacctccccgacctcccgagacgcctcaccgaagctatctcgtcgtcggtaa

SEQ ID NO: 33052 - DNA, 210 bp, Zea mays
  Peptide Sequence Number=SeqID_76427
atggccataatctcaaagatttggggccaatctgcgcttgaactcgacctctctctgcactgcctcgtgctcgacgctgtgccagacgccagagcacgcactggcattcgtcgcgtgttgggggccttcggcttccaaaggtatcttcggattcggatcatgagcatacagagcatggttaagacgaagcttgagccggacgaaagatga

SEQ ID NO: 33053 - DNA, 114 bp, Zea mays
  Peptide Sequence Number=SeqID_76428
atggggaggtgtactgtgtttgtacgactgacgaaacttaacgagctgtgctcaggaggagatgcaggcaacatggaggactttgaagagttccaggactacgacgagttctag

SEQ ID NO: 33054 - DNA, 480 bp, Zea mays
  Peptide Sequence Number=SeqID_76429
atggtgtccacgcgattccacttcactgcgcaatcccccaagcttcgccgacgaggggtagattttgtggcttggtacagtttcctcgcaacaactagtcgagagccgcggccgcatgattcttataccccggtcaaggccacaaacccaggtgaggctgttgccgaggttgccgcgcccacgagccagcgatcccagccggtagccgttggcgccgaaatagccgttgccccgcagttacaccggacatgtccggtgaattatagcggagcagccgctacggattcccgaggctgccaagttccagagccgcgtcctcttggagcaccggacactgtccggtgtacaccggacagtccggtgaattatagcgcgccggctctgagaattcccgaggctgaggagttcaacgcgaagtcccctggtgcaccggacactgtccggtgcgccagaccagggagcctttcgggatgcctttag

SEQ ID NO: 33055 - DNA, 1167 bp, Zea mays
  Peptide Sequence Number=SeqID_76430
atgtcttcgcactccatgtatcacgtccttccaccttccgagcccctagatggggagcgctcgcgtcgctttcgtcttgctgtcgttggaggaacgcaacttcgcggaagttggtacctttcagccatcgctcagcttcaaggattttcatcaggcagcccggctgcatcccctcaccggtggtcacccaagacggtgaccaccagttcgatggtggggagaagcgagccgaactgcaacctcagtcccaccctcagcttcaaggatcttcatcatccttgctggggcggagagcgaggcgagccggggcctgccttcgtgtgggctggcgtcccgcctcttccagcttctgggggggtggaaaccatcctccagctctgcggaggaggcgccccccagccatgccggggaaggcggactgttgctgcccagccaaggtgcaacattccgtcctttgtccgggcaacggtggccagccgcaccggggggtctcactccattctcgttttcgtggcgaggatgggagtgaggacctgccggtgcgctttggagcggccggcacccgccggtgcggtgttggtggacaggtggacgccgccgtcggtgctgaggtggtggcagctggagagtcaaagaaaccctcggccgctctgcggtgagccggggccgagggcagcggtgtcagcgtggacagaggcggagttggctcgaaaaaggaagcttcatcggtcggggcctggccaggtcgtccactggccggaccaacgccggagtcgagttgccgaggccacgagccaggctggtgtccttggggacagctggatgaggcttaggggcggccggccgagctgtctgctcgggccgggttcctggaggagaccctggcggcgatggcccgggcgtggtgctgacgtcgtccttcggagtggagatccttcgcccgtgttgccgtccgaggctcggtcggacttcgccgaaggtggagttgacgccgagggtgctgctgctccccctccatcgacgtctgagcctgcaggatcggttcgcctgtacaggatcactcatccgaacgcgagttacttctcgcagaaggtgatgagtgagacttcatatgtaaacgaggtatatgaacggcttgaaaacatcttaagggtagaaacgacgtag

SEQ ID NO: 33056 - DNA, 1281 bp, Zea mays
  Peptide Sequence Number=SeqID_76431
atggctggagagcaacgtgttgctgagatgtcgctaacactttcgtcagatgtgcctcagacgagggttgaagagtttgcttcaactgcgggagctaccgcctcccaggatttgaagaagacgaagaagaaggtgactactagacggagcaaagttatgaaggtgcaaattgaatcgactcttcaagccttagaggaaatcttggttgcacccgaagctaaggtggcagctgagattgaagaactccctcctatgggagccaaagaggcaaaatttggaaaatctattgctttgatagcgcaaagagttacacctttagagttgcttccagagagcgaggaagaagaggaagaagagcgaatagctccgatgatgagttcattctttgatgttgatgaagatgaaactgaggagaaagatattgtcggtacaatactagtgctaaagcgaagtgcaccgcctactgcagatgagactggtccaagtagcctagggtttgaaaaggttactgtagtggtgacacttttagtaatcatggcagctgaagataagggttcctccaagcctgccttggcagaggacaaggggaaggggtctgctaaatttgaagaggccaagaaggaaattgaagatgatacatcgcttggtaaaggaccttttgaccaagacttgggtggtcgaagggctctgtctaaagataagaatttttcagatggtgacttggagggcctaatgatgtgggtgcttagtgagacctatgctttcaaaagtgttctctcagcacaagacgactattgtgcttggataggcatccgaagcactgcttcaattttgctaaaagtcgggcgcaatcatacacggcaagcagctgaaaaggttgtagacattaggaaaaagcttcaaggcaaaaaaaatccaaaggtaataattgaagtgaaacaaactgaagctgaagcaaaatatgttgttgtcgaagccgaagcaatctctgtcagagctgtgaaagaagttgcagattatgttgtcctcaaggtattcatctggttcttgggtgcactaaaacaaggcttgtgcagtgatgggcttggactgaaaaccctggaagctggtgagaattgcttcgtcaatcttcctttgaagctcagaaagacgaagcattttctccttgtgcttctcaacttgctgatggatgagttcaaggttgttgatctcctcatcaagctcctcttctcaaggtggtgggctattggccttcttctagttccttgcttctctgattag

SEQ ID NO: 33057 - DNA, 564 bp, Zea mays
  Peptide Sequence Number=SeqID_76432
atgggcgcgattcaggccaaggctccgctcaagggacacgaccccgcctcgcctgagcccgacctcgggcaaagacagccgaccccggaagattcacgcctcgcccgagggtcccctcaagcaatggacgcaccgtcgactcgcccgaggctcagctcgggtaggcttcgcggagaagaatacagcgccgcctgccttgcttcgactgtcgtgccactcgccagagtgaggttgacagcggctaagtccagcctcgggcgacataggaagctccgcctcgcccgaccccagggttcggcccccgtctcgtcctcggaagatggacttcgcctcgcccgaccccagggctcggactcaaccacgactttgaagacgacgaactccgcctcgcccgaccccagggctcggactcagcctcggcttcgaaagacgatggactccgcctcgcccgaccccagggctcggactcaacctcgacctcggaggaatcgccacctcgcccaaacttgggtccggaccggccacgtcgccagggggggccatcattaccctgccccttgctag

SEQ ID NO: 33058 - DNA, 234 bp, Zea mays
  Peptide Sequence Number=SeqID_76433
atgcactccctacttgcccctttcgggcgaggcacttggctatcttgtttggatgggaggggtgaccgcggagcacgactttatactccagaaacaaaatcgcaacaacctcccccgtggatcctcatggcttccatcagccggcttacacgcagcaaaactcgaggggaagcttctgggtctgggtcctacatggcggcggcagtaacgcacacaagcgtgagcggggcataa

SEQ ID NO: 33059 - DNA, 393 bp, Zea mays
  Peptide Sequence Number=SeqID_76434
atggcgccgttcgtggccacggcggaggcccgccggagacgaggtggagactccaggacccttgaacggcgacgagaacacgacgagggcctgggtcgacggtggcggtgctccggctatgcggggaaagcttcggtgagcatgggtagagggaaacagaggggaaagagggcaaatggaggcgcgtctcgagttgaggacaccgaggcggaactcaccgaggcaaaaggcacggtggggcctcaacggcggtggcacaacggacgtgcgggcgcggtgaacaacggcggtcttctgagctcagggaaaaagcagcgcacgagtgaaggctggttaggaggtgcctgtgagtgggggaaatggcagagcaaacgggaggggggagttgagtag

SEQ ID NO: 33060 - DNA, 855 bp, Zea mays
  Peptide Sequence Number=SeqID_76435
atgggcacgcctgacttctgcgcgcgctggcgcgcaataaatgcgctgcagccgctacggattcccgaggctgccaagttccagagccgcgtcctcttggagcaccggacactgtccgacgagtgggccccgaatgtcagcggcttcagcagatcggcgcggaaaagaaggcggctgcccgtggtggagcaaggtggggcgcgcaggcgaggcatcccgaacgctggaggagaccctgacggagacgacgacgaagccggtggcggttcgagccacaacacggagctctcggaggagcacgagccggagggatggatcgctaggcccatcactcgcgatgccgctctcaggtgtcacttccacggcgctctcgacagcttgctacattgggccttcgatcgacacacctggtctatcgagtatcattgtgtagtctaccagcatcgtcgtggtttatacccggaccagtgggaggctacttgcttggtgcgccatccggacgatgatctccggggtgcagaggctttctcagagcactattctatcactgagagggatactgccaaggaagccatgcaagatgctgcacgacgaggtgtgattgtctcacccattggtgagggcaatcctaggctgaacagtatggtcaacctagtcgtcgtgctcaacaccgagctggaccacgcccttgacgagttgggcatggttcgagcagaggttgcagaactgtgtgctgagcgtgcagcgcgccactatcaagatggtggttctcccacttatgtcgggattcagcagccttaccgctcaccaccccgtggtcgctttgattacgacacccctgactgcaggacctag

SEQ ID NO: 33061 - DNA, 534 bp, Zea mays
  Peptide Sequence Number=SeqID_76436
atggatgaaggaactcccctcggtggtctggagtctgaggaagacgccaagctgagccacgggcttcacgccgttctttctagtctatggggccgaggctatcttgcccacagacttagaatacggctccccgaggacaaggacacatcaatagggggaacagcagcaccctcggcatcgactccaccttcggcggagtccgacccggcctcggacggcaacacagtcggaggatccccacctcgaaggaagatgtcagcaccgcgcctgggccatcgccgccagggtctcctccaggaacccggcccgagcagacggctcgaccggccgctccgtagcctcagccagctgtcccccgaggacatcagcccggctcatggcctcggcagcccgactccggcgtcggtcccgccaatggacgacccggcccggctccagccaccgatgctatgcctcctcggtctgggaagcccccagctcctaggccgacgaagcccccttttttcgagccaactctgcctctgtccatgctga

SEQ ID NO: 33062 - DNA, 585 bp, Zea mays
  Peptide Sequence Number=SeqID_76437
atgaccgcgtcaaaaaaggtgcaccacgtcgttcaattttgtatccttttcctcttcccctttctctctcttgctacaggggctaggaaaggggatactccgaaagggatccttctctgcgaaggaagcgggccccgagccctcctactgatcagaggttcgaaggctggcccctcggaagggttcgacagctgcctcagagcactcgggctccggctcactactggtcagaggtcaaagctccgcccactcaagggacacgatctctcctcgcccgagcccggcctcgagcaagaacagcagatccagggtgaggctgacagcagccaagtccagcctcgggcgccaaaggaagctctgcctcgcccgaccctagggctcggcccccgcctcgaccttagaagacggtctccgcctcgcccgaccctagggctcggactccacctcgacctcggacgacggtctccgcctcgcccgaccccagggctcggactcagcctcgacctcggaggagtcaccgcctcgcccgaccttgggctcggcccgaccacgtcacagggggccgcatcattaccctacccctag

SEQ ID NO: 33063 - DNA, 525 bp, Zea mays
  Peptide Sequence Number=SeqID_76438
atgccggatctgagcaccagctacctccctcccttccctgaactgtccctcgatgcgggggccctcgccgtcgaccacgcggggaatgctgcagccgccgcctcggccgatgcggcgtccgcgtacgcgtcttcgtctgcctctgtgggcagcggcgtagacgacctcgttattccagcggaatgccggtggaagggccatgtccgcaccttcgacatggcgggcgcgggcgctgtcaccacttgccccgccgcgcggcgtggcggcgggaagaagctgtcactgattccgtcactcgagccggcacggacgcaggcttcagcatcggctccgacgctcgaggaacgcgtgagcgagtgggcggctaagaaggcagcggccggcgttccgactcatcactgcgtgctgcctttcctcaccggggcgccaatggcgatttacatctctgtcacaacgatatctgttgctctgttttctccaagagcaagagattatgaaaggccaccaaattcagaagagttttag

SEQ ID NO: 33064 - DNA, 523 bp, Zea mays
  Peptide Sequence Number=SeqID_76439
ccccatccaaccctcggagacgagtgtgcacacatcagtaaagctccccgagcgaggaatcgaagcctgcttcgccggagaggccagtccacggtcgccggagttctcaaccccgccggagtcgccgtggtttggccggtacactcgccgccgacgagaatacccgcctgcgcgcgtggaccgagcgattccggccacctccgccgtcgagccgcacctcgctgtgaccgccagagcctccccgagccaaccctgcccttcgccggacctatatcgccgccgagagtatgtcctcgtgccggagcaaggagctactcaggaggtagccccggacccagcaccggagcctgcaccagaggacctgcctgtcactgctttggaaggcaagccccggaatccttttgagatgaatactagttccttggaggacatggttgctggagtgacttggccgtccatcttgccaccgggttggactgtcgagtgggaccccgcctcggctgaggaggagcatgaggagtga

SEQ ID NO: 33065 - DNA, 306 bp, Zea mays
  Peptide Sequence Number=SeqID_76440
atggaggattgggaggcaacttgtccggcaaagttgactgcattatgcgagaccgccaaatgcgtcttctcttgggaggaactggacaaaactgacgaagaacgagctcagcatatgcgaatgcgacctgccaacataaactttgcccttgttggcgaccagagggatgcaattcagaactcaatcaagacaggacagcgggtaaatgtgaaaacatccactacaggtctacaacaatttaaccacatgaaacaggctatctatagtgttcgaaaaatgggctatctagcatctttgagaagttaa

SEQ ID NO: 33066 - DNA, 813 bp, Zea mays
  Peptide Sequence Number=SeqID_76441
atgggccagaagagccgcggttttcggacgctgggctccggtctttctcgcctccttctcagccttcaggggcggctcgcggaagccatcgtggttgacccgaccagcagccgagtgcccgattacaatcagccatcgccaccacctccctccgcggctccgccttccgccgcgaacacgccgctgtctcgaccccttgtcctcctccttcagcaagatggcggaggtgaggagacccttccgctccgtctgctgattgagataaaaacagcacctgctgacttccgcttccctacaacaaaccaaacaaggcattgttttactcgctatgtcgagtaccacagtcaaaacagcacacctatttttcttaccaattactgcaactctcatggaattcagcggttattgtttggtatgattctggagaaatacatccttttgagaaagttgcgcatctttatagattggatagaagggtcttacaagagagggctcatggctgctggtgccgcagcctctccgtgggcctccttaagccctgacactacacctcttctggacaagcagctcgtcctcgagctgcagcatgacggtggcgtcgcccatggggacggagacggtgtcagcgaagatgatatgacaaaatttggcgctgcccctggagatgggcacgccggcgtccaggatgtggtgacaaaattggcaggcggtgctgcccatggagatggggacatcggttgccaagatgacgtgatgaaggcggcatgcgacgcagcccatggatatgggacgtcggttgccaggacagtgtga

SEQ ID NO: 33067 - DNA, 204 bp, Zea mays
  Peptide Sequence Number=SeqID_76442
atgcctgcccacggccaccatcgctggctcttcctcccgatctgctgcccaagcttcgcggccggcgccgagccgtcgtcgtcccagtctgctgcatgctccacggggcgcctctgctggatgaccaggaagaagaggaagcggctgaagcctcgtcgtcgtgctagcgtcggctgcgaggagcgcttaggtgctgctctctga

SEQ ID NO: 33068 - DNA, 243 bp, Zea mays
  Peptide Sequence Number=SeqID_76443
gtgctctcaagtggcagtggtggccgcgtcgtggacttcggggtggcacgatggcagtgggaggacatgctcaacaatgaccacctttactttgcatgcctcgatggccatcttcgccttcgtcgtgctcgtgctcatcgtgtccaactagcacggcgactagatgcattcaaccgctaccaggagtataggtgctcgagcggacaacaattcatgagggtttcatcatggcgtgctctttga

SEQ ID NO: 33069 - DNA, 825 bp, Zea mays
  Peptide Sequence Number=SeqID_76444
atggcgcgcgggcaacacgcgcggacgcgcaggcttccttctacgcgcggcttcctcccccaccaacggcgccgcaatccaagccgacgccacgccctcaccccctccccactggtaagcaaccgccctcggcccctcctcgctagtacgtacagtgggctccttgcgacaccacaccctcaccccctccccgcacccactgtacctcgcgcacagtccttggcgctgctcacctcgcccctgacgcccgacgcccccgacgctgctcaccctgcccccgatgccttcgacaccctcgcatacttagcgttgctcaccctcgccctcgatgcccgatttggatgtgtgcgctaccctaacgcccgaatccccgctcccccgaccccctcggtggcggagaaggttttggcgtcccttggcgacgagaggacgacgatgtcccccgtcctcacccccacgaccagatcccacgagaccaccggtggcggagatgtttttggcgtccctaggtggcgagaagggatggttaacggcaaggtggagcagacgatcgatgtgacattcacgctcaacaatagcatcagacgcctcgatttcaataaatggaatggtgtcaaagattcaacaaaaaccaatagaaagaacaagacagggttcaaaacaaaggagcaaaaagaaaccgaagtgctccctggtctggcacaccggactgtccggtgtggcaccggacagtgtccggtgcaccaccggacaatgtccggtgcaccagggaggattgccttcgaactcttcaccttcgggtttctcaggcgcagcccactataa

SEQ ID NO: 33070 - DNA, 516 bp, Zea mays
  Peptide Sequence Number=SeqID_76445
atggggatttttatttgggccgtgaggagccaaggactagagccgagtgcaaaatgcttcagcaacatgcacgagctgctgtatgagacgaatactactgagacaaccgttcaagccaaggatggaggcaagaagagcttcgaggtaccgaatgcatgggagaaggtcaaggagaccaggaacccaaagccaggggggaaaactgaatcggtcggagcgccgaagcatcctgccgaagccaaagaaaaaacggccgaagagccagagctaggagaatcgacaggattacgaaaaatcctgagcccgccactagagccggagttgccgaagctcggagctgggccctcagtgcccattgaaacagagcctgttggaactgggcagagtattgaacaaggaccttcggacgtcggtctagttctggagaaagaagacgcgcccaagaaggttgaatctcctactctcgaagcgtctactgaagagctagacttttattattcgacacgcttcgggtaa

SEQ ID NO: 33071 - DNA, 432 bp, Zea mays
  Peptide Sequence Number=SeqID_76446
atggttttcgacggcgtcgcggatggggctgcgcaaaacagcaaacaccaggtgagcgtcgacggcgtgctgtccactgggcttcgcaaaacaacgagccagcagcgcgcggagacgtcgggggctgctgcgcacaacacaatatttcccatgggcattccgtcgaacagccaagggggaagattgcacgggggcgccatggacgacgacgagctcgctgcggctgctgttttgtggggaaaagagggggagcagggaagggtgctgtttgggcgctcggatgggggatggagcagcggcgtagtggatctcgggcgtgtcatggggctggtgctcgcgcgcagggaatcctcggtgtcgtggttgctggccggagctggagctcggtctgcaatagaggggggtcggccatgggaagaagctctctgctga

SEQ ID NO: 33072 - DNA, 1311 bp, Zea mays
  Peptide Sequence Number=SeqID_76447
atggggagcgcccgcgttgctttcgtcttgcggatgttggaggagcgcaacttcgcggaggttggcacatttcagccattgctcggcttcaaggattttcatcaggcagcccggctgcatcccctcaccaatggtcacgcaggagggggagaaagcgctcaccggcctagcggagggggcggacttcggcaatgcggggccgatcggccgcaagcgtcgtcagctccagcatgcctggttcgctggctcagctggctctggcgcagctttcggtgccacctcccaccgctgggcggagtgtggctatctgcccgccgtatgggcggctgttgcgccgcgcgcaccgagggaccgcccaagacatcgcacgctgctagggcggcgttcatgttcttgggttgtcctgccctcgctccggcacgacgcctccgcgcggaggtcggtgctcgccggccgggaggaattgagtggggatctaccggtgggcaggtggctgccgtcgtcggtgctgaggtggtggccgccggagaaggcttctccgccgacgagaccgtcagcgccacccacggaccgacctccggctctttggctttgatagcttgtcctcgcccctcgattggggacgcgggcgagggccttgtcgcagcagtgtctgccctaaggtcatcgctgctgctgtttagccgcccggagtggaggtcgttgtcgctgctgacagagcgggcggcggcgagccacctagaatttgtcatcccgcaggccctccgatgtggggttaaagaaaccctcggccgctctacgatgagccggagccagtggcagcggtgtcagcgtggacagaggcggagtcggcttgagaagaagcttcatcggcccaggagcaggcgcggtgctgacatcttccttcgaggtggagatcctccgcccgtgtcaccgtccgaggctgggtcagattccgccgaaggtggagtcgacgccgagggtgctgctactccccctgttgatgacttgtttgtcggtagcagaatcgtttatccgagcgagagttacttatcgcggaaggtgatgagtgaggattctattatcgatatagtcgagaaggcacaaaaaatcattttggcagaaaagttttcgagcgttaagacttgttcggtcagcagaatcgcttatccgagcgtgagttactgcttatggcagaaggtgatgagtgaggatcccactatcgaagtagtcgaaaagcgcgaaagatgttctggtagaaagactttttccgaggaaaattttgacgcagagggggttcgccccttctag

SEQ ID NO: 33073 - DNA, 339 bp, Zea mays
  Peptide Sequence Number=SeqID_76448
atggccgtcgttgtcattgtcgcgcggtggaggaaggagtaccatgtcgtagctgccgtcgagggacatcaactcgagactcccgaaacggagcagcatcccgggttgaagaggttgctggagactacccatctggagcttgacgggaagctgtttgtcaacacgcagcaggcccctacctggcgcgccaactgtcggtgtttcgaccccggggggtccctagaccgacgaggggctgagaaccgctgtcgtcatgggagcatgcggggtgccatcattacttgtttaccggggcgagccagatgggacgccggtcttgtcccccgtagcctgagctag

SEQ ID NO: 33074 - DNA, 414 bp, Zea mays
  Peptide Sequence Number=SeqID_76449
atgcataactcagagacaaccgatcaagccaaggatggaagcaagaagagcttcgaggtacctagtgcatgggagaaagtcaaggagactaggaacccaaagccaggggtgaagaagaagacttgcaaagtcaaggttgatcttgttaaagagttatggtgcatcaaggaacactacataaggacatggcttacaaccaataagacaaccgatcaagccaaggatggaagcaagaagagcttcgaggtaccgagtgcacgggagaaagtcaaggagaccaggaacccaaagccaggggtgaagaagaagacttgcaaagtcaaggttgatcttgttaaagagttatggtgcatcaaggaacactacataaggacatggcttacaaccaataaggatgttggagctcagaaatga

SEQ ID NO: 33075 - DNA, 522 bp, Zea mays
  Peptide Sequence Number=SeqID_76450
atggtgccttgtattccacccctttctgaggatgctagcatcaaggtggagcggaagcataagagggagagaaggaaagctctctgggctggctacgcttaccgcattctcgcattcaagcattcgccttcccttggaagcctccctattggcgagtggcgtgcatttatgtctggtcagcttgctccttgctcccattgtgttgttcctagcttgctcgatctgggagagttgcctccttggtctacaaaagaaagggttcatccttatgaaagaggtctcgaggtggagactggaagcgtgtgggtaaatctaggccatggcaacctgttgtacattggctcagtcagcattcaactccgctctggccggaaagctaagtacttcaagatccctctcccctcctccgtgcggtatgagggtgagtggttttatgccaggaatgtggctggtaacgccctgcctttcaccggatgggagctaatgtcgacggagaagtggcattatagagtggagacctga

SEQ ID NO: 33076 - DNA, 633 bp, Zea mays
  Peptide Sequence Number=SeqID_76451
atggccagtcagaggccaatgtacaagcagtactccggtttcatgaccctgaccgccattcccctcaagccactcgcgctgacagagattgaagctcgagtcaaggccatcacgacgttgtcgtcgagattcttcatggtcgaggattctccctccctctttctaaagatatttcaagcagtttggtgtgtcgacctccctggtcgctcaggaagcagtttgaccggctatccccaaggtggccctccacgattcgccagccctagcgcccggcatggaggaggtctcggtggctgggtgatcattcttggtggagcttcgatggtggaggcactggtcatcactctaccgctgtcgtcccttgcaccctttcctttgagcattgcagtggcgggtggtcaattcgaggcagcatcgttgccctcggtggtcgctgggacccaggtactaccaccatcgaccacgttgctggtcgctgggacccaggtactgccaccatcgaccatcgttgcttcaaccttagcggggccgtgctgcatgtggtgcctgaagaaggctacaagaaccttccccctttacactcaaaggcttggaaggatagggaacagaggtggaggagtggcagcatattga

SEQ ID NO: 33077 - DNA, 318 bp, Zea mays
  Peptide Sequence Number=SeqID_76452
atggagagtcatgatctccgggcagaaagggaatcacggcttgtgggtggcaatgagaatgatggttttggtattgactctggtaatggtaagtggtattctttccgtttggaaaggcaactgcttgacttacccccacataaagctagtccactacagccaaacaggacacttgctgagtatgttgatgtgtactcacccttgctctacacaccaaacccctcatcctcaggctgtctgcattgcaaccactgctcaggagaaaatgaagccgtggaaggagacttccaggagttccaagattacgacgagttctag

SEQ ID NO: 33078 - DNA, 237 bp, Zea mays
  Peptide Sequence Number=SeqID_76453
atggctcaccgaagttgctccggcccgcccgaggctttctcactgccgttctaccctctctgcccgtggattcatggcgtcttccccgccattgagttcgacgtggcgccctctccctctctacccaactccggcgatcccggagccaccctagcttgcgcctacctcaacgccgacaacctcaccgccgcggagaggagcggcgccgcttcgcgcacgtctgtttccccggtctga

SEQ ID NO: 33079 - DNA, 423 bp, Zea mays
  Peptide Sequence Number=SeqID_76454
atggggaggctagaaccccgacagaaagggaatcatggcttgtgggttgtgcaacctctgcagagtgttagaaactggtatatcagccgtgctcatggttatgagcagccttgggatcctcttcgattagaagaacaatgcggggtagatgatggcctcgacctgaagtactatcctcgtcgttcgaccagcagcgctggaggtgtgattgtctcgctcgttggtgagggcaatcccaggctgaacatcatggtcaacctggtcgccatgctcaacactgagctggaccacgtccttgatgagttgggcaagatgtctgagaacaggcgcagaggtggaaggcgtgctcagcaggagaagcaggcacccccaggaggaggcagcccagcagcagttgccaccgccacccctgatgaccattga

SEQ ID NO: 33080 - DNA, 633 bp, Zea mays
  Peptide Sequence Number=SeqID_76455
atggagttgcatcacctttccatgaagaatggtgtaatcttggaggacagctctgaggagattttggcaacacctactccattatcagagtctcatgactttgctgctggagcttcatcttcagtgccaccggtactagtatctcaagcccctgctcttggaggtgatgaccctgatgattctggagatagaggtttcaggactttatcatctcatgagtctttgacaccgctatccacatacgctgcttcggtcagcaatgctgctcggagagctctgtggtccctcagccacacctatcggcaacagctacatgacacggcgtataggcaccttcccctatgttcgagtggtgagagccagacaagcgtggttccaggtgaagctggagaaggtcgcctcaacacccttgtaggtgtggtggcaggtcttaacactgacctggatagtgctaccttagacctcttaagggtacatgaagagttcaaagacgcacatgcgaggattacattgatagaagctcagcttgaaggaaggaatccacctgaagcccaagtccctgccatagctgtatccccaccccgcaagaggattcactatggagccccaggatctattcccattctactttag

SEQ ID NO: 33081 - DNA, 402 bp, Zea mays
  Peptide Sequence Number=SeqID_76456
atggaggcaaaggaagggcggacaacgctggggagggagctagcgtccatggaagggatcgactggggaagatggggaggagatgagctcggcaccaggagcggtggcttgctggggaggccgacgcagcaagctcgaacgggggaagcctcaacgaccatcaagctggagcaagcagagatggtgaatcccagtggagataaagtggatgatgtcaacgacaagattccaaccccaatagttatgaacaagaaggatgagtcacatggatatctgctgaatggaacgaagaacaataagaggaccaggagaatgtttgggtacaagattaaaccacctcagccacaagcaaaagctccaaaactcatggatacccaaacaagagaatcaaatcaagcttag

SEQ ID NO: 33082 - DNA, 474 bp, Zea mays
  Peptide Sequence Number=SeqID_76457
atggcggggaaaaggccacgaatccgagggcagagaggggagaacggcgaggagaaggcctcgggcggaccggaggaactccgccaccgcgcgagcacggtggaccgccacggccgagcaccggcgatgccaaaattggccgaggacagagcgaaactagggaaattaagcacgggcaaaggcacttgcggggctctaagaagggagctgggcgcgtgggcgggcgtcgtggccgagaaatccggcgaccaccagcaaggtctgctgcgtcgttcaaacgagcagctggccctaaagagcgccgtggcggcggacctgaattcgttgtgcacggagctgaaggacgaggtcgctgccgtgcgtgcgaaggtggcaccgctggaggaggtgcggccgttgaagggaaaggtgtcattgctggaggaggaggagcggaagttgagggaaaacctcctggcagtgaccggcgaatga

SEQ ID NO: 33083 - DNA, 219 bp, Zea mays
  Peptide Sequence Number=SeqID_76458
atggcgcccatccctcctccctcttcgcttcctcaactgcagcagcccctccgtggcgtgtgctccccttgccacgcctacggtgcccgtcgtgctcctccgacttcgcttcggtctcccatgcgcgacgatgcgttcgtcttcacgccacatgtgcagcaaccacaactgaggtttgatatggttaaattaggtgaaaaatgtaaacgtgacatataa

SEQ ID NO: 33084 - DNA, 738 bp, Zea mays
  Peptide Sequence Number=SeqID_76459
atgacttctcacaaatcctcggaaggagggaacgcacattcccacacggacgaacttgcacgagagggttttccccgcattttgtgggaggtgctgcgggaagccggttatacgacgcctccccagtatgcggtgcagttgtttgaggagcaccgggtaccccgctgtagggtgaggatgaccatggagcctcatcccttgcagccgggctggcgttcgttggactttgagtctttcgggttcagggctgaagatactatcgagtccattgctctccacgggctgacgaccttttgtggctttcaccccttggagctatcaactcatcccattagcttgttccccactgaaaaggaggatggcccaatgtggaaggaccgagtggagcatgccaaggatgtgttggctctttacccacggcagactgctcacctgacagtgcggtgcatgaatgccctgtatcgtctgcaagcagtgcgaggtgaggcaatgttccagctgatgggattggtggagtctaccaagatcaccctggataacagggaggaccttgtggtagacctgtccactgagctagtggaaaaggacctccaggtggagcagatggccacccaaatccaagagcttgaggagcaagtaggggccagggagaacgccatcgaggttctcgaggatcagctcctgaccacacagcaacaacttgaggaagccaaccagcacttggatatgcaccattag

SEQ ID NO: 33085 - DNA, 309 bp, Zea mays
  Peptide Sequence Number=SeqID_76460
atggctgatgcccatgcgatcgaaggcgtgcaggaagatgatgtcggcctggctgccattatcaaccagtactttgtgcaaattctagcctgctaccctgcaattgattaccatggcatttgcatgtggtgcactgcacaaatcaacgtccctggtatcgaaagtgagcgggacgtgggaccactttgtttgtactactgggtcggtgagagcgacgtggttgacactgcgatagtggtcctttttatgccgcttggtgtcgaagtctacactggatcccccagtgattatgtgaatgacccacagtaa

SEQ ID NO: 33086 - DNA, 384 bp, Zea mays
  Peptide Sequence Number=SeqID_76461
atggcgagggtgtataccggcgagctccttcttcagcagcggggcgcggataggaagaagccgaccggaggaccatcttgtggtacaccattctaccatccgacaattgaagctcattgctgctatcctactactgaagttcgagtagctgtaacactcagagcaggcaagcaatcatggatctcaagcttgcggggtacggagatggtgatggccgtggggatgaaccctgccacgatggacgttgtgttggaactcacacgactgcacagggagctgtcgccgtgcccgaccatggaggaggtggacgcagcggtggacgcggaggaggcgcgcctcgccgaaatcactaaggaggagaaggcggctcgagtgctggcatag

SEQ ID NO: 33087 - DNA, 264 bp, Zea mays
  Peptide Sequence Number=SeqID_76462
atggatgccacccatgacttcctcctcttgctcttcccggtggcttggtggtcagtggcggaggacgcgtcaaaattaagaatcatgaagcaggcggaatgctcaatgctgtacagaggccacatgtattcagtgtatttaaatgtaaattgtttgtttaattcggcacaacccacatgcacccacacaatggtctcggaggagctcgccatgatgaccgaggatgagctcgacgccaacaaagtcactcacaggcgatggtag

SEQ ID NO: 33088 - DNA, 618 bp, Zea mays
  Peptide Sequence Number=SeqID_76463
atgggaagtgttgctgggacgggcgaggatttaagtaacaatcctcctcaatcaaccctgtgccggaccgtccgctttaagagattggagcttgttggtgttacttacattgggggtatccgttatgggtcggagcgaagccagatcagttgcccgttgccgaacaaccttgttgttcctgtccaccttgaagttggccaggaacttcgcctttgcttcttggatcagctgctccttgtgctcctcgaactggagctgttcgtcagccggcaaggtctcccaagtcggctctatgaaattgctagggaggcgttagagctatcccatgaactggccattgagggccgatctgatgggtctatatatgttgtccccagcgaagtcgccaaaaagtgtgttgacaccttttcgggtgccaatcactataacaagaaccggcggcggtgctctctgcacaggcgcggacggtctgtggccaggggccggacggtccgcgcgtgcgcaggggcggcgaaggtcactggcggcgcctggatctcgctcccgagagggaccccgttcgggaggagagatcctaggtgttgtctaggctcggcaggccaacctagactcctctga

SEQ ID NO: 33089 - DNA, 453 bp, Zea mays
  Peptide Sequence Number=SeqID_76464
atggtgaactgcggcggatctctccctgtttccttttgctgtttcttcctcatgacgctctttgtgcttcagctcgccaattgcccaggggaggtcgcaggggctagtttatatgctcccagtaagagccacgagggcggcgggtgtagcccgagaccttcggcactggtttcggatcgaggggacccgccgagagctccgctgcttcgttggggattgttacggggtaggagtcatccagtctctaaagtccgtggtggtcttggtctgggcttgtcgaagcaaagggggcactcggcccttcgcatgggcgacgcccgcgacctcgttggtgagcctgctgacggggccttcggtctatggaacgtcgatgtggaaatcctcgagcgaggggggcgggttcgccttcgatccaacatatttaactatggaagtaataaatggctttattaa

SEQ ID NO: 33090 - DNA, 549 bp, Zea mays
  Peptide Sequence Number=SeqID_76465
atggagctgaagcctgccttcctccagaaaccattctgggtcccccatgggcccagacttctggcaggaatggactacgctgcaccagcaggagtcacgctggaagctggctccgaacagccccaccaacggcggcgaccacctctgcatcgatggatcgccggcgacagcgaccacctctgcaccaactgcgacaacgacctccgctccgagcggctcgccagcagcacagcaagtggctctgatggtcccgacagcggaggcaaccacctctgcaaggggcagcctcaccagcggctgcgaccacctcagcaccgacaacagcggccacctccgcaccggtggacggcggctgcctcgacacgcgtgaagaggtcctcgctcccgtcctcccacggagtgaggacaagaccatccaagaacgtcgtcgccacccccgcggcatacagcgtcttgtacggccccctaccatgccccgaccaagcggcaggaggcagcgtcggaggcagccccagggccatccgagccagggagccaggcacacggtag

SEQ ID NO: 33091 - DNA, 129 bp, Zea mays
  Peptide Sequence Number=SeqID_76466
atggccgtgatgggttcaacatctggaaagatgtacctctgccaggtgaggaaacagcagacttttgctgtttttgcactaaggtggtgcccaaagaagaacctcagtagtgtagccacgagaggatga

SEQ ID NO: 33092 - DNA, 948 bp, Zea mays
  Peptide Sequence Number=SeqID_76467
atggcttatttcatgggccacaagcagcgggaagtgaagggcaaggcctggacacgtgtcagcaccggacccctactcacgctagggtcctcctcgttccggggccttgttgagtggagcacaacctcgaggaggttggtgctcttccaccattgctcggctcggcttcaaggattttcatcatgcagcccggctgcagtcccccgccagtggtcatccagaaggatgactaccatccttgtggtggggagaagaaagccgggctgcagcctccctcctgccctcagcttcaaggatgttcatcatccttgctggggtgggaggcgagccgagtcggggtcctgccttccgcatgggccggtgacccgcttcttcctccagcatttgggggagaaggcgttcatcggccttgaggagaaggcgaacttcggctacgcggggccggccggctgcaagcgctgtcaactaccgtgtgcctggctccctggctcggatggccctggggctgcctccgacgctgcctcctgccgcttggtcggggcatggctgtccgtccaccacacgggcgacggtcgcgccgtgcgcgggtccgccacatcaacggcttctcccgcgccactggccgtactagggggccgtacaagacgctgtatgccgcgggggtggcgacgacgttcttggatggtcttgtcctcactccgtgggaggacgggagcgaggacctcttcacgcgtgtcgaggcagccgccgtccaccggtgcggaggtggccgctgttgtcggtgctgaggtggtcgcagccgctggtgaggctgccccttgcagaggtggttgcctccgctgtcgggaccatcagagccacttgctgctgagtccccgactctttggctttaatggcctcgctgtcaccccccgtaggaggacgaaggtgaggacctattcgcagtag

SEQ ID NO: 33093 - DNA, 459 bp, Zea mays
  Peptide Sequence Number=SeqID_76468
atgactctgggtacgtccgatacatggccgaggctcaggctacgctcccgaggtaccctaggacatttccgagaccagcaggagcgattttgtaacggaatcccaccagagggaggcatcgagccctcggacccaatcgaacggggtcgggtccggcaaatcacctgcagggtgaggctgacaacagctaagtctagcctcaggcacaacaggaagctccgcctcgcccaaccttggacctcggccttaggaggaggtctccgcctcgcccgatcccagggcttggtcccgcctcggcctcggaaggtggtctctgcctcgcccgaccccagggctcggcctcaaccttggcctcggaaggtggtctccgcctcgcccgaccccagggctcagcctcaacctcgacctcagaaggtggtctccacctcgcctaaccccagggcttggcctcggccttag

SEQ ID NO: 33094 - DNA, 381 bp, Zea mays
  Peptide Sequence Number=SeqID_76469
atggagagaggcgaggtcgccggcgatgatggccggagatggtggccgccggagaggtcgccggactaccgcaaagcagagacgaggcgcctggagacagagagcttgcggctgggagaagaaatgagacagagcccctggctcggtcgggctgggggcgattttttaaaacgcgagatgggcacaccggacagtctacagtggctgtccggtgcacaccggacagcgcacagtagatgtccggtgaaccaccggacagcgcacaggaaaagaggaacttcgcgcgcggctgccggtgcaccggacattgcacagtgcagtgtccggtgcacaccggactgtccggttagacaagccctagatgcaatacaaggaatttaa

SEQ ID NO: 33095 - DNA, 330 bp, Zea mays
  Peptide Sequence Number=SeqID_76470
atggccatgatgggttcaacatcggaaaagatgtacctctgtcaggaccttgtcgatgtaggcttactgaccaaggaccctttaactggtcatatgcctcatcatggacatctgcaagatgagcttgctgaacgggatttggcaatcgattgggctgtcaattcacgttcaattgcttgggaccgggaagccaaagctcgagcccgtgtggaggagcttagcacggccgttgacaacttccagacgtacctgccgaccctgttggaatgggagtcgggccctctggaacagcaggtgaagcacttggataatgaagtcatgttggaatag

SEQ ID NO: 33096 - DNA, 1470 bp, Zea mays
  Peptide Sequence Number=SeqID_76471
atgccgcgcacgaagaatgcgtcggcatcagggggtggcgacgatgaggaccctcgtcgccccttcaggcaggtgaagggcaagactgtgtatctggagcagcaggaaggccgcaagaagcggcgttcagacagagaggctcgtgcagcagcagcagctgcagcagccgctgcacaggcagcacttggagatcagccagatgttccatcagatcagattgctttccgtgctcgtcgtctcgcctcccggtctcgctcctccactcacacctccgcttccactccgccacccactctgcctgctccagtcactcctattgctccatccacctccaccgccatacccactaccagcaccacgccagcttccactgcttcccctgcccccgctcccgcttcagctccacctgtccctccacctcgtttccgggagcgcgatgagactgaggtccgtccactgggttcggatcctcgtctatttgatcttcagcgtgccactgcagcccgggtaccgtcggttcagcggcagatatgtgaggagtgggtccgcgtcttctatgcctctgtttggattgacccggatcatcattggatgaggttccgctttgatcgcgaggatgtcacaatcactgccgatcagatccgacagctatttggcttccctgtgtcaactactcgcctgcacagtctctgctatggcacttcagatcctccacgtcgccctcacggcggtgtggctccagggacagctcacgtcgcggctctgttccgaccgcctttttcagatgggtcgcgacgttctccagcagacttcactactgcagcgaagtacttgtatgagctcgtcagacggactctcctgcctcggatgggatacagggaggctactactcatattcagctatggctccttggtgccctggtatcccactctgagtttgatgttgtggactttctgatctgtgagattgaggacactgttctggatgggattcgtgctcgtcggcagctaccttatgctcactacttgtgccacatctttgcgcagctgatccagccacctcgttctcagagtacccttgaggcctcacgccttgtatttggatcttaccgtcctgctcctgagattccagtgccagcttatgctcctgtgtttgacactcaggtcgaggatgctgcacttcgacagtttgactcccagggtgcagcagctgatgatgatgatgatgatgatcttggggttcctcttccgcctccgcctcctatgcctccacgctcacatgatcatgaggctgggagttcccgtgctgcccctgctcctccagctttggaccctgctcttgcttcgattcttcagactctcacccagcagcagcagactctcacccagcagcaggctctcctggcagccgagcaggcccagcatgcaggacaggcaggatgctcttcagcaacagcttattcaggatag

SEQ ID NO: 33097 - DNA, 930 bp, Zea mays
  Peptide Sequence Number=SeqID_76472
atgccgagaaatatggtaaatcgtggactttacccctcacgcgacctgagacgtggtctcccattccggttatggtggtacaagtgcggtcactgcacgacggcagttggggtccatgaggcattgtacgctaaggctatccgagggattgatgggttattcccatttaagtgtggtctagcctctaaggcgggacttaggcacttaagttggaataattcgggcagttccgccacagctgggaatgcacagtcccacactgacgggcttgcacgagagggtttcccccgtatcttgtgggaggtacttcagggagctggttacacgacgcctccccagtacgcggtgcagctgttcgagaagcaccaagtgccccgctgtagggtgaggatgaccttggagcctcatcccctacagccaggctggcgttcgctggactctgagtcttttggagacagggctgaggatactatggaggaaattgttgttcacggactgaccaccttttgcggattccaccccttggagctgtccactcaccccattggcttgttcgccgtggagaaggaggacgacccaatgtggaaggaccgagtggagcattccaaggatatctgggctatctatccaggtcagactgctcacttgacggtgcggtgcatgaatgccctgtatcgtctgcatgtgatgcgtggagaggcaatgtcccatctaatggcattgttggaggcaaccaagattactttggataatagagaggaacttgtggtagacttgtccactgagatggtggaaaaagacctacaagtggaacaattgtccaataagatccaagagcttgaggagttagtgggaaccagggagaacaccatcgaggttctcgaggatcagttgatcaacacccagcagcagcttgcagaggctaactag

SEQ ID NO: 33098 - DNA, 306 bp, Zea mays
  Peptide Sequence Number=SeqID_76473
atggcgggggatcgggtggccgcgggcacgccgtttgcagggaaaacaccggtgatctctggctccggtgaggtcgagagcacgcgggggagtacggttgaagcttcggtgggctttataggcgcgggcgtgagcaggagacacgggcatggcttggtgcggcgcgaggcgcgcggggtcgggcgtgctctggcgtgctcagagcacgtcgaacacgtggaagtgttcttctgcccttgttcaacagctcgccgagatcgcaagcgtgcgaatcttggcaaaaacccggcgcaggcctcctcctag

SEQ ID NO: 33099 - DNA, 642 bp, Zea mays
  Peptide Sequence Number=SeqID_76474
atggtgggcaataaggcaagagttgaaggatgtattgcggcacaatttaaactgaacaaggtagcacacttcacaaggagggccacaaaggaccagaccctaacaaccctgaccagctctacagccagatggccacagatcggctggcggcatgtggggagtagatgtgtcagcaccataggcccttactttgactggcgacatgaaccggtggatccctcggtggtctacgcaagtggtgggggaaaagcgcatggacgatacgcactctttgatggattcattgactcatcgttggtgagatctcagaggatgggttcgtcttcgagtagcttgtgctctcgtcgaccgaacgagcaggaattggagattatgaggttgtgtgaggagatgagacaacaatgggaatttatgcatgcttgcaatgcacataaccaagtgctgtatcaaggactagggagtcaacagttcaacacccctccgacacatatacctgcacctggagatagagttaagctagaagtgggtgggagtgagtctgaacccataggaaaaggatttgttgagtccctcttcgcgtaccctcctcctggtggcggtagtggccaaagctttaaccatccaagtggtggttatccctga

SEQ ID NO: 33100 - DNA, 171 bp, Zea mays
  Peptide Sequence Number=SeqID_76475
atggggttgtccgaggtccgttggacaaggacaactataggtgggcctaatgacttggaaggatccgtcacagcgtaccccttcgaggacgagcaagctactgtggatcctgaggttcagcagatagaagttgctgagcaggagctcattgaaggcaagttgtgcccttga

SEQ ID NO: 33101 - DNA, 165 bp, Zea mays
  Peptide Sequence Number=SeqID_76476
atggccatgatgggttcaacatcggaaaagatgtacctctgtcagaataagataacacgcaatgggagtggagagatggcgagagtagcgtgtaccctccgtggcaagaggctggacggtggtgtatctgtgctctcggttggcgtgaacctgatctggtcttaa

SEQ ID NO: 33102 - DNA, 126 bp, Zea mays
  Peptide Sequence Number=SeqID_76477
atggatgttttgatgattaggtaccttggagaggaccaacaaggacttgggaaagaccaagggataagccttcgtggcgaggtcattcgtgtgtcacgggtgataaccaacggagccgtggtgtag

SEQ ID NO: 33103 - DNA, 282 bp, Zea mays
  Peptide Sequence Number=SeqID_76478
atgcgcgacgcgcgccgggggcacgcgagccatgccggggggggcacgaccgctggggcacgagccgccggggtgttgaggaccagcaaggacttgggaaaggccaaggtgttgaggaggagcagcaagggcgtccacaacaggaaggagatcaagtccgagtcggctgcgactctatctcgggttccaggaccagtctgcactaaaatggacgcccaagatgcctccggactccgattgcgacggactggatatggttggaaagataacgagattatctaa

SEQ ID NO: 33104 - DNA, 141 bp, Zea mays
  Peptide Sequence Number=SeqID_76479
atggccatgatgggttcaacatcagaaaagatgtacctctgccaggtgaagaagcagcaaacttttgttgcttctgttcaaaggtggtaccaaaggaagagaaccaagactaaagctacgggaggaaaggccctccgttaa

SEQ ID NO: 33105 - DNA, 957 bp, Zea mays
  Peptide Sequence Number=SeqID_76480
atggattcataccatgagctgggcgcgtggaccgctgaatttgaagtgccggaccaagagcccggacttcgctgccttgagtgggtacaggaggagttgcaggcgctccccaccatcgtggaggggtttatgtcttatgcctccctggtcacctgcgagggggcgatgaacgcgctctctcgcgaagggtgccggcactatgaggtcttcgaccaggctgatgaggatttcgagcgtgatatctacaaggttgaggaccctatagtgaaggaatccgccggggccctctacgaccggatgtggggcccccacggtcgagaggtggtcagggagcgggccgagacggcgaggggtcaggcggcgcgcggcgagagggtggatgatttcggggctttgaacagcgcgctgcttgacccggagtcaaacccggctttgtccaaggtcgccctggagctgcccccggaaaccaccgaaggcgctcctaatgcccccgcagccgctgcggccggcggaggcccgcccccggagaccgccaaaggcgttcctgatgcccctgcagccgctgcggccggcggaggcccgccgccaactgctgcgccgagggctgaggatcctgtgacggtggcggcggaggcgacggtggaggctcccgcgacggctaggtcttcgcaggttcaagattttgggcctgcgcacgcaaccgctactactaattgtttggcggcttcgactgtggatgatgggaataaatcggacgggtctgcatctaagttttctgattttggtgactctgggagctcggttgagtggactgaggagtcgtcgaatgaggacttggactactttgcggccttggatgtggcggcggcggaggcttcgccgcaagctgcggatgctgaagttgtgcttggtccgagtactgggcgtaggcggcgaagggcggttgtgaagcgtaga

SEQ ID NO: 33106 - DNA, 612 bp, Zea mays
  Peptide Sequence Number=SeqID_76481
atggcttcccccagcctcagcttcaaggatgttcatcatcctttgctggggcggggggcaagccaagtcggggccctgccctccacgtgggttggcggcccgcttcttcctccagcattcagaggagaagggtgttcaccagcattgcggaggaggcgaaccccggctacgcggggccggccagttgtaggccgtcagctgcagcgtgttcgcccctttgggctggacggcttcggcgccgcctccgatgctgcctcctgctgctctggccggggcgtggctgtccgtccaccgcatgagcgacggttgcgccgtgtgtgggtccggcacatccaccccttctcctgcccgccgaccacactgggggatcgtacaagacgtcacgggagcgaggaccccttcgtgcgtgctgaggcagccgccgccaactggtacaggggtggtcgctgccgttggaggacggggggcgaggaccttctcgcagtggcgctcaccctgaggtggtcgctgttgctggcaagccgcacggagcggaggtcgttgtcgctgctggtgcagaggcccacggtacgggaccaggctgagcggctacccggctccggactaccctag

SEQ ID NO: 33107 - DNA, 840 bp, Zea mays
  Peptide Sequence Number=SeqID_76482
atgtttaccgataccgtggtggtgcaccatcgaaccgccgaggcgaatggtttcttcacagatgatcttgttgagcggattgtggtacttgtcgatttcctcttccggcttacagtcaacgacgttgtaatcgtagacgaagtacatgttggtgccgttctgatagctatgagaggaatgaccgcccagcatggtgatgtcgtcggcgtgcgggaactcagtacgaatacggttaataacgctttcgtagatttcgtggatgcagctccagcagccggatacttcggtggtaaagcccatgttgccggttttgaggatctgcacacgttcggcagccactttatccggtccccagttcaggcgtgcacaattccagtgttctgcctccctccccgcgaacggctgccgccgcgccagctccgctttactcccgcgctgctcccgcaaatcccgccgccgtcctcgcggccgcttcgaccccggacaccgcgccaacaacgagcgcggatggaaggttgccgcgccagcaacgcccgcggatggaaggttgccgctcccgcaagctcggcccgcatcgcccccgcacttctcgccaccaacgaccgcggatggaaggttgcggcaccaaatcgccgctcccgcaaatcagcatcagccgcgaaggtacaactgctcctcgccgctcccgcaaatcagcctcgcggccgcttcgcccccacacttctcgccaccaaagaccgcgaatggaaggccgcgcccgcaaatcgtgaatccgccgcgccatcaaagcccactgacgttcaaatcaatctcggcagtggatgctcccgcggatggaag

SEQ ID NO: 33108 - DNA, 558 bp, Zea mays
  Peptide Sequence Number=SeqID_76483
atggcgctcgccttcgacgagttcgggcgccccttcattatcctgcgggagcaggagaagaagacgcgccttcgggggcttgacgcgcagaaggccaacatcgcctcggccaaggccgtcgcgcggatcctccgcacgtcgctgggacccaagggcatggacaagatgctccagtcccccgacggcgacgtcatcatcacaaatgatggagcgaccatcctggagcagatggatgttgacaaccagatagcaaagctgatggtggagctgtcccgtagtcaagactatgaaatcggggatggtaccaccggggtggtagtcatggcaggggctcttctcgagcaggctgagaagcttctggagcgtggtattcaccccattagggtggctgaaggctatgagatggcgtcaaaggtagcttttgaccacctagaacatatatccgaaaagtttgagttcagtgcagacaacattgaacccctggtccagacctgcatgacaactctatcctcaaagatcttcacaaaatttagtgaagttgacgaagcaggtcattag

SEQ ID NO: 33109 - DNA, 330 bp, Zea mays
  Peptide Sequence Number=SeqID_76484
atgctggtagactacacaacgggtctcctccagcagccgggataccctgtggtggtgcagggggcatctctggctgaggtgcaggggaaggcagcctctcagactccacctcatgctgaggcgagggggaagagtcctgctgctctcgctcctgctcctggcgtcggtgctcctgctccttgtgcaggtgacgatgcagtctctccagttgactggactgacctgacactatgcgacgcagtggacgctccgccaggcgagaaggcaaaaagggatcacagacttacgtgcaatgcacctaagacgagccatctacaaaagacatcgtaa

SEQ ID NO: 33110 - DNA, 328 bp, Zea mays
  Peptide Sequence Number=SeqID_76485
ggtagctgatggccttgacctgaagtactatcctcgtcgttcgaccgacagtgctagaggtgtgattgtctcgccagtgggtgagggcaatcccaggctgaacagcatggtcaatctggtcgtcatgctcaacacagagttggaccacacccttgatgagttgggcaagatgtctgagaacaggcgcagaggtgtgaggcgtgctcagcctgaacagcaggcaccccaagaggaggcagccccgcaacagcatctgccaccgccaccaccaatgaccattgagcaaatgttcttgatgcagacccaaacagttcaggcaatcggatag

SEQ ID NO: 33111 - DNA, 459 bp, Zea mays
  Peptide Sequence Number=SeqID_76486
atgggcaagaacaacaagcgcaagcgtgagccaactcctccatcggaggagtttggcgactcggagtactcaaaggaggagttttcctctgggtctgaggggtctccggctcccgtccccttgcgtgagtcgtcagacgactcagacgactcccaggggctcgcggcggaggtctggtcgtacatccgggccgtcgagcgctctgggctcgagggctcggatgggtcggagtactcctcggatgaggaggactcggacgacggcgacgaggacgaggacgacgacgatgacgacggcgacgacgacgacgatggcggcggtgacggtgacggcagcggcagcggcaggggcagcggcggcggcagcaaggacggtgacggcggcggtagcaggggcagcaaccggggcggcagcagcaggggcagcaccaggggcggcagtagcaggaccagtggctag

SEQ ID NO: 33112 - DNA, 1053 bp, Zea mays
  Peptide Sequence Number=SeqID_76487
atgaagccacacgtcgccagtggacacggtgctgaagaaagaagacccacgacatcttcaacacagataaataacctgaataaatcccatgcttgtatagacgccgagaatgctggtttggttaaagttttgcacctggtctatttggtgtacagaaagaaatccaagttttttacttgtagtaaccctgataacgtaccgaaagaactcccaagtgatcttgaagaactataccttcaacggcaaaatccaagctatctgtatgggatctcaaggctatatatccttgctctccctccttttgtattggggtataaagtttatatgcattcttccggctacaaggttttgatggaaccggtcgtattgaaccgtgaaagagccgcagctgaccgcctaaaacggatgcctatattgttcgacgactaccgtgatgaagatttttattatgggcttccgcggaaatacagtattgtcgctcgggtcgaagttaaattcccgattgaaccacgttttcgtgatagacaacatttcgttttgtctgacatcaatggagccaagatcgaggccataacatatatgtatgagacagtcaaacatttcgacaatttgctccatgaaaagcatgtttacaagatgcataatgtgaagttcagtcttcatccgggtgaatttaattttcgtcatctaaatggtcccatggaattgtgtcttgaccaacaaactatcgtggagccatacactgttccaattcagatggcgccattcccaaaacaaatactattgaaccttgctgatattgccgagttgccaaacaggactttagtcgacattatggctgttgtagtccacttggatacaatacatcgcacaatgtggggccctttcagaaagattgtgataatggatgctaggggatatttacatatcattaaagtttggggtgacctactaaacaaaaatgcactccgctgggcgttggctaaggaggattatggcataataattgggactatgtttagacggttcagaagacaaggttttgctttataa

SEQ ID NO: 33113 - DNA, 75 bp, Zea mays
  Peptide Sequence Number=SeqID_76488
atggcggtgagttgtgtgtgcgcgacggctgacgccccggacccatttggcggtgaactgatgtttggaatatga

SEQ ID NO: 33114 - DNA, 303 bp, Zea mays
  Peptide Sequence Number=SeqID_76489
atggtcggcgcgctgtggggcggatccaccgtgacccgtattgccgagcgcagagagaagccgtgggccaccaacgtcgcgtgtcatgttcgcctccagtccaatcctggcgtgcgcatcgggagcttcaacggcaccaatggggaaaaccaatcagtgcggctctctggtgcggaggtgttggcggtacggcgggatttccccatcggcatcctccatggtgggagtccgccgcggaagggaccctttgagctacatgcttcgaaaccttacaccgagaaccctgtgcttgccaggaattga

SEQ ID NO: 33115 - DNA, 408 bp, Zea mays
  Peptide Sequence Number=SeqID_76490
atgagggaaattcttttctctctgcagcgctgttgcagcaccacttctttgtgttttcgtgttaaccgttgcaagcgggcgttggcagagattgctgtcaaagcagtacttgcggttgcagatttggagaggaaggatgttaacttggatctaattaaagtagaaggcaaggttggtgggaagctggaggacactgaacttgtatatggaattattgttgacaaagatatgagccatccacaaatgccaaagagaattgaggatgctaagattgccatcttgacatgcccatttgagcctccgaagccaaagacaaagcataaggttgacattgacactgtcgagaaattccagacactgcgtgagcaagagcagaaatactttcatgaattggttcagaagtgcaag

SEQ ID NO: 33116 - DNA, 843 bp, Zea mays
  Peptide Sequence Number=SeqID_76491
atgactatatttgcacgcaaggtgatcttgctctcatcgattttatcaaggaaatccctttgtgaaccaagggtagaagtcgttcttattgatgatgccttcgttgaaaggaagtggatggagtgtttatttcagccgagcgcatatttaggtgacgaggttatagactgttacataaatttgataaaagctcaaaagcatctaaagtgccgatctggaggtcgcgttcacatagaaaatgctttccagttcaatttcctgaagcgagatggtgatcttgaaattaaaacagaggagctatatccaattaaagacatgacacacatatgtagcgctgaacgaagggtgttactttacctagaccatgacatgattaaaggactgcaaagacaaatagatatgatatctcaacgtaaggagttaaaagaccacaggtggccagacctccaagttgcttcttggccgctcagagaaatagacatgggatatgcaaagcagacagatagctcttcatgtggcctctttcttttgaactatatcgaatactggacaggggatgaactgtctgacagttttacccaggatgacatgtcacactttaggaaaaaaatggctgctatattactatcttcagacctgaataagagaagggggtgtctgttatacaaaaatgaaaaagaagttgactctggaagcccatctgatgttgagatattagaaaacccaacagattctaataagaggaaactactccacgtgcttgatgatagcgaagtggtgtttgaagatgaggaaggccctattactcaagcagacttgcaaaggtggtttgttgatgattga

SEQ ID NO: 33117 - DNA, 354 bp, Zea mays
  Peptide Sequence Number=SeqID_76492
atggcacccaagaaagctagctcgaaggctgacgaggctgcgaaggcagcactgctggccgcaaaaaagggcaaggccctcgcactcacccactccacccaccaagaggctgctgaagacgatgttccccgcacctgcgaagacgacgctctccgcacctgcggccttggacaaccgcaacctcccccaggcttcgccccgccggagggcgcggacctcaccgaggacggtgaagtcctcggcttcgccccaccggagggcgcggacctcaccgaggacggtgaagtcctcggcgtttcagcagaagaacagctacagctgcgcgccctacgcctcaagaaccacaatctctag

SEQ ID NO: 33118 - DNA, 102 bp, Zea mays
  Peptide Sequence Number=SeqID_76493
atgaatctgtctacggtgtcctgtgtgctgtgccggaaggaacaagtgcgcgggcggcggatgggaactgccagaggtcgtggaaggatattttcaatttag

SEQ ID NO: 33119 - DNA, 510 bp, Zea mays
  Peptide Sequence Number=SeqID_76494
atggcgaatgcggcttcatccgcatcgtcgccgggggcaggtccctcctcctcgccgcaggccggtggagacgggggaggggacgcgcacacgccgcggcagcggcagggccggcccccgcgcgccggctccgacccgctcctcatcgtctgcggctgcttcagcgtcgtcacggtcgccaccgcgcttctctgcgtcgccgtcaacgtcgtctccgccgtccagtccttccgcgccggctccgatatattcgggggcatattccggtgctacgcggtcgtcttctcgctattcgtcgccgtcctcgagaccgagtgggggcttgccgcttgcagcacgggggagtcgcagaggaaggaggcctgcatctgcatgccaagaacgcccgccgtcggcaacgcagatgaaggaggcctgcatgctgctactggtacagactacagagtacagtacagaaacgtgctgttgatgatggggaacaggataatgaacgacatgttggttggttaa

SEQ ID NO: 33120 - DNA, 156 bp, Zea mays
  Peptide Sequence Number=SeqID_76495
atgaagaaggagctgcggctaaaattcactggactgtgtggtggtgcaccggactgtctgggcgagaggctccaacttgtggagattcctcgcaaacgagaagagaactcaaaaagaaaagaccgtggtattcaagttgatcattggatcacttga

SEQ ID NO: 33121 - DNA, 360 bp, Zea mays
  Peptide Sequence Number=SeqID_76496
atgaagcaacaacgtcaagaagcagatgtcggcaaactgcagggtggtggggacgcagagaacccgaacgtcgccggcagccacacgctcgcggacgaagtgcaggtcgatctccacatgcttggtgtgctggtgctgcacgagattggtggagaggtagatggcgctgacgttgtcgcagtagacgagggtggcacgctgaagggggttgtggagctcgtggagaagctgatgcatccaggaggcctcgccacgccgttggccacagcgcggtactcaacctctgcactggagcgggaggcgacgggctgccgcttggcggcccaggagacgaggttggcacccaggaacacagcatag

SEQ ID NO: 33122 - DNA, 999 bp, Zea mays
  Peptide Sequence Number=SeqID_76497
atggcgagctctttatcaatattccactccttcaggtccctcttcacagcctctgtccacgtcaagcgactgcttgttgctcttctcaagttcatggaaccatatctgagaaatgctgaactcccagaggcgatggaccttttatacaagggaactatgcgagttctgcttgtactactgcatgactttcctgaatttctttgtgattatcacttcagtttctgcgatgtgattccttcaagttgcattcaaatgcgcaatgtcattcttagtgcttttccacgtaacatgagactgccagacccttctacccctaatctaaagattgatttgttggctgaaatttcaatagcaccacgaatcatgtcggatgttgatggtgcccttaaatcaaagcagttgaagactgaggttgatgaatatctcaaggctgtgcaacaactgcaactgaacaaggctaatccgtctgcatcagtacagcagattaaccatatatctccgatggacattttccagattggaacagctaccgatatattcaggagtcttataacaagtttggatacagagggccgctaccttctgttgaatgcaatcgctaaccaactgcgctatccaaatagccatacacactactactccttcatcactctgtatctattttccgaggctacccaggaaattacccaggagcaaatcacaagggttcttctggagcgtctcatagtgaaccgcccccatccttgggggttacttattactttcattgaattgataaagggacgagctttgcaagttccagcgttcccatcgcacaacatggtggcggtgtttgctggggtggcgggagggttggaccacaattgggtgtacttcgatcagcccaacgagcccacgagcgggagaggccagaggcccaatcccatggagacgacggcgttcccatcgcacaacaaggtgtcgttctggctaccgacacagagaggcccaagttgctga

SEQ ID NO: 33123 - DNA, 309 bp, Zea mays
  Peptide Sequence Number=SeqID_76498
atggggatttcccccgttgccatccctagagccgtcacctccgtgctcgattcattcgccttgtgctcgtcgttccgtgcttcttccctacctagtcctacatcacctcccattccgcctttggcccgcaaccggcgtccctctccgttgatggactcctactcctccccctcggcggtaccgccggcagctgctgaaacggcacggtactcataccgcccaaggctgcggtggccgccggatgtggaggagtacttcatcatggcgtacggccgctcgggtggtgcttatgtccgcatcggggggtga

SEQ ID NO: 33124 - DNA, 738 bp, Zea mays
  Peptide Sequence Number=SeqID_76499
atgtcctgtgcgccaccttccggttgggccgttgcagagtggacggttgatgccgacccgttagtgatgggggccaggctggaagccttgattgctaatgatggcaaagatgtggaaattcagtctgttattatggaagttcctgatatcttgcgtaggtgtgttagccgtgatgaggctgcattagcagtagcacaaaaggttttcaagagtttgtacgataacacatcaaataccacttatgtctcctggcttctagcaaccttagttgcaatacgagatgtctgcaagcttgttgtcaaagagttaacaagttgggtaatatattcagatgaagagaagaagtttaacattgatatcatttttggccttattcgttcggagttgctgaatattggggagtacaatgttcatttggcaaagttaattgatgggggaagaaatactagtgttcaccaggttcatcctgacaccctggagctaaaggatgtggctgtttaccggtgttctgcttggtgtttagactcgtccttggtgcctgcttcaagggagctttggatcgtcgaacctccctttgccgttgatggggtgtcttctggcaggagaacgttgatgtatccaatccgcatcacattctcgtctgccccgcggagggatggatccgatcctaagcttcatgctattacttcgggcggtgatggttctggtcatgtgcagcagggatcccctcctttttga

SEQ ID NO: 33125 - DNA, 1008 bp, Zea mays
  Peptide Sequence Number=SeqID_76500
atgtctctctccgtcgcgctactctcgtgtattgcgacaacatcagtgctgtctatatgtcttccaaccccgtccaacatcaacgcaccaagcacatcgagattgatctttacttcgtcagagaacgggttgctgccgttagttaaatttacctgttttcttctgtcctgctcagaggttgcaacggagtttgcaatgtcccttgtccaagcattgtttgctcatgatcctgttggcttcacagagtttcagaatgttcttgatgcactatcgaagcatacaaagagaccaggttcacctgaatcgttgcaacaattgattgaaatcgcaaggaataatgtgagcaccactactggttttgttgctgtgaaggatgaaaaggttttagctacccgggcaaacaaggaggaaaacactgctaatgaaattacactagttgatccaaatcaggtggcagtcctgttttctgaatggtgtcagatgtgtaatcatttgcagcaagatggtctgctgaagggggatgatatctctgaacgcttcttccgtattctcacggtgatggatctacctttgtaccaggaacttgctgttacacactctctagtctccgagcagatcgttgctcctggtggatcatctcagcaatcaccacagcaacctcacatttcatatttctccattgattcatatgcaaagcttgtggttatggttctcaagtactcagtggagataacaccaaataaagccagtatactttccaagatcctatctgttacagtgaggtccattcagaaagatgctgaggaaaagaaagcttcatttaatcctcgaccatacttccgattgtttataaattggctctatgatcttactactaccgatggtcaccatgatagttctaattttcaggttttgactgcatttgcaaatgcattccacatgctacaacccttgagagttcctgcctggaggtctgtccatcacgcttggaccttcctacaacgttga

SEQ ID NO: 33126 - DNA, 312 bp, Zea mays
  Peptide Sequence Number=SeqID_76501
atggctgatgacctcaacgccctgggtaaagtcgtctccgaccgcaccctcgtcctcaacgtgatccgggtctcaacgagtgcttcacccacgtcggtgccctccttcgtcgtgctcgacccttccctttcttcctcgacgtcccgcgaggatctcactctggaggagctcaccatgacgaaccaacaaccttctccggccgtcgctctcgccgccaccactgagcccttgcagcagtccccgcagcgatccagattcaactccgtgggggctgccaacgggaacgccaactcgcaccaagcgtggcggtaa

SEQ ID NO: 33127 - DNA, 808 bp, Zea mays
  Peptide Sequence Number=SeqID_76502
atgcgcgcaaggaattggaaaacggtgcagaggcttacccggtccacgtgcgccggcgggttcttgaactccggtgagcacgattgggctattccggtgacgcgggtccccgggtcaagcttgagcaagactcacggcttcaccaggaagctctctgagggcttggatcgaacggaggaggacgggagaggggttggccacggtggttgctctcgggcggcactggcgggtcgcggggaggtcgccgaagttaatggctggctcgggcaagtccggcgaggtacggaggagggtaaatttggcgccattttgtcaattgggtcgaagggttttgaaaaggggattaagatctccggcgaacaggagcaaggagggcagacgagcagcaagaaggtggaaaaggtggctagggttttcacggagcgcggaaagataaagttcaaaacgcgccgccccccgcccccttttatacacagggcgcggcgcttcgggaaacccgcagtccaacagtacggtgtcaatcaacggtcatgtcaaaaacccccgcggaaccacttcgagcgagggcagcgtctccgccatctagcgacgtcttcggcaccagatgacttagtcgaactggtccctcggagggcaaatgttggggcgaaggcgaagacgccacccttcgctcgatgccttcgcctcaatcgttggaccaacggagacaagacaacggacaggctcaccctttgtcccatacgtcatcggacaaagacctgtgacgaggtcgtcccatcttgcgacctcgtccagcatggaggcccac

SEQ ID NO: 33128 - DNA, 318 bp, Zea mays
  Peptide Sequence Number=SeqID_76503
atgtggctaagttttattggccagagactagccacacccaagggccaagaccacacgaatcacagccgcagagaatcatgggatccagatctttttgacggaagcacagtcgcatgcgcagggagcagactgtgggcttcgtcggcggggctgttggctaaggactcgccacgccggagcatcaccaaaggttggggacgggccacgctggccatgctcaagggacttggccggttggtcgctggggcgctggccagggtagagcggttagggaagaagaaaggctcgccgcatgactgggtggatcgccggagctag

SEQ ID NO: 33129 - DNA, 2226 bp, Zea mays
  Peptide Sequence Number=SeqID_76504
atgccgactgcgaccactaaaaagagaaaactaggtactataattgaggggttgggagtctccgatcattttgctgtggatttaatgggaacttgtgctgcccccgggggaaggatatcttcgcccgagctcaaggaatcttcggcgcgaatgctggagattaccgggggtcgctggcctaggaatgttacgatcccccgtgcggccggcgaggacatgtttacgtctcgcttagcccatgagatgaagatttttccttatggacggaatattgctgttgttgtatcggcagtgatggataaggatcgccaacatgcgatgcggaagcgccgggcgtttactagggtcggggaccctagtcgcgaggtcaagaaggcacgtggaatcgcgaagtctgccgccccggcagcagcaagccaccgctggctgcgaagcctgccgtccacagccctagcaaaccttcatcaggagcgagggccactgtctccgctgcgcactgctgaggcggtggcgggtggggccgaactctccatggacatctgggtggacgactaccgtgtgggtggtgtcatgatgttcgatgcccgcacggggcgtggacttgtcggtcttggacaagattgtgatgtagggtcggatgctgggcaactgcctgttgtcccggctccggtggcggccgcatcggccgtgacgacggccgaggcaaagggtgcttcgcaggacccatggtccaagttttgcgctagcgacgagattacttcggccgccgcctctaaagacgtggcgggctcagttgcgcagcagctgaagcatgcggatgccttcgcccatcatgttgcgtcgggcgctctgaccttggagttcgctgccgagaggcaacgacacgaggggaggattcagtgcctccggacgcagcatacggaagctgtgcgggacaagtcagctgcggaaaacaagagccgcaggctgatggagaagttggcggctgcggaggccaagaaggacctcagtcatcggctggtggaggaaaagaaggatgtagacagggcctgtgctgaggcgcaggccgcccgtgccgaggccaagcttgcgcgtgctgaggccaatctcgctcgccaacacactgaggaggcggaagcgagccacagcagcctgcgtggctgtctggacaaagaggaggcctccactctcgcagaggtcgaccagacgcatgcacagctcgcggacgcgtaccggcatcttggtgcgcggatcgctccctttcatgcatccggtaaggaggtgggcctctgcttccttggatggctgcaagaggagttggagggggccgtgaatgccttgtcccgcgagggatgcaggcacttcgaagtctttgaccgatcagacgaagacttcaaacgcggaatcttccaggttgaggacccggtgctgaagcaatctgctggggcactttatgataggatgtggggccctcacggttatgatactgttcgggagaggtccgaccgggtgatggagcagatggcgcaagatgaggaggtcgaagacctcgaggacctggagagcacgctgcccgagtcgtcgggtgcgaaggaacggattggagggcagttggcgccgccgtccgatactagcgaaggccccgtgatgacccccgcgtcgaccaatgtcggcgaggaccctgtgctggctgctgcgccaactggtgaggacacttcggtggtggcgggcgaaccaactgccgaagaccctgtagcgtcggtcgaccctttgcaggttctgacgtgtggacctgcgcaagcaaccgctgctgacgatacttattttatggtgcccgcaaccgcagtgcctcctaatgacaatttatctggttctgaatctggttctttttcgtctgatgatgtggccacggcggagtccttgctgcgcgtggaggttagcgaggtgtctgatcctcctagtgcgaggaccaagtgccggcgacgaagggtggtgtcgaagcatagcgttggtgaggtttcgcgaagtggtaggcaccgtcggatggggatggagtgggaccgtcttcgagtagatcggtttggtaaacgagagttgatgtcttcgccgattgggacgagcattggtgagggggatctacggaatctttttgagggtgaggaattgaaaataatgttgttcaattatagggaggcaggcatcatcccgaaggttgagccgatgtag

SEQ ID NO: 33130 - DNA, 264 bp, Zea mays
  Peptide Sequence Number=SeqID_76505
atggcgcctttggcaaggcctgactgcctatcagactcactctgtcgagtggcactgcagtcggagtggcgcaggcggcgctgtccttctgtcagactggtcagtagagcgctttatgctgatgggggttaccagctgagaattaggcgtcttgagggtacccctaattatggtccccgacagatagatatcaggacgataaggatagacctaggacgtgaagccttagaaaatagatgggtaactaggtggctatttatatag

SEQ ID NO: 33131 - DNA, 105 bp, Zea mays
  Peptide Sequence Number=SeqID_76506
atggacaacaacaactatggacaaggagcagtgaggctcgcggctagcgtcacttccagttttgagtttggttcggacatagagatattaggccaagtcggataa

SEQ ID NO: 33132 - DNA, 171 bp, Zea mays
  Peptide Sequence Number=SeqID_76507
atggagattgaaggatttgttggagattgctacctcgctgacagagagtacgtgctcattcccaagcaaggagttacccaagaggaagtccaagagccagctctagagcctgccaccgaggatcttcccgcagccccagcttttgaaggcaagccccaattttatgcataa

SEQ ID NO: 33133 - DNA, 1455 bp, Zea mays
  Peptide Sequence Number=SeqID_76508
atggaggtagttgagttggttccttgcgcccacaacaagtggggcaactggcatgagttttggttctacatcgcggagggcacggtcgaagaccatctggggctccccgtgtccgagatgtgctcgcattattactcagcatacccgccgtttgaagtggcggaggaggatgcagacgaaggggcccttcgccgcgatccggccgcctttgtgcgtgaggcggaggatggggcggtgcgggtcgtcggtcggtacgtgccgaagacagagggccagcgtagctgggatattcgcgggtccaatgaccacttgaacagggttttcgagttgaaccgtctgccgtatggcggttgtcccggccaagacgatgtggatcgtcgcgggaagaaaccggtggtagagactggagacgaccccgcgtcggcggccgccccgtcgtctaagaagaggaaactaggtatttctatgggaggtctggtggtttctgatggttttgctagggagttgatgaggacatgcgcggccccggggggaaggatgtcttcgcccgatctccgggagtcttcggcgcggatgctgagggttaccgggggttggtggcctaagaatgttcctatcccccgcgcggtcagcgaagacttttttacatctcgcatggttcatgattggaaagtgtttccttacgggcggaatatcgctgctgttgggtcggcagtgatggacaaggatcgtcagggagctgcgcagaagcgccaggcggtcgtcaggcttcatgaggcccggccgaagaggcaacggggggctgcgaaggctgctgcccccgacggaggccagccgttgctggcggcgaagtcagccgtccctgcatccagcagggtgccggaggctccgaaggcggcccgagagttgccgccgggcaagcgcgtcgccgacttcgccaccgacattagtgtggaagattatcttgttgggtcggacgaaggccaacttgttgttgctccgcctgccgtggcgaccgcggcggctgccctcgtgcccagggcgaagggcagtgctcttagtgccggcggcgagatgccggcactcgctgccgtcagggacgaggcgggtgctgtgtcccgccggctgaaggagatgcaggaggcactaagtcaggcgtctgacttcgcagaccgcgcggcgtcgggggccctgacggcggttgtgtctgccgaagtcgagagacttcggacgcaacatgctgatgccgttcgggaaaagtcggtcgtcgacagtaagtgccgcaagctggcggataaggtggccgcgctggagggtgagaaaactgacctccggcgccaactggcggaggaaaggaaggaggctaatgaggccctcgccaaggcgcaggctgcgcaggcggaggccaatctggcacgggcggagggcagtcttgccaggcagcgcgccgagtag

SEQ ID NO: 33134 - DNA, 414 bp, Zea mays
  Peptide Sequence Number=SeqID_76509
atggcggctcggcctcgccccggcgccccgccttgccccggccatggcgcggccttggtgcggccgtggcgcggccccaacagcctgcccgccttggcgtgccccgcccctgcccggcgcggccgcgacgtgccggcccggcgcgaccttgagctcggaccggcgtgcctatggcgcgcgaccttgagctcggccagcgcgcggccccacgctgtcggcctcagcatggccccgttgttgcccgcggcgcaacagaacgatctggttgaggagcccgaagaactcgcaggagaagcccctgagcagcagtcgattggtggagggatggaggccaagtcacaccatcaaccaatcatcctaaggagtacctgcaaaaattatgccacaagcaaggctgagtatactaatacttag

SEQ ID NO: 33135 - DNA, 450 bp, Zea mays
  Peptide Sequence Number=SeqID_76510
atggcggcatggatgctgtccgagcaggggaacaggggcgccggtgatctgctgttctgtgagagctggagcttgggagtgggagagccgaggcgctgcgtggggaagaagggcgctgttgctgggcggccatggagcaggaaagtggaggtcggccaatgggacttcaaccgtgggggcgctcggctgctgggctacttgccgtggacagtagagggaggcgccatggttggagtagaggtacccacgcccatggagaagcctctgcgcgcaggggaaaaaggaagcttggccatggcgctagaggtacaagaaagggtgggaggaggcgagccaatatgggagcagggagggagttcgtccatgggcgacggtgggctcgcctgcccgagctggggggcggtccggccagagaagagcagggacgagagaagctcgtccgcgccctag

SEQ ID NO: 33136 - DNA, 501 bp, Zea mays
  Peptide Sequence Number=SeqID_76511
atggagcaggaaagtggaggtcggccaatgggacttcaaccgtggggcgctcggctgctgggctgcttgccgtggacagcagagggaggcgccatggttggagcagaggtacccacgcccatggagaagcctctgcgcgcaggggaaaaaggaagcttggccatggcactagaggtggcaatgagattgatggttcttggttttgactctagtaatgctagtccactacagccaaacaggatacttgctgagtatgttgatgtgtactcacccttgctctacacaccaaccccccatccccaggttgtcagcattgcaaccactgctcaggagaagatgaagtcgtggaaggagacttccaggagttccaagactacgacgagttctaggcgtgggttagcggcaaccccaagtcggctgcctgtgaaggccgcgtttatctacgtttcttttctgcactttgattattgtaaagactatgtggatgtctcagacttatga

SEQ ID NO: 33137 - DNA, 198 bp, Zea mays
  Peptide Sequence Number=SeqID_76512
atggcgactcggccccgcccgcctggtgcggcctcgcccgcctggtgcggcctcgccccggcgccccgccttgccccggccatggcgcggccttgggggcttgagcggtttcttgagtgcctctccgtaaggacctattcgttggatgaccgcctaggaaaactgtgcaaccatgagggtggaatgggatgcccttag

SEQ ID NO: 33138 - DNA, 96 bp, Zea mays
  Peptide Sequence Number=SeqID_76513
atggagaaaatccttgcggcgtacataaaggcttcgaagcaatggtgttccacccagaacaagctggctcaaggtccagatctccaaatgatttga

SEQ ID NO: 33139 - DNA, 453 bp, Zea mays
  Peptide Sequence Number=SeqID_76514
atgcaacggcaagtgcagccaaagttccatgaccgccagcggtggcgccgctcgctcccacgatggaggttcgccggagacgagggcgcgggcgcactaagggctaaggggcgcagggaaggcacaggaaggttcgggatggcacggcggacacggtcgtgggcatggcaccggcgcaggggcactagagagtggaagtctgcggtggagcagcccaacggtggcgcaaaccactccagcgagcaacagggcagtacatgggacattaagggcatgggggagttactcacctcgagaggaaactctagagcgcttgagcaacggcggggacgcatggatgccctgggtcgacggtggcggggctttggctgcacggggagaacgccggtgagcgtggattgggcgaaacagatgggctggggaaaactagagggtgtcccgcgttgctggtga

SEQ ID NO: 33140 - DNA, 216 bp, Zea mays
  Peptide Sequence Number=SeqID_76515
atgcagttggtggacgacctgaagaatgatgtacttaaccagtggatgctcgccaagcgagagggagagggatctgtgccagagaaggacaccactgatgccgaagctaagactgttgatgccgaagctgacagtgatgatgaagaggatgatgacattttgagttcgagcaagcctagccatattgaatttggcaaatctactgtgaagccctaa

SEQ ID NO: 33141 - DNA, 297 bp, Zea mays
  Peptide Sequence Number=SeqID_76516
atgaaggagcagattaaggatgtgattcttcctctgtgttgggtccccgcatttcctaccccacctactatcgctccttcaaatgtgctccatccgttgctgatcctaattgtcgccgccgctggttggttggttgcaagcagggagggtctgagagagcgcgacgagcagtggaccaaagtcatctcatgggagactggggcattcgtctaccataacttcctggtgctcactaaccccaagcaacgtgaagactatgacttttatgggaaatctggtgtttcaatgtatgtttaa

SEQ ID NO: 33142 - DNA, 573 bp, Zea mays
  Peptide Sequence Number=SeqID_76517
atggcctgttacttccctttgttgcaatgcggtgggctagggatgcagtttggctccaaaacaatatccactactcaatgcaactatcctggcatagtagcatcattgacattggaaagcaaaactgtgtcattgtgttatgttcataatgtttatgagctgatggaagaatttatgaagcttaaacaaggtggagatactgtcacacagtatctcaacaaattcaaccacttgtcccagtatgccatcgatcaggtcaacactgatctgaagaagagaaattgttttatgagaggcctcaatgaccggttgcagcggaaaatggccacctgcctcgacctcacttacacaagggctgtcagcacggcgctggcagttgaagccaaatatgcaggcccaggaaaatcaaagggctatggaggtgataggcccaaccaggggcctgagaaaagacaaagttatgtgaaggtaccaattcttctttacattgatgagaaaaaagtgtttgaggccgatctctttcaagtatctggtcatgaattcatgattcagacagacccaaagaggagttag

SEQ ID NO: 33143 - DNA, 558 bp, Zea mays
  Peptide Sequence Number=SeqID_76518
atgatggatccggccttgcttgacgacgtcatacgccggctgctggaggtgaagaatatcaagcctgggaagaacgcgcagttgtcggagtcggagatcaagcagctatgcgctgccgccaaggagatcttcctgcaccagcccaacctgctggagctcgaggcgcccatcaaaatctgtgggcataatttgatcgtcgtgttgacaggttttcatgctgtggcattattgtatttgatgaactcgtgctccactattgtgtcagtcatacaaaaaatgataatactttctttcatgctacataaaatgattctggttaatctgagtatgagttaccctgaaattcctttagcggagcttcctgatgaatatcaatctcacatattttcttctgaacagggtgatcttgcactcatcaattggattaaagaaatcccttgtgaaccaagggtagaagtcgtgcttattgatgatgcttttgtgaaaaggaagtggatggaatgcctatttcacccggacgcatatctaggtgatgagggtgatcacgataatcactag

SEQ ID NO: 33144 - DNA, 363 bp, Zea mays
  Peptide Sequence Number=SeqID_76519
atgccgtccccgacccgcgtctccgtggcctctctcccgaccgccggcgcagtgctgtcgtgtcgcgcccatcgagcgagccggtggccgacgcacactcgctcgacgcttcaccctaaaaaacctgcctgcgcctgggaggagcgggtgttggacgccgataagtacgccatcatgcactgtggtgtccaggaaattcttcattggatggctcccgggacaccacagatgttttgtagagatgaatttatcaaggtggacattagcggtgtgaacaagcgcgtgataaggctgtccaacgtgcagaacaggtgggcacagtggcttatcgatgggcaccagacgactgtgacaaatatctag

SEQ ID NO: 33145 - DNA, 546 bp, Zea mays
  Peptide Sequence Number=SeqID_76520
atgggagcaacatgtgtgatctgcttatcaatcaatgccagttcatctggtggtcagaatgttgtcggtgggaaagggaggattccaagttgtacgtgtagtggcgacaacgagtggagctacaaagaaaagattgagttcacgacctacttcgcatcggagatctctgaagggctgctctttgagatggaggaccagatcccttcgctcgctgagcttgttaagttcggcagtttgctggatttccatcaacaatgctcagaaagatacaggtcaaacttctttttgctggggagtggcagctttgcgaccaagtttttgaatgttgtcaatctggctgctctacttagttgcagagaggcaattgctgatgttgatgtcaattattgcaatactctgttctttcgtatgaagatgaagcatgacacgttgaatgtcgggggtccttatatgggtgcactcttctttggtgggcttatgatcatgttcaatggcttatctgagctgacgctaattgtcttcaagctgtctgtattctttaagtag

SEQ ID NO: 33146 - DNA, 750 bp, Zea mays
  Peptide Sequence Number=SeqID_76521
atgcccgacaacccgacgggcggcggcgcgtacctccagacgtctgtgatggcggccaacatgcgggactatgttgaggtcgtctttaaaaacgcggagaacttggtgcagtcgtggcacatcgacggctacgcgttctgggtcgtcggttataatctgacaacttgttttgatgccttgatccaaattaatgacatggtcttctatattcagtttttagcttacaaggtttaccactctagtttcgctgatgatgatgggatcacaaaagcttgcagctgtcctttgcttccactgaaaactcatatcaagggcccggcaccagcctctgaccctgataaagcggacattgttgatgaagccataactttctttcgagccaatgttttcttcaaaaatttccatgtgaaatgctcagcagacaagttattgatctatctgacgttttatatcaatattgccttaaaaagactagaaggttgccggacactagctgttgggactaaagcaatcattaatctgggattggagaaagttcctgtacctggggaaccagggtttcctttccctggacttttcactcttccccagtcccaggaggaagcagaattgttgaggaattatttgaagcagataagggaggaaacaagtggaagattgctcaactgtgcatacagagctaatggctttccaaacaagtggtggttggcttttgctaagaggaagttcatgaacattgtcatcctttag

SEQ ID NO: 33147 - DNA, 186 bp, Zea mays
  Peptide Sequence Number=SeqID_76522
atggagcaccgtcccgggttggagaggttgctagaggctgcccacctggagcttgacgggaagctgttcgtcaacacgcagcaggcccctacctggcgcgccaactgtcggcgtttcgagacgggggggcgtaaggagaggatccaggtgtacaatggggggtgtagcagagtgctacgtgtctag

SEQ ID NO: 33148 - DNA, 366 bp, Zea mays
  Peptide Sequence Number=SeqID_76523
atggcgcctcctgttgacgtggctggtctgcgccctaggttgggcgatgtggaagctcctccgaagccgaggtcgagtccgagcccctgggtcgggcgaggcggaggctacggcgctgtccttctgtcaggccggtcagtggagcggcgaagtgacggtggtcacttcggctctgccggctggggggcgcgcgtcaggataaagctttatgctgatgggggttaccagctgagaattaggagccttgaggacggttggggaggccgggaggacgttggagagctgaaaaatagaacggtgtcgatggaggagatgatcggcgccagagggagaagactaacgatcggcgcctggttggagagctga

SEQ ID NO: 33149 - DNA, 1689 bp, Zea mays
  Peptide Sequence Number=SeqID_76524
atgatgagcaagacgaaggcggctgtgcgaccaagatcctggcacctccctttcctcttcctgctgctcctcgcccagacttgttccccgcaggagcaaggcggcggcggcgccctccacgggagcttcgtccgctgcgtcgcgcgcctctcgccggccaccaccgacacgtccaggctcgtccacgccccgtcggccgcttcgtacccttcccttctgaacgccacgatccagaacctccgcttcgcgtccccgcggacgccgcgcccggcgctgctgctgaccccggcgaccgtcgccgaggcgcgggcctgcgtcacctgctgcaggcgccacggcctcacggtccgggcccgcagcggcggccacgactacgagggcctctcctaccgatccgtggcgggcgcccggcccttcgccgtggtcgacgtcgccgcgctccgcgacgtccgcgtggacgccgggcgccgcgtggcgcgggccggcccgggcgccacgctcggggagctctactacgccgtgacgcgcgagagcggcggggcgctcgggttccccgcggggatctgccccacggtctgcgtcggcggccacctcagcggcggcgggttcgggcccatgatgcgcaagcacggcctcggcgcggacaacgtggtcgacgccgaggtggtggacgccgaggggaggctcctggaccgcgccgccatgggcgagggcctcttctgggcgatccgcggcggcggcggcgggagcttcggcgtcgtggtctcctggacggtgcggctggttcccgtgccgcccgtcgtttccgccttcaccgtgcgccgcctcgtgcgccgcggggaccagcggcagacccaggcggctgtccgcctcctgacaaaatggcagcgcgtggcgcacgcgcttcccgaggacctgttcgtgaaggtggccatggagccggaggtcgacgacgccggcgagaggcatccatcggtgaccttcaagtcactgttcctcgggaactgcagcgggatggtcgccgagatgagcgcccacctgccagagctcgacgtgagggcgggcgactgcagagagatgagctggatccagtcgacgctctacttctacgggtacacgggcgaacaggcggccgaggtgctcctggaccggagcctgcagcccaaggactactacaaggtgaagctggactacctgacgtccccgatccccgcggccgggctgggcgggctcctcgccagggtcgtggaggacaggggcgggtccgtcgacgtggacccgcagggcggggcgatgagcgagacgccggagtcggacacgccgtacgcgcaccggcgagggtacctgtacaacgtgcagtacttcgtcaagtggggcggcgacgccaacgtgtcgtacgaggacgcgcacctggcgtggggacctggacctggggcagaactggagggggagacgagctacgaggcggccagggcgtggggggagatgtacttcaggggcaacttcaggaggctggccatggtgaaggccgaggtggatcccgaccaggcaagggtaatttctgaattctgcgcgacatctttgttcataagattcagcatttcattgcggcacggcactgctgatatcgcagtattgccgcccatgctatgtacagaaccaacactgaaactgcagggcgtcaactga

SEQ ID NO: 33150 - DNA, 1014 bp, Zea mays
  Peptide Sequence Number=SeqID_76525
atgatggtcgaggaggcatcgcttctagactacatgaagttgaggattctgaggcaggagcccaatattaggcctgaattgaccaaagctcaaaggccatcacatgttccccaaaagcataaacaggcccatggaaagcctctcactgtccccagagcccaaacaagccagctagggttgctcccttttaacctcgcgccgccacccccttatacctcaacgcacatctccaccgtcgtccgccgccgccgaaggacggaaggagaagagggtacggccgtctcctcgcccccatggtacgccgcctccatcccatccccgtgctaccattcccatcttgtctcctttctcttcctcgtccggcctgtgatttgtgaggccaactcgcccggcgtcccgcaggcccacgagaagaagctgtccaacccgatgcgggagatcaaggtgcagaagctcgtcctcaatatctccgtcggggagagcggcgaccgtctcacccgcgccgcaaaggtgctcgagcagctcagcggccagacccccgtcttctccaaggcgaggtacacggtgcggtcgttcggcatccggcgtaacgagaagatcgcctgctacgtcacggtgaggggcgagaaggccatgcagctgcttgagagcggcctcaaggtcaaggagtacgagctgctcaggaggaacttcagcgacaccgggtgctttggtttcggcatccaggagcacatcgaccttggtatcaagtacggctccgtcttactttacgagaatcttagctatggttcaggcatccatgacacgtacgatccttcaacaggcatctacggaatggacttctacgtcgtgctggagcgtgcgggctaccgtgtggcacgccgcaggaggtgcaagtcccgcgtcgggattcagcacagggtgaccaaggaggactccatgaagtggttccaggtcaagtacgaaggcgtcatcctcaacaaggctcaggccaacacgttccctgatgtttag

SEQ ID NO: 33151 - DNA, 339 bp, Zea mays
  Peptide Sequence Number=SeqID_76526
atgtgcactctcacaatagaggagggagacgaagaagtctggttgataggcgttcaacaaggtgactacatgggaaaatcaaaagaatgcgcaagtagccagacccctgaccggtgtatgatcttaccttttgacatggcgataaggactaagccaaacccagtctggtcattagacacttacaaactcaaagtttgtgtgctcaacgttgactcgcttgaggctagtgcttgcagtgtggtcgtgcgggtggtgtggaggaggaggccactagctagtggtgggggcgaggaagaggtggctatcggtagtgctggggcatggatcatagaggagtag

SEQ ID NO: 33152 - DNA, 204 bp, Zea mays
  Peptide Sequence Number=SeqID_76527
atggcgataaggactaagccaaacccagtctggtcattagacacttacaaactcaaagtttgtgtgctcaacgttgactcgcttgaggctagtgcttgcagtgtggccgtgcgggtggtgtggaggaggaggccactagctagtggtgggggcgaggaagaggtggctatcggtagtgctggggcatggatcatagaggagtag

SEQ ID NO: 33153 - DNA, 471 bp, Zea mays
  Peptide Sequence Number=SeqID_76528
atggcgcgcgcggcggtggacctccggccagtggctgcggtggccgcggctctccgatctcgacatgcggttgcggcggttcccaggccggcggtggcggcccccgatccagagggcgagcggcggcagcgcccttgtgcggtggcggcggttcccaggccagtggccgcaaatccattacctcgacgcgcggtggcggaggttcctcgatccgcatcggggcccttgtacgggcaagcggcggcgtccccgaagccccgaggaggcggcacttccaaggccggcgagcaagcgacgcccgtcgatgtgcgagtagcgacgacgacgcatgaggcgcgatgttcgagcgagcgacgtcacggaaggcgcgagatgcgcgcagcgatgatcacgcgtgacatcctccgatccggcgtagttttcttttcgattattgtgttttatgcctaccacatgtactatttacgctaa

SEQ ID NO: 33154 - DNA, 159 bp, Zea mays
  Peptide Sequence Number=SeqID_76529
catcaacatgtgaagctgctcggcttagagctactctccggcgagctccacccggcgctgttcggcaacctcaccagccttttgaactcatatgtgcataatagggctttgattctcaagtcctgcaatattggaagtatgcataacagagtttattaa

SEQ ID NO: 33155 - DNA, 397 bp, Zea mays
  Peptide Sequence Number=SeqID_76530
aaagttcctgtacctggggaaccagggtttcctttccctggacttttcactcttccccagtcccaggaggaagcagatccacccagctactgcctcctcggcgcccctcggccagctaaagggacctcctcggcgcgctcctttgccgccacaggcgccgccgcgcgcctccatgcctccgccccggcgcctgctgcggctggagcaggaggcgctgtgccgttctcggtccaggcgcccaacgagaagatcgagatgtactcgccggccttctatgccgcctgcaccgccggaggaatcgccagctgcggcctcacccacatggccgtcacgccgctcgacctcgtcaaatgcaacatgcaggtgagcgggcagcggcctagatctgtgtcccccg

SEQ ID NO: 33156 - DNA, 204 bp, Zea mays
  Peptide Sequence Number=SeqID_76531
atggtggtggtgggtgcgctgcaaagggaggtgggcggcggtagtgcgctgcaaaggggggcatgggcggtggtggtgcgcatggaggcgggcacgcgtgcgggggtacgacctattccaggcttcaagggtaagcttcccggtatcttcttgggtaaggcactttttctcctgagatgggttaagatgagaatggaagcataa

SEQ ID NO: 33157 - DNA, 753 bp, Zea mays
  Peptide Sequence Number=SeqID_76532
atggaggtccgttgccaaaccaacttttgccagaatgaagatggtttccccaagttgttgaaagcatgcacagtccgcctcggaatcaggagccagccagagtatgatggtcgtgaattcatcgagcatggcacagaaaagtgtgtcatgactgtatacattggatccagtccgcaccatgtggaatggagtgtcactactgctgggcacagattcaaagacacctgccaagtcgtcgctcgcaaggcattgaggaccctgtgtcaactatatgaagaagaagtggctgacaccccgctcagattctttccgccctttcagagaaaccgtcccgtttggatggccaggatgcgtgcattggaagggcagcagctgcttgaggacgaccccacaatcgtgtacctcactgcatacctgctcaccctggatgcacaatatgatttcttggctcggcaccaccctcaagcccgtgtagctgccttggaaagtcgtgaagtcattgctgttgaagccctgaagcaagccaaggatgagcacgtccagaagttgatggaggcctacttggtcacccataaccaacgtagagccctgtggatccaaagagcccgcttcatcccaaccctgttcaacccatcaaagctgaaagacccccagattcttgaaggtcacccggtctctaccagaggagaaaaagaaggcttgggaactcccggaaggagccatagtcttggaaggaattctagtctccgctaa

SEQ ID NO: 33158 - DNA, 435 bp, Zea mays
  Peptide Sequence Number=SeqID_76533
atgggcaagagtaacaagcgcaagcgcgagccgactcctccgtcggaggacttcggcgactcggaatactcggaggaggagttctcctccgagtccgagggatctccggctcccgtctctcccccggcgtcgtctgatgattcagacgactcccaggggattgccgcggaagtctggacgtacatccgggccgtcgagcgctccgggctcgagggctcggatgagtcggagttctcctcggaagaggaggactcggacggcggcgagggggaggacgacgacgatgacgacgacgacgacgacgacgacgatggcgacggcagtggcggggacagcggcggcggcgacgggagcaagggcagcaccaagggcggcagcagcgtgggcagcaccagaggcggcggcggtggcagcggcagcaaggccagtggctaa

SEQ ID NO: 33159 - DNA, 1482 bp, Zea mays
  Peptide Sequence Number=SeqID_76534
atggccgccgcgccccagccgccgccgctcgaggccgaccaaaccctagcgctcccggacgtgcttctcctccgcgtcctcgcctgcctccctgagccccagctcacgggcgccgcctcgctcgtctgcaggcggtggacgcgcctcgcggggcgcctgcgccgccgcctcgccgtgcgggactgggccttcgtcgcgcaccgactgccataccgcttcccggacctggccgacctcgacctgttcccggcctctatcgccgcgcccaccacggcggtgccccacggcgccgctgcctccccgcttctcacctgcggcgtggtctcgctaaccctagacaccagcgcagacccgccgctcggcgcctgccggttcatcgacgacgacgcgctcgaccggggactcgccgccgtcgccgctagcttccccaacctcagccgcctctcggccaccgccgcctctgagtccggcgggctcatggccatcgctgtcggatgcccgacgcttcaggagctcgagctccaccgctgcaccgacctcgccctccgcccggtttccgccttcgcgcacctccagatcctccgcattgtcgccgcgtcccccgcgctctacggcaccgccgagggcggcggcgtcactgacatcggcctcaccatcctggcccatggatgcaagcggctggtcaagctggagcttcagggttgcgaggggagctacgacggcatcgcggctgtggggcgctgctgtgcgatgcttgaggagctcaccatcgctgaccacaggatggacggtgggtggcttgccgcgctagccttctgtgggaatctcaagaccctgcggctgcagagttgcagtaggatcgacgacgaccctggcccagcggaacaccttggtgcttgtctcacgctcgagagcctgcagctgcatcggtgccagctgcgtgaccgtagcgccctccacgccctctttttggtctgtgagggagcccgtgagatacagttccagaattgctgggggcttgaagatgatatgtttgccttggctggcctatgcaggagagtaaaaatcctgttgttagaagggtgctcactattaacaactcgaggtctagaatcggtgataacctcatggggcgacctccagagtctagaagttgttacctgcaacaaaatcaaggatgaggaaataactcctacccttgcagagcttttctccaatctcaaagagctgaagtggcggcccgacaacaagtcacttcttgctgcaagcctcgttggcactgggatgggaaagaagggcagggtatttttcaaaaggcttatcttacctgcccatcaacgaatcaaagggaaggtgctcaacaattcagcaggatttctctgtctgctaagtgctaacctgatctcaaggaatgttgcgttgcataggtggggcctagcgcttcgcatgcgtggcaatgggtacccaaatacaaatacctaa

SEQ ID NO: 33160 - DNA, 525 bp, Zea mays
  Peptide Sequence Number=SeqID_76535
atggcacaaagaagccaatgggaagacatgtcatttgacggtcgaggtcaccatagacaggttaatcaagtcttagagcatgcagaccgagtattagagaaaaatgcgaagaaggtgtgcagggatgcattttccaatgctcgtctacaggtggtgaacgcgtacatgaagcgtcgaggtcattttatcaacaactttcgacaatattcggatgtctacttgactgtagaccagtacatggagtcttggtttccacagcaggcacagcagcaaccatttgttttccctcagtttcagtcgtcgatgcctcagtggggattacatgctccgccacctccacctccacctcagggatccggggtcatgggtcacaacacgccaccaccggtcataccagcaccaggaggagcttatgcaggggagggagctactccaggagagaatccaaacccattacacgacttcgtcaacgagtttttcgcttctgaaggtagtggacataactccatcgactccaatatgtga

SEQ ID NO: 33161 - DNA, 351 bp, Zea mays
  Peptide Sequence Number=SeqID_76536
atggagcggtggaggggaaaggaggtttatgatatatatataggcacgaggaaggccgaacccggtcctgaggtccgcgtagatcacggaggttgggtgcgcaggtggcgcacgaccgggcaatgccgaatccgtcgcggtttgttgcagcggccaacggaacttggggtggggatgaacctggcgactggtgaggatttcggttgggcggcggtggatcaggggcacatcgcggccaccagggcgccatggctgagcgttgcggcgcggcgcacggagcctgagccaggaatccgcgtgttcagttggggaagaagcggctctggggtggcccaccggcagaggtcttag

SEQ ID NO: 33162 - DNA, 363 bp, Zea mays
  Peptide Sequence Number=SeqID_76537
atgggttcgggcgctgctccaccatcctcggtctgggcgggtgttggcgctggtgttgggcactggagcttcgccgcaagggtgcgctcgcgttggtgtcaactaggagggtcgggggtcaccagaacaacggtgatttctcgtcgttgcccgttcgtagccgcaaatccgccgtgcgccgtggccaagcttcatccgcaccttaatgccgctccgttcaatttgacagtggtgaccgatgggagctcggacttcgatgggcgctttccgtcaatgccgccgccgtggcctgcttggtcacctggtccgcgcccgtctgagggttatgagggagagaagactaaccgtgagccgttggattga

SEQ ID NO: 33163 - DNA, 969 bp, Zea mays
  Peptide Sequence Number=SeqID_76538
atggcttcactagttcatcccgagcgttaccagaccgagaggaggctcgacacgtccgggaaggccaaggaccatctcggtgcgtattacttccagtcgagggcggattcggccggcgcctatatctcctcagtcagcggcgcgaggatcgagtccctggcgaccggtggtctgacgtcgatgcacgtggtcggcgacttcttgaagcgccggatcgcgccgctgcaggcgagggcacgcctgagctgctggttcactggctcgaacgacctcggccgggtccatcgcgggccaggcaccgacctatcctgggaggaactggagctcctggtgaagggaattactgtcgctcctactggtgagtccggctcccagcagcaggtgtttgctggcctcgatgccggcgacctgactctgcctgccactatcaaggcggcgccatcgggcccccaggttccgcccgctactgccgatgcggcaccgtcaggcccccaggttccgactgctgctgtcgcggcagggtcgttgggcccccaggttccagctaccactgccgaggcagtgccgtcgggcccccaagctccagtcggggatccaatagcaacaacatcgccaacggctactgcagacccaacaacggcggcgatgttgttgaatatgccgtcggcgacggcggaagccacggggggcgcgcccgattccatcccgccgcttgttctagaggagccggaggttattcttaggcgacagctccagaccggcaccgggctagaaacggcgccacctcccctccctcgggtgctgtcccacgctcatcaggctctccaggagaccgaggtggtgatcctgcgggagtgggaggcgctcgagactgagcaccagcgccttggcgattggcgcacccagctggaggaacgtaccaaggccgcgtcctgccaatttgctttggagcagttcgagcttgagtag

SEQ ID NO: 33164 - DNA, 183 bp, Zea mays
  Peptide Sequence Number=SeqID_76539
atgcaggcggcatgcaaccgtgccaagtgggcgtgccccttcgactccaacgagcccagcatggaggtccaggcccacgcgtcatgcaaccggcgcgccggttgctacgtggtccgggaaagggggataccccgaaaaggacccttctccgtgaaggaaacaggctccgagcctccctactga

SEQ ID NO: 33165 - DNA, 429 bp, Zea mays
  Peptide Sequence Number=SeqID_76540
atgggcaattcggtatggtctagttcaatcaatcgagcctatgagcaacaggagatcctagagatgctagaacattcaacagagggttatgaatcaacctggagcaggttggccacggtgagctcacaccgcacggtgttcttggttgatttgggggaaatcccaaattggggcttgctggtgagcaattggaggcacgacttggtgggttgggtgcttgactaccttacggactcgacggcacactcaatttataggctctgggggcggtggcctgtgaatttggagttggcgcggtggcggccggagaaggaagaggtcactggtggcgcaatcatggcgttcaccggtgtagtggttcagagaggatctgattcagagtgcctgaccaagcaacttgtgacgccaagatcttggatttttgcgtga

SEQ ID NO: 33166 - DNA, 435 bp, Zea mays
  Peptide Sequence Number=SeqID_76541
atgggcaagagcaagaagagcgggagttcgtcgcaccactctggtgacaagaggaagcgtgagcaaagccgccctcagaggactttggtgactccgagtactcggaggaggagttctcctccaagtccgaggggtcgccagtctacacctctcccccggtgtcgtctgatgactcggacgattcccaggggatcgctgccgaggtgtggatgtacatccgggccatcgagcgctccaggctcggatgagtcagagatctcctcggacgaggaggactcctccggctcgtccgaggaggggagcggcggtgacagcgacgaggacgatggcagcgatggaggcgacggcgacgacagcaagggcgacggcaagggcggcagcggcaagggcggcagtggcagcggcagggccagtggcaaagcgccactggcttaa

SEQ ID NO: 33167 - DNA, 366 bp, Zea mays
  Peptide Sequence Number=SeqID_76542
atggccatgatgggttcaacatctggaaaagatgtacctctgccaggcttgatgactgaggaccctttaactggtcacatgcctcgtcatggccagcatacccttgagagtctttcccttagtcgggtaagtttatgtaatcgcttccgcattttcgtatctccgatgatctgtaatgtctgcgtgacgggtgaaacgctcttgggaaaggtgggcctaatgacttgggaggttccgtcacaccaaccgcaccgggagaagaacctctccagcgggaatctcgccgacgaaggaaccgacgctgaaatattcgacgacatcacgaagccggagagcgggaccggtgcagcctgtatcacgagatga

SEQ ID NO: 33168 - DNA, 450 bp, Zea mays
  Peptide Sequence Number=SeqID_76543
atgggtaagagcaaaaagggtggaagttcatcgcaccattccggcgacaagcggaagcatgagccgaccctccctcggaggacttcggcgattccgaatactcagaggaggagttttcctctgagtctgaggggtcgccagtctacacctcactcctggcatcgtccgatgactcggacaattcccaagggatcgccgccgaggtgtgaacatatatctgggccgtcgagcgctccgggctcgagggcttggatgagttggaggtctcctcggacgaggagaactcctctgactcgtccgaggaggggagcggcgatgacggtgacggcgagggcgacggcgacgacggaggcgacgacaagggcgatggcagcaagggcgatggcaagggcggcgacggcagcagcagggccagtggcaaagcgccattggcttaaaatattagtatag

SEQ ID NO: 33169 - DNA, 188 bp, Zea mays
  Peptide Sequence Number=SeqID_76544
atgggtcgtgacctcggcccaaacccgacccgatataacgggtcgtaccggcccggcactaagggcccctttggtagggcttatttttcagcttcggctctggctcatgtcgccgtcacgccagccgccgtggagggcgccgccacctccatgaagaacgccgccacatccgtgaagggcgccgccag

SEQ ID NO: 33170 - DNA, 231 bp, Zea mays
  Peptide Sequence Number=SeqID_76545
atgggcaagtacaagaaaggtccgggttcgccgcgtcgctccggcgacaaacggaaacatgagccgagtccttcgtcggaggacttcggtgactccgagtactcggaggaggagttctccttcgagtccaagggatctctgcgttttagaggtaacgaccgagttatgcttgacactgtcagtgtttcagagttaacggtcgagtggtgcttgatactgtcggcgttttag

SEQ ID NO: 33171 - DNA, 525 bp, Zea mays
  Peptide Sequence Number=SeqID_76546
atgatgaccaccagttcctgggtggggaagagcaagccgggctgcgatcttggtcccaccctcagcttcaaggatgttcatcatccttgctggggtgggggccaggctgagccggcgctcaacctcccgtgcgggtctgcggcgtgtcggagtcgtcggctgggctcccggcggcccctcctgccggagggcggctgccgcgccgtgtgcacgggaggaccacccacgatgccgcgcgctgctagggcggcgttcgtgttctggggtggccctgcttttgcactgggatggcgccctcgcgcagaggctggtgccccactcgtctgggaggatttgagtggggatctgccgggggggctggtggcccccgccatcagcgccgaggcggaggcggctcgagaagtcctcgtcgccgacgggatcaccgccaccatccgcgccccgggcccccggttcttcgtacttgtcctcgcccctcgagcgtcggcgtgggcgagggcaagattgcagcagcgcccaccctga

SEQ ID NO: 33172 - DNA, 1419 bp, Zea mays
  Peptide Sequence Number=SeqID_76547
atggcgctccctgttgacgtggcgggcccgcgcccgaggccgggcgatgtggaggctcctccgaagctggggtcgaatctgtcttccgttgccgaggccgagtccgagcccctgggtcgggcgaggcagaagtcgttcggcagaggcaagggcggagtccgatccctggggtcgggcgaggcggagttcgtcgtcttccggggccgagcccgagtccgagccctggggtcgggcggagcggagttcgccgtcttccgagtcttagcccgagtccgagccctggggtcgggcggagcggagttcgccgtcttccgggtcttagcccgagtccgagccctggggtcgggcggagcggagttcgccgtcttccgggtcttagcccgagtccgagccctggggtcgggcggagcagagttctctttggcgcccctggcgaggcctgactgcctgtcagactcactctatcgagtggcactgcagtcggagtggcgcaggcggcgctgtccttctgtcagaccgcaactggcgcgctggttgcgtgacgcgtgggcctgggcctccaagctggcgtgtcagaagtcggagaagcgcgtccacctggcacggttgcatgccgcctgcatggctgcccgcccctcccgcccgttggtctgggcaaaagtggggggtcgcttcctggttgctcccctccgccggtggtcacccaagacggtgacctccagctcctggatggggagaggcaaaccaggctgtgatcccgtccccagcatcgggcgtgttcgtcatcctcgctggggcggggagcgaggcgagctggggctctacctcctgcgcgggttggcgaaccacctcctcttccagcttctggtggtggcaatcgtcctcccgcgctgcgacggaggcgtcctccagtcatgccggggaaggcgaactgttgctgtccagctaggatgcaacattccgccctttccctcgcgttcgcggcgaggacggcagcgaggatctgccggagcgcttaggagcggcccgctctttggctttgatggcttgttcgcgtcccttgagcgggatcgcgaacaagagccctccggtggccgcgtccacccgggaccatggctgctgttgcagaggtcgctggcgagcctcccgatgttcgtccccccacaggcccgaggtcgctcgtacccgcggggacggaaccggagttccgtttgtgatggcaccttgaatgccagtgttttatgttcattgtggctgtcgaggcctgaacataggcggagttggctcgaaaatgggaacctggttgaccggagcctagccgggttgtctgccagcggatccgacgccggagtcgatcagccgaggcctcgggtcgggctagcgcccttggaagatggttggccgaggccccgggggtag

SEQ ID NO: 33173 - DNA, 243 bp, Zea mays
  Peptide Sequence Number=SeqID_76548
atgccgacgcaccgcgccatcaagtaccgagcgtcgcgcccagttctcaccagccaagctggaggtaggagatggtacctgggccgttggatccctgctggacgtttgggattagaagctggggcgtcgtgtggttgcagtgaatcagaaccattgatctggggaccgacggatggatcagtccctgccatccaacccgcagataggctatggaccgttggatacagatccaagggctcctga

SEQ ID NO: 33174 - DNA, 243 bp, Zea mays
  Peptide Sequence Number=SeqID_76549
atgccgacgcaccgcgccatcaagtaccgagcgtcgcgcccagttctcaccagccaagctggaggtaggagatggtacctgggccgttggatccctgctggacgtttgggattagaagctggggcgtcgtgtggttgcagtgaatcagaaccgttgatctggggaccgacggatggatcagtccctgccatccaacccgcagataggctatggaccgttggatacagatccaagggctcctga

SEQ ID NO: 33175 - DNA, 318 bp, Zea mays
  Peptide Sequence Number=SeqID_76550
atgtcacagctcatgggcctagtggagtctaccaagatcactttggataacaggaaggaccttgtggtaaacttgtccactaagctagtggaaaagggtctccaggtagagcaaatggctactcaaatccaagagctcgaagatcaggtggaggccagggagaacaccattgagcaacagcttgaggaagccaaccagcacttggatctgcaccatcaagagattcaggatatggaggcagaaggggccgatgaggatgtagacatcgagggaggagaggagtcggagcctgcatccagtttggacactgctggctaa

SEQ ID NO: 33176 - DNA, 724 bp, Zea mays
  Peptide Sequence Number=SeqID_76551
gaccgccatcgcagcaaaatcctcccgagggcctccctacactgaccactcccctactgcccttgcccctttcgggtaccaggatgatcttcagatgactcgtgacctcactgctaaacgtagcaatacagacaaacatgccgcacagtccagatccgacggccaggatcccatcgcctacctccgtcttccctgggcggcggcgcgcacccaccgcgcggtggagaagtccggccacccgcccaacgggatgggctggttaccagagatcgacgcctcggtgacgccggtcgcgacgcgcggcggacagtggcggaggataccttgccacggccggattgtcccgcgggacggatttagccggcggcggtgcaatcggtgcggtggcgcggtatcgtgcaacaagggggagatggggaggagggaccacgaggcgctctacttattctcgggcgcccaggtagtcgcggataccgcggcgaagaccccgcccgaacaccacggccccggcgagctcgcgaagtccgttgagccgcggcgattctgttgggagaggatcgccgacaggcgggacccacaacgcagtgaggaggagcgcggcgagagatttaccgagcgcggacaagcaagccctggcaagtgggtcccgcgtcgcagtgggagtgcgagacgcggcgcaagggagactgacaggtggggtaagggtgtcggcgcgcgcgtatag

SEQ ID NO: 33177 - DNA, 342 bp, Zea mays
  Peptide Sequence Number=SeqID_76552
atgatgcgcgatgagaaggaggtgacgtggcaatggaacgaacaatgcaacaaggaggaggtggaactgctgcataaactctccgaacgacgcaaagaggcagcggaaaagtacttgtcacacttcacggtggatcgccaccagaagatcatccgtcaatgggaaaatctctcctacctccgcttcagggtcctgctagccacctacaccaagcacatcggctacaaatgggtcacccttggcccagccatcatatggtatgccgatgcatgtgttcgtgtcaccatcacagccgccgccactaggcacgcgacaggttctggacacggccggaccatctga

SEQ ID NO: 33178 - DNA, 291 bp, Zea mays
  Peptide Sequence Number=SeqID_76553
atgacgacggtggttcttagccccctacggaagcaaggagacgtcagcaggatcccagcagcgccgtcagctgcacttctacagggctcaggcacttctccgacgaccacgttatcgcatacacagggctctagcactcttcgacagccacgttggcatgtacacagggtgataaacccaacgggtagaagggtgcccgatctttcgatgagagatgatggtggtggaaaacttgttggagaacgacgttggctgcccgactaccacaaccaagatggtgtggcgccttga

SEQ ID NO: 33179 - DNA, 585 bp, Zea mays
  Peptide Sequence Number=SeqID_76554
atgacggccgtgacgggttcaacatatgaaaagaagtacctctgccaggaaggaggagaactaaaggcccgtttggcacagctccagctcctgattctaagcgaggatctggaggagccgtgccaaacgggagaatcaggaggatcagctcctcacgaggatcaggatctggagctaaagaatcaggagttggagctttgccaaacgggccctaagaattacctgaggaagtgggagattgtggagcgagatagggctatagactgggctataaattcacgatctatagccttggattgcgaggcgactgcccgagctcgggtggaagagctaagcttagccctggaaaatctgcaagcgcataacaataatctgcatgaggaagtgcacgtgctatatgaccagttggatccgaacgtgcaaccggaggttgcggcgatgggagccagaacatcaggagcagctagcagaggaccttatggggagttggatctctttggagcccctccttccatgaacatcgcagttgatcgttctcccgaagctagcagtggagcgggagcagccaaggacatggataaatag

SEQ ID NO: 33180 - DNA, 186 bp, Zea mays
  Peptide Sequence Number=SeqID_76555
atgcctgtcggcttgtgtcggcgaggtcgaactgaccgcagtcactttgccctttcactgaccgatctgacaggaaaacaacgccgctcaacccgctccgactgctgtgccagccacccgggcaaggctgacaacagcaagttcagcctcgggcgcaacaggaagctccgcctcgcccgaccttag

SEQ ID NO: 33181 - DNA, 561 bp, Zea mays
  Peptide Sequence Number=SeqID_76556
atgccgcgccaagccaagcccatgcccccgcccgcacctataaagccagccaaggcttcgaccgtaagcccccgctcgctatcaacctcaccggagcgccagatcatcggcaccctctatgcacggcgtgtctcggtgaagctcacagagccgggaatcaaactctacctcgccggagacaccggatcagcgtcgccggacttcaccagatcaccggcgtacctagaccgagctccacagccggagcacacgtcgccgacgagcccgaccgcctgcgcacgtggcccgaccgatttcggccatcaccaccgacgagtcgtacctcggcgtgaccgcaaggacttcctggagctaaccccgcccttcgccggaccttcctcgccgccagtaagccgcgccgccctgtttacttccgcggactataatctcgctgacggggagtacatccttgttccggagcaaggagttgctcaggaggtagcccaggagccagccccagagcctgccatcgaggatctgcctgccccagctttggaaggcaagcctcagttttatgcataa

SEQ ID NO: 33182 - DNA, 2750 bp, Zea mays
  Peptide Sequence Number=SeqID_76557
atgccgccgtctggcgcgtcatccgaggacacttttggcaatgtggcggcggaggagttacatcctggggacactgtggagtttggcgtgtcgtggatttcctcggtccgcgttcaggacatgcaacagcttggatattttggcagcggagtggggcgtgtcccgggggcggaggaggtccaccagctgacgccgaatgccgtggtggccctggtgaagtatgtttgggcgacaacttcgtatggcggtcggccctctgtagagggcacagtcgaagaccatccagggctccctgtggccgtcatgtgctcccaccattacacagcgtatccgcagtttgaggtggtggaggacaatgaagacgagggggccctttggtgcgctgcccgcatgagtagcgggcgcgatttagttgaagagtttatcgggtatggggtatggcccttggcgcatggttgggcgctgggcgaggtgtgccctcgcgagatgccctgccggggcgggaagctggtgcaaagtcctgccttcgcgctggatctacgtggccgggatcctgccgcgttcgtgcgcgaggcagaagacggtgcgacgaggatcgtggggcgctacgtgtcacggatggagggtctgtggagctgggatatccgggggtccaacgacagattgaatcgggaggctgtcccggccaccaaggagagaaagttaggtactgcagtggggaaagtgggggtgtccgatggttttgctgtggagttaatgggggacatgtgcggcctccgggggaaggatgtcttcgcccgagcttcgggagtcttcggcatgaatgctggagtgatgaccaaggaccgtcaagacgctgcgcagaagcgccgggcggttatcaggatggcggatccgaggtgtgaggtgaagagagcgtgggggagcgcgaaggctgtgaaaccggccgcgcctgggtccaacaagtcgtcggcgggcgcgaagacagccaccgctggcgggactaagtctcccccggtcgaagctgcgaagggacgggagctgccctcgccggagaaatgtgttaccgacttcggcacgaacatcagtgtggaggactattttgttgggtccggcgagggacagatggttgttgtcccgccttcggtggcaaccactttgccatcggcggagctaagggcgagagggaccgcgcaggacccgtgggccgccttctgcgcgagcggcgagattctgacagccactgccgctaaggacgtggcgggcactatgttccagcggctgagggaggcatcgcagcggctgtcgcagcagctgtcgcagcggctgtcgcagcagctgtcgcagcagctaagtcaagcggctgacttcgccgaccgcgttgcgtctggtgtcctaactgcggacgtggctgccaaagtcgagagacttcggccacagcacgcggatgccgtccgggagaagtcggccgcagagagaaaagaggagaggagggaggcaaaccaggccatcgctgaggcgcaggctgcgcaggcggagaccaaggtggcgcggacggagggaagtctcgccagccaacacaccgaggagtgggaggcgaggttcaacgccctgcgcggccgcatggataaggccaaggcctctacgcgctctgaggttgagcggacgttcgcacagtttgtgagctcgtatcgcgagctgggcgcgcgtactgctgacttcgaaatgcccgaccaggaggcgggccttcgcttcctcgagtggttacaggaggacttgctgatactcccaaccatcatggagggtttcatgtcctttgcctccctcgtcacctgtgagggggccatgaatgcattgtcctgcgagggctgtagacaatacgaggtcttcgaccaagcggacgagagctttgagcgcgagatcttcaaggccgaagacctcgttgtgaagcagtcagcgggggccctttttgataggatgtggggggcacatggtcgggaggctatcagggagcgatccgaccgggcgagagagcaggtgaagatggagcatgccgaggacgtcgaggactttggaagtctggtcggtgcgccgcccgaggctgcggaggtcaatccggtgctgcccttggacgccggcgaaggcccctcggccgtggccgttcctgctatggctggcggcgaagaccctgtgtcggcccctgcgccgacgatcgaaggtgccctgaaggtggcggacgagccgccagtcgaagaccccacgaccgcggccgggccctcgcagggttttgggcctgcgcacgcaaccgctactgacaatgctaattttgtggcggcttcgaccgtggttgctgaagatgtttcggatgattctgtgtctaagttttttgagtatgatgattctgggggttcggttgtgtggacggaggagtcttcggatgaggacttggattattttgcggcactggatgtggttgcggtggaagcttctccgcgcgtggtaggtgctgaagttattcctagtgcgagtgtcgggcgtaggcggcgaagggcagtcgcgaagcggagggttagtgaggtggagggaagtcgtcttcgtgttgacggggctggcaaacgagaattattgtcctcgccggctgggataagtgtaggtgagggggagttgcgaaatgtttttgagggtgaggagctgaggataatgctgttcaactacagggagatgggcatcatccctaaggttgagccaat

SEQ ID NO: 33183 - DNA, 144 bp, Zea mays
  Peptide Sequence Number=SeqID_76558
atgtcgccccgtcccccgtcctcactccgcctggaggcccatgaatattccggggatagacccggtgcctgggggcacatgcgtccttacattgaggcgctgggcactcaagcacctataaatacccccgtacagtgcccttga

SEQ ID NO: 33184 - DNA, 1176 bp, Zea mays
  Peptide Sequence Number=SeqID_76559
atggacaaggatcaccaagatgcgacgcggaagcgtcgggcgttcactagggtcagggaccctagtcgcgaggtcaagaaggcacgaggaatcgtgaagtctaccgcccctggtagcagcaagccaccgccggctgcaaagcctgccgcccccggccccagcaaaccttcatcgggtgcgagggccgtcgctcccggctcgagcaaaccgccttctgcggagcccacgcaggagcaagggccaccgtctccgctgcatactgccgaggcggcggcgggtggggccgacctctccatggacatctgcgtggatgactaccgcgtgggtagcgtcatgatgtttgatgcccgcacggggcggggacttgtcgtttgttgtgtttatgtgattgcgaatttgatggacttttcatggcaggcggctgccttcgtcgaacatgttgcgtcgggcgctctgacctcggagttcactgccgagaagcaacgactcgagggcaggattgagcgcctccgaacgcagcatacggaagttgtgcgagacaagtcagctgcggaaaacaagagccgcaggctgatggagaagttggtggctatggaggtcgagaaggaggacctcagctgtcagctggcggcggagaggaaagacgcaaacagggcctacactgaggcgcaggctgcacatgccgaggccaaacttgcgtgtgcggaggccaatcttgctcgccaacgcgccgaggaggcggaaacgagccacagcagcttgcgtgaccgcctggacaaagcgaaggcctctacccgcgtagaggtcaaccggacgcaggcgcagctgacggacgcgtatcggcagcttggtgcggggaccgctccctttgacgcgtccagtaaggaggtgcgcctccgcttcctcggatggctgcaggacgagttggaggtgctcccaacgattgtgacaggcctcatgtcatttgcctcgctcatcacctgcgaattggccgtgaatgccttgtcccacgagggatgcgggcactttgaagtctttgaccgatcggacgaagacttcgaacgcggaatcttccaggttgaggacccggtgctgaagcgatcggtcggacactttatgataggatgtggggccctcacggtcgtgatactgtccgggagaggtcagaccgggtga

SEQ ID NO: 33185 - DNA, 237 bp, Zea mays
  Peptide Sequence Number=SeqID_76560
atggagttgcagtcgggccacacggtggagttcagcacctcgaggatttcctcggttcgcgtgcaggagatgcagcagctagggtactttggtgacggtgttgggcgcgtcccgggcgctgaggagattcctgagcctaagggcgaattagttgtgttcgaggcattcttcgtcgctggccttcgcctactagcgcatcgtttcgtggtggaggtcttgcagaggttcgacgtctag

SEQ ID NO: 33186 - DNA, 393 bp, Zea mays
  Peptide Sequence Number=SeqID_76561
atgtccggtgcaccagaggactccaactcaaactcgtcaccttcgggaaattccagaggcaactccgctataattcaccggactgtccggtgtacaccggacagtgtccggtgctccaaggaagagcggcctcaggaactcgccagcttcaggaattcatttcagctgctccgctataattcaccggactgtccggtgtatctgcggggcaacggctatttcggcgccaacggctacctgcagcgcatttattgtgcgccagcgcgcgcagaagtcaggcacgcccatgctggcgcaccggacactctacagtacatgtccggtgcgccaccggacatccaggcgggcccagaagtcagagctccaacggaactttgtgttccaagtgattga

SEQ ID NO: 33187 - DNA, 234 bp, Zea mays
  Peptide Sequence Number=SeqID_76562
atgcccgtgcaccccgctcggccgctcctgcgaagggccgtgcccgtgctgacagtcgtcaccaccgacgccgacgccgacgccgacgcccgacggggccatgcggggccatggctaggggtacttgagcgtggaaggaccagctgcctcctcttcgcactcgcaattggaataatggaatctaagctgcatcttgtcaaggctttgtttagaacccctagagctaataattag

SEQ ID NO: 33188 - DNA, 357 bp, Zea mays
  Peptide Sequence Number=SeqID_76563
atggctgctatggacgttacaaaaaacaacatcaaggaggctttgaaagctaagccaaagttattgacagaggtgctagcatgttttgagaagatatgggaacaccaaatggagcaaaaaatgtatgggacaacactattcttgaatttagggaacttctttgccttgagggaaaaggataagaggcaaacttcaaggctgagatccatgttcaacgatgtattatggaagatggccgttgatgatgaggaacagagtattagcaagcaggctgatgactacgagaggtccaaaggtgaatgcttctcaaaactaggagcaataagagatggagagaggaagaatcctagccaatag

SEQ ID NO: 33189 - DNA, 225 bp, Zea mays
  Peptide Sequence Number=SeqID_76564
atggatccagagctccctgcggccaccatgggagatgagcaggggactagagggattcactgggaggagctcatggccggagtggagggggcgcggaacggcgttggggcagcaaacggcacccacggcgagcatcgggggggatcagagcagggagggtgtccatggattgagaggacgacaatcaccagagtaggttggggctccaaattcatgttctcttaa

SEQ ID NO: 33190 - DNA, 147 bp, Zea mays
  Peptide Sequence Number=SeqID_76565
atgcaggtggcacgcaaccgcaccgcggaggcgcacccctccggcttcgtcgcatccagcatggaggcccaggcccacacgacatctggagttgaaagttcaactcagctgaagtccagctcagctgaaaagctcagctgcagctga

SEQ ID NO: 33191 - DNA, 813 bp, Zea mays
  Peptide Sequence Number=SeqID_76566
atggtgaccaccaatttgatgggagaagcaagccgggctacggcctctgccccgccctcagcttcaaggatcttcatcatccttgctggggatgagggcggggggaggaagacatcctccagctctgcggaggaggcgtcctccagccatgcgggggaaggcgaactgttgttgcctcgccagggtgcagcattccgtcctctgtccgggcgactgtggccggctgcaccgggggtcgcacaacacgtcgtacgctgcgagggcggtactcatgttctgggacggtcccgttctcgtttctgtggcgagaacgggagtgaggacctgccggtgcgctttggggcggccgacgctcgctggtgcggtgttggtgagcaggtgaccactgtcgtcggtgctgaggtggtggcagccggagaaggtttctccgccgacgacatcgtcagtgccacctgcgctctgggcctccagctctttggctttaatggctggttctcgtcccccacgaggggacgcgaacgagggccttccagcggtagcgttcgccctggggccacaactgctgatgtcttgccgtccgagacggaggtcgttgccgcgctgttggtgcaacggtcgctggcgagccacccggagcttgtcgtcccgcgggccctccgatgtggaggttgttcatacccgcgggagtggaaccggagttccatttgtaatggcaccccgcgtgccggtgccttcgtcaaagtgccaaatcgagcgaagggtgtccctgcctgctttgtctctgtcagaccagcgactctggcggaggcctag

SEQ ID NO: 33192 - DNA, 1404 bp, Zea mays
  Peptide Sequence Number=SeqID_76567
atgaaactgatactgtgtctttgggagcaatcgtctagctttcaacttgttattgttatttcctgtacttccatgtctgatttatttgtaagattggctaagttttcgaacttaaagaaagagggatcatcctttgctggaagggttgttgaaccagtgctgcggcttttaaatcaaaatggtctagtagctgtatggtctactcttttcattcttatggcttatttgtttgagttcaaccactcaatggacgaagcaattgatttgctgaggacagttattaaattgtacccatcctctgtaaaccggcactacaataaagttgaatctgctattgcagcaaagattatgagcaatgtaaaaccatctgagaattccccaagtcttacatatactgtttcaatgctccagaaatttgcgagaaccttagcattgttaccttctgtccgagtgtccgaggacagttggtcactgatgattcggaggatactgattgtggtaaacaatcttttgaatgatgctttcattgggcttgaagaagaaaagaaaggccatgatattatgctgctgctagttccacctggaactgatcctctaccaacattgggagatgaagtaatgcctggaggcaatgtgcatatcatgaagaaatttcgtgtctttactgttcctaccatttcagctcttacgctttgctgcagcgtgatgctgactagttattatccagttcaggtcaatgttccaattcatgctttgatagctttgatgcgaagagtgctgttagttgatggatcattgcataacaagctgttcccttctacaacttcattgcatcaagagcttatttgttttgatcttccatcgttacattcaactttcttggatttgctgaatgcaactattaaaggcatgcgaagccaactcttacctcatggtgctagtatcatacggcttataacagagtacttcaaaatagcaaagctgcctactttgaggacaaaaacttatagcattttgcagctgttgctgacctccatgggtgttgggacgtctctgcacctgcttgaggcaacagtccgcaatgcagttgctgatctgaatgatgatggtgaaattaacatgactatgatcaacacaaattcatcgcaattgaccaatgaatcatcatcaaaagtttattcgaagaagaggaagcaagaaccacagatgcaaaactcaaccatctcaggttcagagaaagtagcaatcagcccaaggaaaagaaaaggttcttccataccaattacatcaaagggagtggcccctgaaagtacaggagatgttacactatcaactccacattctgtcaaaatagctgcgcttgaaacattggaagttcttctgaatgtgatattccttatttga

SEQ ID NO: 33193 - DNA, 1791 bp, Zea mays
  Peptide Sequence Number=SeqID_76568
gacatagtcaggagcatcgtcttcggagggagtctcgctctccaggtctgctcgagaggctcagctgagagagactcgggcagcacaggagcaggctcgagcagcacaggagcaggctcgagcagcgcaggagcaggttgggcagctgacgcaatatatggcttcttattttcaggcacctccaggcacttggacgcctccaccaccccaaggatcgcaaccagttcggggatgggtgccaccggtcttccagccaccggcgggatctcagccatttcaagcgtggatggcaccgccaccgacggggtgggtgccaccacctctggggtggccagcacaacagtacccgtggatgcatgcaggatcacagtgtcaaatgctcagggatcggagggtgctgccaacgtccaaggcttcctcgtccatggttctggagggagtggccaccttcctggtggcggaggagggagtggccaaaactcccacagcccacaggatgacctcgcctgcccgtgtgcctatctcctgtcctgcctggattctctctctcgtgaggtttccagcactctggtctggatggtgcgcacaaagaatgtgtcagcgccagggggaggagacgacgaggaccctcctcgccccttcaggcaggtcaaggggaagaccgtctacttagagcagcaggaaggccacaagaagcgacattgcatagagagttcgtcgactcgcgtctcggccttgctcctccgctccctctacacccgccacagctaccactccacctcccacttcgccagctccagtcgctcccgagccatccaccacttcagccatacctaccacctccaccactcccgcttccactactcctccttctactcccatttccgctccatccattccaccagtccgctttcggtagcgagacgagaccgagttgtcagcacagatagctctgcgagcgcaccggctattggatctccctgcttttctactagccgccagtgcagattccaagtatggatagaacccgaccatcagtggatgaggttccgttttgagcaagaggatgtcactattcatgccagccagatatgccagctgtttggatttcccgagtcatcgactcgccttcacatcctgtgctatggtacttctgatcctcctcgacgccctcacggcggagtcgctccagccacaactcacgtcacgaccctgttccgaccgcctttcacagatgggtcgcgacactctccagccgatttcactccagcggctaagtatctctatcagatcatgagacggtcactgctgcctcggatgggttatagggaagccaccactcacattcagctctggctacttggtgccttgatctcacattcagagtttgatgtggttgatttccttatctgtgagatcgaggacatgatattggatggtcttcatgctcgccgacaactgccatatgcgcactatctctgctacatcttcgcacagctgatccgcccacctcagttccagggcaccctcgaggcctcacgcctccaatttggatcctatcgtccagcccctgaggacctagtgccaggcactgtcgtccctgatgatgatgatgctgatgattttgggatcctgccaccgcctcctgtgcctccacgctcacatgatcatgaggccaggagttccagtgctgcccctgttgcccctcctgttgttgaccctgctctggttgcgatccttcattctcttacgcagcagcaagctcttattgcatctgagcaggctcgatag

SEQ ID NO: 33194 - DNA, 429 bp, Zea mays
  Peptide Sequence Number=SeqID_76569
atgggcaagagcaagaaaggtggtggttcttcgcatcattccggcgacaagtgcaagcgcgagccgactcctccctcggaggacttcggcgactcggagtactcggaggaggagttctccttagagtctgagggctctccgtctcttgcctctcccccgacgtcgtctgatgattcagacgactcccaggggatcgccgcggaggtatggacttacatccgggccatcgagcgcgccgggctcgaggactcggatgagtcgaagtactcttcggacgaggagaactcctccgactcgtccgaggagggcagcggcggcgacggcggtgacggcggcggcgacagcggccagggcggtgacggcagcggcaagggtggcagcggcgacggcggcgacggcagcaagggcagcaacaaggccagtggctag

SEQ ID NO: 33195 - DNA, 189 bp, Zea mays
  Peptide Sequence Number=SeqID_76570
atggcagtcggggtcagtgaggcattgtacgccaaggcggtgagccctgatctgttgccagtgaatcgatggggacagttgatgttctctggaggacatggttgctggagtgacttggccgtctatctggcaccgggttggactgtcgagtgggaccctacctcggctgaggaggagcatgaggagtga

SEQ ID NO: 33196 - DNA, 513 bp, Zea mays
  Peptide Sequence Number=SeqID_76571
atgtccggtggttcaccggacagctactgtgcgctgtccggtgtgcaccggacaggcactgtagactgtccgacaaagaatgtctcatcgtcagggggaggagatgacgaggaccctccttgccccttcagggagcgtgacgagactgaggtgaaaccactggatgctgatccccgtatgcttgaccttcagcgtgctactgctgcccggggcgcagctgtcagctcagattgctttgagagcgcatcggcttttggatctacctgctttcctgttagacaccggagccgactcagagggtcaccattcctatctgccagaccgcctttcacagatgggtcgcgacgctctcctgccgacttcactcctgtagcgaagtttctatatgagctgatgagacagttcgacgtggttgatttatttatttgtgagattgaggacacagtgttggatggtcttcgtgctcgccgtcagctggcatatgcccattacctctgccacatctttgcgtag

SEQ ID NO: 33197 - DNA, 723 bp, Zea mays
  Peptide Sequence Number=SeqID_76572
atggcctccctcctgcccacagcttcaaggatgttcatcatctgcgctggggaggagggcgagccgagtcggggctccgtcttccgcatgggctggcggtccgcttcttccctcagtatctgggggagaagggcgctcgccagtcttgcggaggaggtgcgcttcgggcgacagtcacgccgtgcgcaggtccgccacacccacggcctctcccgcgctgccggccgcaccaaagaggtggttgccgccactggtgtgaccgtcagtgccacctgccgccgagcctccagctctttggctttaatagcctcgttgtcgccccccgtaggaagacgggggcgaggaccctttcgcaacgacgcacatgctgagatgattgccgctgctggcgagccgctcggagcgaaggtcgttgtcgctgttggtgcagaggtggtcgctgtcgccggcgatccgtggatgcagaggtggtcgtcgccgttggtggagttgtccggagccagcttccagcgtgactcctgctggtgcagcgtagtccattcctgcagaaatggagctagggtcccgcttcctagggagccaagttgtgtgttcggaccccctggatggtggcttcaagtactaagacacctgccgcagggcggtggagtatgcaggctcacgggtctagtctgggggagccaagtgcgtccggactccctggatggtggttctaggtactag

SEQ ID NO: 33198 - DNA, 420 bp, Zea mays
  Peptide Sequence Number=SeqID_76573
atggcgcctccacctccctgcgtgccctctgcccttcttcactcccctgctgtttttctctccatggccggcgcccagcagctcggctcctctgctcttcttccccgtggtcgtgattctgcgcagagctgcgagcaggagcatgccatggccggatctaccccctccatggacgccccttcctgttccctgcgcccagctctctctatccagcgcgccccattttcttccatggaaaaccaacagcgagcccccttcctcgctgttcgtcatggtgcccgccggctgttcgacaaaatgcgcagcaagccgcacgctacagcagccctcccgttcgatctccactcccctcgtcgcgtgtcgtcgctctcgtgctcgctgcgcagccccatccgcgacgccgtcgaaaaccgtggttaa

SEQ ID NO: 33199 - DNA, 594 bp, Zea mays
  Peptide Sequence Number=SeqID_76574
atgggcaacccggggcgctcgcggcagttgtcaacgctggttgcttccgccgccatcttgctgtcactatctgcattgccaatttgttggccctacacctacgaacaagatggtatgcaacatccttttttgtttgttgccactgtttttccaagattcagtattcagcaggccatcagggtcgcatcgccacgggcgagcttcgtgacagcgctgcgctccctgggccagaacgtggacgaggcggaggcgcgacgcttcctggaggacgcgggcgtcgccgcgggcgccggcgacatcgaccttgcggcgttcctggccgtggcggcgcgcaagatgggcgccaggcagtcggaggcgcgcctcgccaagtgcttcgacgtgttcgacgacgcctgcagcgggtccatccccgcggagcagctgcgacaggtgatgctgaactatctcctcccagagccattcgacccactggccgacccagagacaaagaaaacaatagaaattattaatatggccgaagctattgtggatgaagtcgttactaaattgctgaccgaagctgcagataaagttttgaaggaagaagagtag

SEQ ID NO: 33200 - DNA, 111 bp, Zea mays
  Peptide Sequence Number=SeqID_76575
atggggtccaggcacagtgcttgctctgccgaggctgagtgccgaggtaaagaagaaggcgtcgaggtggatctccaggagttccaggacgtcgatgagttcgaggattag

SEQ ID NO: 33201 - DNA, 858 bp, Zea mays
  Peptide Sequence Number=SeqID_76576
atggagctgtcagaattacacgatggctttattgttcaggatgctcttaccatcaaagcccaagttcaagtcattagggagaagatagaccgtccatttcgttgccttgatggccagtaccgaagggaactaattagggtgtatctatcaactgtggaacaaatttatcggcgttttattgatgaaaaaagaaggatgttcagcaggctgattgaggataaactcgggtggtccagtttcagtggattctggctagcaatggatccaagtgtgcgtcggcacatgacacgggaaaagactgaaactatattgaaagttgtagtgaaacagttctttatagagaaagaagttacatcaaccttggtatttgactcgctatatagcggacttaaggcacttgaataccagagcaacaacaaaaaggggatacctaaaataacagaggcagatgctcggagcactccaatggtgcttattgatcaagacatgtttgttttggctgatgatgcgctactgttgtttgaaagagctgcattggacacacaatcacaccaaccattgcccaaaaaagatgataaaggatcaccgaaccgtacaaaggatgacacctcaagtgacgagtttgacaaagattctattgagcgtgatgatagatggcttgaagagctaggctgcaagacactggaactttttgccgtaactcatatattcagccgagcagaagcggcgtaccaagaagcgatggctttgcagctccaagaggaactcattcgtgaagaagcatccgagcgagctggaactgaacttaagccaaagcgtcgtgctgctgataagaaaaggcgtggcaagaacatgtga

SEQ ID NO: 33202 - DNA, 309 bp, Zea mays
  Peptide Sequence Number=SeqID_76577
atggccgcacacgccactgtgtacgacaagcttcggcgcagccgcctcttggacgtgatgtactaccttgctgatgagcccggggtgcacttcgtttggcagccaagccaagagtcatcggtactcgtcatgtcacgcgtgttcgacgactactatatcaaggactgtggcgtcatctcggcaccgaaggtgatgcagaggaggactggcagcaatgaccatttcgtcatcctcataaccgtcgggaaagagaatttgttacgtgggaaccggagtttgggtggaaagggaaatatattgggagtttag

SEQ ID NO: 33203 - DNA, 234 bp, Zea mays
  Peptide Sequence Number=SeqID_76578
atgccgagaaatatggtaaatcgcagattgccctcctcacgcgacctgagacgaggtctcccattccggttatggtgggtacaagtgcggtcactgcacgacggccagtcggggtcagtgaggcattgttctctggaggacatggttgctggagtgacttggccgtccaccttaccaccgggttggactgttgagtgggaccctgcctcggctgaggaggagcatgaggagtga

SEQ ID NO: 33204 - DNA, 720 bp, Zea mays
  Peptide Sequence Number=SeqID_76579
atgacttcccacggatcctccgatgacggaaatgcactgacccacactgacggacttgcacgagagggctttccccgcatcttgtgggaagtacttcagggggccgggtacgcaacaccccctcagtacgcggtgcagcagttcgagaagcaccgagtgcctcgctgtagggtgaggatgaccttggagcctcatcccctgcagccaggatggcgctccttggactccgagtctttcgggtaccgggcagaggacacgatcgaggcgatcgctctgcatggattgactaccttctgcggattccatcccttggagctggctacccaccccattggcttgttccccgctgagaaggaggacgacccaatgtggaaggatcgagtggagcacgccaaggatatctgggccatctacccaggtcagactgcgcacttgatagtacggtgcatgaatgctctgtaccgtctgcaggaattggaggagctggtgggcaccagggagaacaccatcgaggtcctagaggatcagctcattaacactcagcagcagcttgctgaggctaacgagcacctggacatgcatcaccaggagatccaggaccaagaggccaacgaggacgtcgacatcgagggaggagatgagcctgcctccagtgtggacactgccggctcgggaagaccaccttcccccgagtcgagtgttgcttcgttcactcactag

SEQ ID NO: 33205 - DNA, 393 bp, Zea mays
  Peptide Sequence Number=SeqID_76580
atgggcaagagcaagaaaggcggaagttcatcgcaccactccgacgacaagcggaagtgcgagccgagtcccccctccgaggacttcggtgactccgagtactcaaaggaggagttctccgagtccgaggggtcgccagcctacgcctctcccccagggatcgccgccgaggtgtggacgtacatccgggccgtcgagcgcttcgggctcgagggcttggatgagtcggagatctcctcggacgaggaagactcctccgactcgtccgaggaggggagcggtggcgacggcgatgacgagggcgacgacggtgacaagggcgacggcggcagcggcaaggacgacggcggcagcggcagcggcagggccagtggcaaagcgtcgctggcttaa

SEQ ID NO: 33206 - DNA, 2433 bp, Zea mays
  Peptide Sequence Number=SeqID_76581
atgcggcgcaagcttcccggcgacgcgccgctgtcggcggcggggcctggtcatgcgttgtccgcatccgcgccgtccgaggtggacctcgctcagctctccgccgccatcgcggccggggaggaccttggccccttcgtgcgccgggccttcgcgtgcggccgccccgagccgctgctcgttttttttcttggcgcggcgcgggaccgcgaggcggagattgaggagctctgccgcgcacacttccacgattttatccgcgccgtcgacgacctccggtccctccttgccgacgccgacgcgctcaagggctccctctcggcgtcccactccgcgcttctctcctcggcggccccgttgctcgcctcgcttgaatccttcctcgccgcgcgctcgctcgcggggaatctctcctccgcgctagcctcctcccgacgctgcgtacggctgctcgcgctcgcggcgcgggcgaacgcgcacttacaggccggcaatcatgggctctacctcgccctgcgcgccgtcgacgccatcgaccgtgatctcgcctcgggacccgagcctctgccgctacccacgctccgccgcatgctgctcagcgtcgtccctgcggtgcgtgcgcatgccgagcgcgagatctcccgggagttctcagactggatggttagcattcgcgctgcttcgaggcacctcggccaggtggccatcagccggtcggctgccgcgaggcagcgccaggaggagctccgctccaagcaccgcccgctggaggagtgcatcaccttggatgacgatggtgttggtgacctcgacgattttgcggcagccgcggcaacagctgaagcagcagatggtgccgctgcagcctcttttgaccttacgccgctctatcgagcgatgcatatacaccagacgctggcgctaggtgagcggttcaagaagtactacctggaaaacaggaagctgcagctgacatcggactttgatgtcattgcggcgacgccattcctcgagtcccaccaggtgtttttctcgcagattgctgggttctttattgttgaagaccgggtgtttagaacagggggtgggctcacatctcggccagatgtagatgcactttgggatgccgctgtggggaagatggtctctgtcatggaagataacttctccaggatgcagacagcaaaccacttgcttctcatcactgattatgctgctttgctttctgccacaatgcggcggtatggttatccagtagggatgctactcgatgtgctggctaagcacagggacaagtaccatgatttgctgcttgcagattgccgtaggcaggtggctgaggcactgacagcagataagtttgatcagatgctcatgagaaaggagtatgagtactcaatgaatgtccttgcatttggaattcagagctcagacattaccccagctttcccatatgttgcaccgttttcatgcaccgtcccagacatttgccgtattgttcgttcgttcattgaagattctgtgagcttcatggcacatgggggaggtggggatacctatgcagcagtgaagaagtaccttggtcggatcctatctgaggtggtggatgcttcgattaaaaaacttttggattcaggcagtggtctaagtgtgtcccaggcaatgcaggttgctgctaacatgtctgtgatggagcgggcatgcgagttctttacacgccatgctgcacaactgtgtggtgtgccgctgcgtgctgtggagcgtggtcggcgggacttcccacttcgcaggtcacgtgatgctgcggaggcgctcctgctgcggcttctgcgtgccaaggttgatgagtttatgagacaatctgatggtatcaactggatggctgatgactctcctcctggcggcaatgagtatgcgaatgaggtcatcatctaccttgagacgctcacatcaacggcacagcagatccttccccttcctgtgctacaccgtgtacttgtggcagtgcttgcccacatctctgaaaggatcatcgagctcttcttgaacgattcagtaaagcggttcaatgccaatgcggtcactggtatagatactgatctcaaaatgtttgagacgtttgcagagggcatgtctagcctgtttgtggactcaggtcaagaatctgcaaaaaatgaaatgaaggctgcactagtggaagcaaggcagctagtgaatcttcttatgagcaatagtccagagaatttcctaaatccagtgatccgtgagaagagctataacaagctagattatagaaaggttgcaatcatctcagagaagtttagagatacctcagagagttatttctcaacatttgggacaaggggtgccaggcagaacccaaagaagaaatctctggataccctgatcaagaggctcagagaagccagttag

SEQ ID NO: 33207 - DNA, 225 bp, Zea mays
  Peptide Sequence Number=SeqID_76582
atggcgcagtgggttcgtgtcctcagtcgtggtgagctcaccggcgacgatttgacggctgtaaagagtcacggcgacgcgacagaggtgttcggatacgtggcgcaaggccgagaggcggcggttcaccggcgagcctatctgctccagccgcaaagtaggggggtacggcgggcaaaaaccctagaatttgaaagttacaaagctcaaaagttgagcccataa

SEQ ID NO: 33208 - DNA, 327 bp, Zea mays
  Peptide Sequence Number=SeqID_76583
atgtctccgcctctgcgccactcattctcggtaaagggcgtgggagcaggcaccccatattcgtccgacactaaccccgacatcgactcgcgcaatggctattgcatgtccacgaggacgtttcacagcatgcgtgcaccatcattttcgacgtcgtcagacgtcccgttcgtcttaccggccttcgccctgttcttcctccccaacctactgcccccgcccatggttacagtcgcaagccgaccgaggctcgtcgacgcgggtacggggcgagtcggtattgctcctagcctttcttcgtgcgtgccgccgaggaggacccgatag

SEQ ID NO: 33209 - DNA, 816 bp, Zea mays
  Peptide Sequence Number=SeqID_76584
atgggacatgaactcaaggctctcgaaacggagcaccgtcccgggttggagaggttgctggtgactacccatctggagcttgacgggaagctgttcgtcaacacgcagcaggcccctacctggcgcgccaactgtcggcgtttcgaccccgggggggttgagtccgagccctggggtcgggcgaggcggagtccgtcatccgaggtcgaggctgagtccgagccctggggtcgggcgaggcggagtccgtcttccgaggtcgaggctgagtccgagccttggggtcgggcgaggcggagaccgtcgtccaaagtcgaggttgagtccgagccctggggtcgggcgaggcggagaccgtcgtccgaggtcgaggttgagtccgagccctggggccgggcgaggcggagaccgtctttcagagtcgaggctgagtccgagccttggggtcgggcgaggcggagaccgtcttccggagtcgaggctgagtccgagccctggggtcgggcgaggcggagcttcctatggcgcccgaggctggacttagctgctgtcagcctcaccctggcgggtggcacagcagtcggagcagggcaggcggtgctgttttcctgtcaggcgatccttgcattgaatgctcctgcgatacggtcgattggcgtggcgatctggccaaggttgcttctccgcgaagcctgcccgagctgggcctcgggcgagtcgaagctttgtgctgatgggggttaccagctgagattaggagtcttgggggtacccctaattatggtccccgacaggatcgtttcctactcaccttag

SEQ ID NO: 33210 - DNA, 492 bp, Zea mays
  Peptide Sequence Number=SeqID_76585
atggcgcctccacacttccagccgccctcctctgcccagcagccgagcgcccagctcctcccctcggcagccatggcgtcctccccttcctcccgccctctgctgtccacggcgagctacagcagggagccgagctccaagctcccacggcgctcgagctccactcctccctgttcgtcttcaacccaagtcggcgccctctcgctggctgtcctctccgtcgcgcccctactggccgtgcccctcacgctggcacacaggcgcccaggcaagcttccccatggcgctcgactccctgttccatggagccctgtggtcgcccccttcttccccttgtggctgcgctcctctgctccctccatggcgccccctgctccttcctcgacgcgctctagccgtcaatcgccattcgtcgcgcacgcgcgttcaatacaagaccggtcgggtgaaccacgtgcttgcataactcaaatccgatcccgctcaggttga

SEQ ID NO: 33211 - DNA, 568 bp, Zea mays
  Peptide Sequence Number=SeqID_76586
atgcaggggcactccgtccccacacacatcaaccgtccccatcgattccccgtcagcagatcagggctcaccgccttgtcgtacaatgccccactgaccccgactggccgtcgtgcagtgaccgcacttgtacccaccataaccggaatgggagacctcgtctcaggacgcgtgaggggatatgtccactgccaggttcactcagcgctagcagtgaggaagccagggaaggtgtcggggctgcaggaacagcggcgtttcgccgaggggctgcgcagcgagggaaggtggggcgagctgctgctgtgcgcgcgcagggacttgggggagggagatgctgcgcagggcgccgggaaaagcaggccacggccatgggagaaatggagctgcgcatttgccgaacacctacagcgcgtcgaggaaggagcagggggcgccatggagggagcagaggagcgcagccacaaggggaagaagggggcgaccacagggcaccatggaacagggagtcgagcgccatggggaagcttgcctgggcgcctgtgtgccagcgtgaggggcacggcca

SEQ ID NO: 33212 - DNA, 1062 bp, Zea mays
  Peptide Sequence Number=SeqID_76587
atgaaagcaagcaagaaggctgcacagctgctgcgccgcgagcaggccgggctcacgagcaccgacgtcgccgcaccccgagcaagcaggcacgagcgtgtgggcacagccccgccgccactgcaggccgcgccaccacaagtcgaaggctaccaccatcagcagcagatcatgtcaccaccacatctcgcatgcgttgccacgcacgggtgggcgcgggcactgccgccttgcagcccagtagcgcggacgcgcagcacctccaccatgctgccggcaagcaggtgtgcgggcgtgccgcctcgcagcccggcagcacgtgcctcacctccacgccacctaggcgtgcgcgcgagcgagcgcatagtcgccgcctcctcgccgagcaggcacacgggtgcacgggtgtgctaccgccgccaccaccctggaggaaggcaggcacggccgccaccgcccatggagaataaggatagaggaaagagaaagaaagcccagcttgcccgcagcccactgcgcccaacctgctcgagctaccgcgcgcccagcagcatcgcgcagaccggcaccctcgcgaggcccacctcgccgcgcccttgccacagcagccatgcccgcacgcgccacgccaccctgtgcgctccagccgcgtctcccgccgccaactacgcccacgtcgcgcacgttgtgcggacacgcggctgctcatggccctgctcgccccgctgctcctattctccatcaaaccatccatccgagcctcgcacatctctttcttctgtgcagttcagtctcatcttcctcctccatgccctggccaccgagcgcctgcctcgatgcagctgcgcagcgtgccctgcgagtcgtgccaccgtcgcgtgtcgctccggcgagcctcgccagcgagcgcccaccgcatcccctgcggccttctccccgccgtcgcccagacgagcctcccagcccgtgcccctgccggccggcgagccgctctgtggacgcaagccaggcatggccgaggagggccgctgtcgaagcctctgcggctcccttgccacctga

SEQ ID NO: 33213 - DNA, 156 bp, Zea mays
  Peptide Sequence Number=SeqID_76588
atggctataccgcactcgcacatgctcgtcgccatggcaccattgcggtttgctcgctcgcttgaacagagcgaagagccgaagctgccgaacgcaagtgatcttggccctgccgccccctggagaagcatcaccctcggccaaatgcagctctag

SEQ ID NO: 33214 - DNA, 489 bp, Zea mays
  Peptide Sequence Number=SeqID_76589
atgggtccactttccagaaccaaagacaatcggggcggaggttcacctactattggcgtaggcaatgatgcctcccgcaggagcgcggagaggcatgaccgtattctagcgctccgggtctcgaatattctaccaaatccatacctgggaaaaggcgcgcgagttaagaatcggctggcaaacaacgtgcatgttgcaaagttcctggaggtgtatatgtctgtccctcaaagggctaaaaaatcagcgaatgggaggacggcgtcaatcgctctccccaaatttgagttggtgattcaagcggcccagaagagcccccacaggggcatgccggaggcgtggctccggtgtctcaaagaagccttctacgatgccgaggacttattggacgagcatgaatacaacgtcctcaagggcacgtccagaagccaaaaaggtcccctgctgggagaggatgtgaaagctcctccatttcaactactgtcatga

SEQ ID NO: 33215 - DNA, 417 bp, Zea mays
  Peptide Sequence Number=SeqID_76590
atgggttcaacatcggaaaagatgtacctctgccaggtaccaaactttgggtttgaaataattaagctgagaccgggtgggtggcttgcacgagaaaggagtctcggtgtagtgtctccgtctgagtcgattaaggaccgtgtcgatgtaggcctgctgaccgaggaccctttaactggtcacatgcctcgtcatgggatccactttagtaagcatttctgcaaaacagagtctttgattattgagaagccttaccttgactcccttataagcagcatacccttgagagtcttttctttagtcgggtggtaccaaaggaagaacgcaaggaatgaagtgcgggaggaaaggatcctccatttaggacttttatgtaaaaatttatcgggaggagtttttgcctcccttggtatgtaa

SEQ ID NO: 33216 - DNA, 225 bp, Zea mays
  Peptide Sequence Number=SeqID_76591
atggcgcagtgggttcgtgtcctcagtcgtggcgagctcaccggcgacgatttgacggctgtaaagagtcacggcgacgcgacagaggtgttcggatacgtggcgcaaggccgagaggcggcagttcaccggcgagcctatctgctccagccgcaaagcaggggggtacggcgggcaaaaaccctagaatttgaaagttacaaagctcaaaagttgagcccataa

SEQ ID NO: 33217 - DNA, 423 bp, Zea mays
  Peptide Sequence Number=SeqID_76592
atggtacagggactgaacaagatcaaattcagcgcaccgccaccggtgatctccgcgccacgatcctcgctgacgctgcgattcgtgcgccttggcgtgcgaataacggtcaatggtgaaaagatcgtgcgcctggatgatcttggggcactattggccctgtcgccgtactcacttgcaccggcgacgtggcagcgcgaccgttgccaccgtgccactgtttctcgcggttgcgccatgctctcggtcgtttcaccacgtcgtcgcaagctgtgcagctttgcctcggtcggaccaataccagaaaggcaaccacgcaatgggaatggagagatggcgagagttgcatgtaccctccgtggcacgaggctggacggtggtgtatctgtgctctcggttggcgtgaacccgttctggtcttga

SEQ ID NO: 33218 - DNA, 357 bp, Zea mays
  Peptide Sequence Number=SeqID_76593
atgaaggccaagtcacaccatcaaccaaatcaaggaggcctcaccgccttggcatacaatgctccactgaccctggccgccgccgtgcagtggccgcacttgtacccaccatatctagaatgggagacccagtctcaggtcgcagcagcagggaggaccgaacaacgtgatggcgttgccgggcaagagattgacgacgatgaggtggagcttgctgctggggagagggagctcggctgcagggagaggctggcgggcatggaagatgaagggggtgcctgctcctgcacaaggctgggcgccgagtctttgttggaagcagccaggcaggggagcttgctgccgggaagggggtga

SEQ ID NO: 33219 - DNA, 690 bp, Zea mays
  Peptide Sequence Number=SeqID_76594
atgaggtggagcttgctgctggggagagggagctcggctgcagggagaggctggcgggcatgggagatgaagggggcgcctgctcctgcacaaggctgggcgtcgagtctctgttggaagcagccaggcaggggagcttgctgccgggaagggggtgacgagaggagccacagctcggccagggagggagcttggcttgctgttgtcgtgagggagagtggaggacggcgtggagaggaagggagcagggcaggtgggctgccatttaaagaggcgtcgccggcagccattgggcgagatgggcggcctgcagagctctggtaccttcggactcggtcagaaccacaatatgaagaagtgcgaagaatgcgaaggttggcgcagaaccgaagctatgctcaggggaccttcggcgtgatatcagaaaaagggaaccgacttaaaagggaaaaggctattcagacctcgatggattactatagagtcattagcaaatcatttgagaacaagtccccaacattggcgcccacctccggtgaactcttttcgaccaccttcgacagcattgaccttcgtcatgccaccgaagaaagcttcagcgacaggggctgccgctctgcagccgctggacccgaaccaggagaccctttctcttcgagaagcccgaagccagaaaaagaaggccactag

SEQ ID NO: 33220 - DNA, 222 bp, Zea mays
  Peptide Sequence Number=SeqID_76595
atgacgaaaatatgtccttcaaatccgaagctcagaagctcagaaaacttaagaaacaaagcaactgttggaaagcaagagctaagaaatcaagcaaagcaaagtaggcgtatcaaatgtgctcgggggacaatctggggcagcatccaacaaccctcatggatcgcccagcccatggccgctccagtccagccacccacctcgctgatcatcttctcttag

SEQ ID NO: 33221 - DNA, 414 bp, Zea mays
  Peptide Sequence Number=SeqID_76596
atggagatttgcaggatagaattggggttcaaatgggtcaaggcaactggctgttggggtcgattggaggaatcaccacagcagacgaactcgaggtcttcctcttgggcaccatctcgattctaccagcaagcagagtgggaggcgaatggcagagaggattcggaagcgagaaagcaagaactagggcacggaaagcagaggcggctaaaagcgcagcacttatgggatattctcgagccagataccgtttcaaaaagtgcccagtcagcacccgacggttatttccaaaacaccggtgtgccacatgatcacccggcagttatttccatagcaccggtgcgccacctcatcactcggctatcatcctcaaagtggcccacgcagcctgctatcactcagtgttacctctaa

SEQ ID NO: 33222 - DNA, 417 bp, Zea mays
  Peptide Sequence Number=SeqID_76597
atggatcagggaggggcactgcttgggcgctcggatgggggagccgagggggagaagggaataaggcaggggcagcgggaggcgcctgctagcttgaggaagaagaaggggatgagggaaagacgccatggctgctggagaaatcagggtgccatggttggagcagaggtacccgtgcccatggagcagggagggagcgccatggggaaactcgggcttgagccatggagcagggaagggagctcgctagtgggatatcctgtgccatgggaggagagggaaacgccagggagctcgaccaacgaggttgttggccgaccacggagacatcctactgtcgagcgccatggaggggctggagatggcgtgggaaagagtgggagagttgcagccgtgtgggagacgaggaagaagatg

SEQ ID NO: 33223 - DNA, 1026 bp, Zea mays
  Peptide Sequence Number=SeqID_76598
atgaacatgtgtgagctcacccttgctgtctcacaccccccacaggagaagaacatgtggttcaagaggagccacagcgaggagttcgattcgatcaagaggaactggggtgtagttcgcttcgtcgttgtgccgttaatggggctcggtgtatgcggctcgctctgccaaggtggtgacgaggatgatgtttatgactatggtaatggtaagtggtattctttccgtttggaaaggcaggagatagagtctgtgaggagctgctcccctatgctcccgctggaggcgccccctgcaccaccactgagcgccccagccgctggagtagctgctggaggagaccaagacgacgaagaggagctagagctggaaggatgggttgctcgacccatcactcgtgacgccgctcacgggtatcacttccacgacacgctcgacaccctgttgcgccaggcactcgaccgacgcacttggtctatcgagtatcattgtgttgtattccagcatagtcacgaggtttacccagaccgctgggaggcgacctggttggtgcgccgtccggagaacagtctccggggtgtggaggtctgctcagagcactattctatctctgagcgggactcagctgaggcagtcatgcaagatgccgcacgacgtgcactttcgcactactgctcagtgctcggtggggtagctgatggtcttaacttgaggtattacacccgctgcccatctggcagcacaggaggcgtggttgtctcacctgttggtgaggacaatcctaggttgagcagcacagtcaacctagccgccgtgctaaacacggagctggaccatgcattagacgagccgagtagggcttgtgttgagatcgccctgttgcgggctgagcgcgcggagcatcgtcacctggaggatggctcccccgctcccatcgggactcagcacccgtaccgctcacctcagcgtggacaccatgcttatggtaatcccgactgtagtaccaagataaatttagaatcatag

SEQ ID NO: 33224 - DNA, 393 bp, Zea mays
  Peptide Sequence Number=SeqID_76599
atggcacagtgcaggggtgatctagctcgcatcaagcaaaccgcgtgccgccgtcgatggtacgtgaccatgccatcctgttcttcttcgtcgtcctctgcgagagcatcgccgaccatgtcgtcgtctgagaaaacgctaagcgattcgtcggtggtagatttgcagctcggtcacatagttgagtttgggatctcgaggatcttctcgggccgcatgctggagatgcaacggctaggttactttggaagtggtgtcgggcgggctccaggggctgaatatgtccctaagccggagggggagttggtcgtgtttgaagctttctttgatgctggcctgcacctgccagcgcatcggttcgtagttgaggttctgttgagatctaaactatag

SEQ ID NO: 33225 - DNA, 75 bp, Zea mays
  Peptide Sequence Number=SeqID_76600
atggtcgtgatgggttcaacatctaaaaagaagtacctcttccaggtggatcccaaacaggaggatgaaaactaa

SEQ ID NO: 33226 - DNA, 1734 bp, Zea mays
  Peptide Sequence Number=SeqID_76601
atgttcgacgcccagacaggactgtctcctgctggggtggagtctggccagttggcggttgtgccgtcagtatcggctgccggcctggtggtcgtggcaaagggcgctatggcgacggatgacgcggggacctcgacggacccgtggttgaggttctgtgccgtcgccggggtgaccgccttcgccgagcaggttgcctcgggggtgctgaccctcgcagtttgtttccgagaggaggccgcccgcgtggaggccgaaactgctcgcaagcgcgccgccgacatggagttggagctaaggaacatctgcagccatcgcgtgaataaggagtcgtccacccgtgctggggtcgagcgggcacacacacttgttgtggatccgtaccctgagctcggcacgctgaccgctcccttcgaccaatcgggggaggaggtggggcttcgctttctttggtggttgcaggaagagctggagttgctcccatccatcacgatgggccttatgtcctacgtgtccctcattacctgcgagggggctacgaatgccttgtcccgagagggatgcaggcatttcgaattcttcgaccgggcgaatgaggacttcgatcatggagtgttccaaattgaagatgatgtgctaaagcgctccgtagggagctttatgataggatgtggggtccccatggccatggcatcgtccgggagagggcggacagagcgctggcgcaggtatattgttggtttggagaaagaggcgggagctgaagggcatacaacacctccagggggtgctgctgaagaccctgcggcggcggctgcttcggcgcaggatggggaattggggagccctttctcgtgggttgacgaatcttctgaagatgacttagattattttgcagcgttggaacttgctgcattggagtttccgctgcgattcgcccctcacgaggtgctgccgccggcccccagcccccggcctccctcctctccctcccagccactggctctaccgctgaccccctgcccaggcgcggagcgcccctctgcccgcgccacccgcgcgccctgccctgctgtccatctccggtcgtcgatggtgctgcgccccaccccggtcgcgccccaccccagccgcgcgccaccccgacccgaccccggtcgccgcagcagagctgcgccccacccagccacgcgtgacccgactcaggccgctgaagcagagctgcgccccacccggccatgccccacctcgaccctctcgtcgtcgttgcgctcggcaacgagttcttgcgccgcgaccagggtctcctttcgtcgcctcgggtgcctgtgccccacggctctcctgcgactccctccagtcgtcgcgccgatggctgccatggacgacaccaccacaaccaccatcggccctggcacgcaactccccgtagcccctgctgcgatcagcagcgagctcgcccatggagggcccccctacatcgccggcctcgggccgctccatgccgctcccccactgaccatacgccgaggctccccgtcttgctttcccaccctcgcctcacccacctggagccacaccgtcgtgcccttcgcactccccaccaccgactccccgctcgtcgacaccctcgctacgatccaggccgcagtgacggcctcgcgggagcgcgagcgcgtcgcctccctcgccctagagcgagagcgtgccctgggcgccgctctgacaacctag

SEQ ID NO: 33227 - DNA, 384 bp, Zea mays
  Peptide Sequence Number=SeqID_76602
atggaatgtgcgcgagatagctgttgtattgcaggagatcgtggaacgagacaggctatagactgggccgtaaattcgcgctctatagcttgggattgcgaggcgactacccgagcccgggtagtggagctaagtgtagccctggagaatatgcaagcatactataacactttgcatgaggaagtgcacgtgctatacgaccagctgcacccgaacgtgccaccagaggttgcaggaatgggggctaggacatctagagcagctggcggagaaccttatggggagttggatctttttggagcccctccttccatgaacctcgcagatgatcgttctcccgaagctggcaatggagcgggagcagccaaggacgaagataactag

SEQ ID NO: 33228 - DNA, 576 bp, Zea mays
  Peptide Sequence Number=SeqID_76603
atggcgcacacaaaaactacccagcgcaaatcaactggacctcagggtgtgcctcaacatcagctggcctccaggcatgaaggaagcagcagtggaagcaacgaccccattggggatttggaggccagagtggatcacctcaggtctaaactacgccacgggtgtagggagcatgctcgcgatagtcgccgcattgctgaactatcagccgaagttaatcgcctgcagtacgaaatttcggaacgcgatacggccattgactgggccgtaaactcacactctttcgcttgggactgtgaagccaaagctctagctcgagtagcagaacttagtgcatccctcaaaaacctgcaagcgtactgcaacaccttgcatgaagaagtgcatttattgtatgatcggctgcacccaaatgtgccacccgatgtggtagcaatgggagttggaccatctataacaacaaatggaggatctaatggggggattgacctttttggagccccttcttccatgaatcttgcagatgaacggtctcctgaagtaggcagcagaacaactaaggacggagaggattag

SEQ ID NO: 33229 - DNA, 444 bp, Zea mays
  Peptide Sequence Number=SeqID_76604
atggcgggcggtggtgcttgctttccacggcgaactccggtgatctctggctcaggcggggctttgggtgcacaagtgcatatgactaaggcctctggggcacttataggcaagggcgaggcgcaggcgcgcggggcagggcgaccatgcgcggggcgcgcgctgccgcagcaagtccgcgctcggccgcacttgagtggattagatcttggatttgcgagatacaaggggggcgaagttgggtttgtcgctcggctaaaaaccgagactaaggtcgagtcaaaacatgtcaagttgtttttgtttgatttcaaactttgccagagtatgttcaagcaaagtcaaggatattctagaatggaactcacctactacagtgcatcaagttcggagtttccttggactggccggttattatcgcagattcattccggatttctataa

SEQ ID NO: 33230 - DNA, 342 bp, Zea mays
  Peptide Sequence Number=SeqID_76605
atggcgtctttccctcctccccttcttcttcctcaagccagcaggcgcctccctctgcccctgccttattccctaggagccgagctccaagcttccatggctgtcgagctcctcccatggctgggcctctgccccagtgctttgtgcccctcctccctcaacgccggcgctccctgttttcttccccctgggcgtgccccttcgggcatggcagaaggaaaccttctccccctcggctcccccatccgagcgcccaagcagtgcccctccctgctccattttccctctgctccatatgctgacctccaccttgtgatagcgctgctcaccgagaatctctag

SEQ ID NO: 33231 - DNA, 822 bp, Zea mays
  Peptide Sequence Number=SeqID_76606
atggtgacctccagcttgatggtgggggaaagcgagtcgggctgcggcctctgcccctccctcagcctcaaggattttcatcaccagggctggggaggggactgcaccgtgcttggctctcggacgcgagtggcttcagagccgctcgcggcgccggcgtctgccacggcagctggaagaggttcttccgccggcgagatagcccaggccggccacggaccgacctccaactctacggccttctgcccgtccttgcctcacaagtttgggcatgggcgggggcctcctggcagcagcatccgccctgaggtcagtgctgccgctgttcggccccccggagcagaagtcgtcgtcgtcgccgctgctggagtgggggacggcgcgccgttcgtcggtcttctgttgcttcgcatgcccacccctatcgagtggggttactcgcctgttgattatctgaaccgcttcaccaagcatgagtcgccccgtgtcaaggtgacgagtgagccgggttgtccgttagcgggaccgacgccggagttgatcagccgaggcctcgggtcgggctggcgcccttggaagatggttggccgaggccccaggggtaaccggccgagccgcctgctcgggccggattcccggagaagtccctggcaacgattgtccgggcgtgatgatgacgtcgtcctccagagtggggatccttggaccgcgtcgccgtccgaggctaggtcggaccttgctgaaggtgtcgtcgatgccgagggtgctactgcccccttccagcgtgaagacccgagcctgcaggatcagagtgtcttgtag

SEQ ID NO: 33232 - DNA, 3801 bp, Zea mays
  Peptide Sequence Number=SeqID_76607
atggaaccgaggcggcgccagcagcagcagtcgatcctctcatttctccagaagcagccgccgtcatggagggatccctccggggagggcacgcctcccgagaagccaccgcggccccctatggggtccgtcgccgggatcatggagaggctagtgcgccctcctcctcctccgcaggccagtcacggatgggcgcgaaatcaatacgattcccaggttagacattcagaggggaaaaacttgcctgtggaaaatcaagttctctcaaatgagtgcttaggtgcattgttctcaagacctatttacggcgaacacagcagaacaatcctttccccagaaggaggtgcagatatgtctccctctcaggagccccaaaagcactcactgaggtcttccactgatgaatctacaagagcaaccaaagaagttattctggagcatccaaagaagttattctcagagtctcatactaattgcattcatgctacagccttaaatgagaactttggtgtgcaaactccttcccaggttgcctcaaagaaaatcttcccagggcttgctcatggtgctgatacacctttaactggatatggttcagaacaaactcttttgcagcattcatcaaagaagttctcattggtttctgctaatggtaaatacactagagcagcggtgacaccgtttgagcaaaattcaaataatacccgtgcagaggaactttcaaagatgcgctcagggtcttcagacatgttgtatcttaaaccaacaaatttgtctgcagaactcgagacaaatggaaccccattgaagaatcactcaaagaattcctccttgcttatggacggtaaatataacataacatctgctgcactatttccagaacttgactctagtcctctgaaaccagaaacaccagcaatgcaggcagctattcctcgcctgaagcgagttcaggaagaccaaggtgtggatgccaacaaccaatgccctcctttgtgggccatgaacaagaagatgaaatcagctcattgttctattgaaaagaaggatcatgatgaaatggctggtagcgcgcgtagcaaatttgagtggctgaattcatttgccatcagagatgcaaataaaaggcggccaaatgatccactttatgacaagagtacccttttcattccacctgatgcattgagaaaaatgtcaacatctcaaaagcaatactggaatattaagtgcaaatatatggatgttgtcctctttttcaaagtggggaaattttatgagctctatgagctagatgctgagattggccaaaaagaacttgactggaaaatgactgttagtggggtgggcaagtgcagacaggttaggaacacgatcatttgcctgcaggccctgcacctgccattagatttgggttttgtgggtaggggacagtgcttggataaatctgggacccgtgttgtaggagtgtgggaggcaacggttggtatttcagaaagtggtatagatgatgctgttgataagcttatagctcgggggtataaagttggaagaatagaacaaatggaatctgcaaaccaggccaaagctagaggagtacattctgttattgaaagaaagttggttcatgtgtccacaccatcaaccgcggttgataacattggtactgatgctgttcaccttctggcactgaaagaggtgaccctagcttctagcggtttccaggtctttggatttgctttcctagactatgctgcccttaaaatttgggtgggttcagtccaagatgatgactcgtctgcagctttgggtgctttgttgatgcaggtttctcctagagaattaatctatgaaacctcaggagctaatagctattctcttttgtcaggcatctcaaaagaaactcaaaggacaataagaaaatatgcctcagcaggatctgtgaagatgcagctgacccccctctccgggatagatttctctgatgctgcacagattcgaaatttaatacattctaaagggttctttaatgcatcaacagagtcatggttatctgctttggattgcacaatgaatcaagatgtagttatttgtgcacttggtggacttattggccatttgactaggctcatgttacatgatgccctgaaaaatggggaagtcttaccataccatgtgtacaaaacatgtttaaggatggatggccagactcttgtgaacctcgagattttcagcaacaatttcaatggtggttcatctggtactttatataagcaccttaatcactgtgtcacagcatctggtaagcggatgctaagaaggtggatttgtcatccacttaaagacattgatgctatcaataaaaggcttgatgttgttgaggggtttatccaaaactgtggactaggccctacaacacttgggtatctccagaaaattcctgatcttgagagattattaggacaagttagatccactgttgggttatcatctttgcttcaactgccctttattggagaaaaaataataaagaaacggattaaaacatttataatgcttatcaatggcctccgcaatggtattgacttgctaaatgatttacaaagagcggaccatggtatcttggcgctttataagattgtggatattccatcattgagctatcttcctgagttaatccataagtttgaagagagaatgcaaaatgagtttccatgtggccaggtttctgatgtcaatgccaatggtgccaacgatttggctgctctgatggacgtttttatcggaaaggcttctgaatggtctttggtgatcaatgccgtcagcactattgatgtgcttaggtcctttgctgcaatgacattgtcatcatttggtgccatgtgcagaccacaagttctgctgaaagatgatgtgcctgtacttcgtatgaagggtctgtggcatccctacgcttttgcgggaaatgcaaatagtctggtaccaaatgatttaacccttggtcaggatttatctggtctcaatcgttttgcattgctgttaactggtccaaatatgggtgggaaatccacaatcatgcgtgccacctgcctggctgttgtacttgctcagcttggctgttatgtcccctgcacgtcatgtgagttgacccttgcggattccatctttacgcgcctcggtgcaacagatcggattatgactggggaaagtacttttctcgttgaatgtactgagactgcctctgttcttcagaaagcaactgtggactcgcttgtcttgcttgatgagcttggcagaggaactagcacatttgatggatatgcaatcgcatatgctgtgtttcgccacctagtggagcgagtgcgatgccgtcagctctttgctacccactaccattctcttacaaaggagttcgcctcgcaccctcacgtgagcctccagcacatggcctgcatgttcaagccaaggagcgacggcaacggccagaaggagctgaccttcctataccggctgacctcgggggcctgtccagaaagctacggcctgcaggtcgccgcaatggcagggatcccgaagtcgatagtggagaaggcgtctgtcgcgggccaggtgatgagggctaagatcgccgggaacttcaagtcgagcgaacagcgagctgagttctcgaccctccacgaggaatggctgagggcggccctggcggtgagcgcgatggacggacaaccggacgacgacgacgtcatggacacgctgttctgcatccagcaagagctgaagtctcacttcaggaaggcgagatga

SEQ ID NO: 33233 - DNA, 579 bp, Zea mays
  Peptide Sequence Number=SeqID_76608
atgaagatggttgctgagtttaaagctccaaagaagaaaactgatgatcaggatcaactccctgagccggtggaacgcaagcaaattctctcagatgagaggcgtataagtgatgaggactgtcttctgttgggcctgaatcccaaatatgtccgtcctcattggatgatacttcaagttcttcctgatccgccaccccatgttagaccatctgttatgatggacaccatttccagaagtgagcaggtcctatggtccacagagcaattgtctgattggtttgtcggtgacgatggctacaagctcgtgcagtatgttctggtagttgtggagcaaggggagacgtttgtgagggctctagaagaagctgtacctgaagatgaaaagctcaaagattcagatcatgaaagcgggcttaaggatgccaaaatggttgatcataacaggatttctgcaactgctttggagggggatctgaaagacattaatatgacaaatgatgataaacctggagaaagcatcgaatcagcacagggaaagccttctcaaacttctgaacctgttggaactgcgacataa

SEQ ID NO: 33234 - DNA, 237 bp, Zea mays
  Peptide Sequence Number=SeqID_76609
atggatggtgctgatgtgggggaggaggtgatgcgtatcggacagggtctgtgggtgggaatgggccggggtaatatggtggcggaggtggccatggatgcgttggtgtgcagggtagcggtggcggcagggcggggcagggagggcactatggtggtggtggcgggtggtagactggcgcgggggctggggatggtggaggtggggaatgcggcagtgtttgtttttctgtggtga

SEQ ID NO: 33235 - DNA, 1761 bp, Zea mays
  Peptide Sequence Number=SeqID_76610
atggagagcaaattggctgaaaatgaggcagcactttcattgatgagggataattatgagaaacggttactggagcagcaagcagcacaaaagaagcaatctatgaagttccaggagcaggaagtttctctttcaggtcagttggcttcagcaacaaagactttgacatcactgagtgaagaattcagaaaggagaagaaattagctgaggaacttagggatgaaatacagagattagagagtagtatcacacaagctggcattgataatgatgtgcttgaaactaaattggaagaaaagcttggtgagattaattttttgcaggaaaaggtaagtttactcaaccaagaaattgatgataaggagaagcacatcagggaactcagtgcatcactttcctcgaaggaagtagactaccaaaagctgaccgctttcacaaatcaaactaaaaagagccttgagcttgcaaattctagagtacaacaactcgaggaagaactaagtacaactaagaacgctctcgtttctaagatatcttctattgattcactcaatgctaaacttgaaaccttgaactctgaaaaggaagaagctgacaaaaaaataaatgagttaatacaagagtatacagacctgaaggttgcttcagagacaagggcaagccatgattccaaactactgtcagaaagagatgatctgataaaacagcttgaggaaaaactgtctgttgcattaactgattctagcaaagatcaagaaacaattgttgagttgaacaaggagttggatgctaccaaaatgatgctaaagaatgaacttaagtccatggaagctttaaaagattcaattcgatcatctgaagaggctctaaagacttcaagaagtgaggtttccaaactttccaaggagcttgaggaggcaaatgaattgaatgaggacctggtatcacaaatttctaaactccgagaggaatccaatgaaatgcaagtagatctcactaataaactaggagaggcagaatcactatctaaagctctgtcagaagatttggcttcagtaaatgaaatggttcagaagggacaagaagaactcgaagccacctctattgagctggcatctattgctgaagctcgtgacaacttgaagaaagaattgctggatgcgtacaagaatttggagtcaaccacacatgagcttgtcgaggaaagaaaaattgtgacagccttaaacaaggaacttgaagcgttagcgaaacagttgcaggttgattctgaagcaagaaaaagtctcgaatcagacctggaggaggcaacaaagtcactagatgaaatgaacaatagcgcgctgttactgtctaaagaacttgagagcactcattctaggagtgccactcttgaatctgagaaggaaatgctacgcaaggctctagctgaacaaacgaaaatcacaaccgaagctaaggaaaacacagaggatgctcagaaccttatcacaaggcttgagacagagaaggagagctttgaattgaggtgtagacatcttgaagaggaattggcgttagcaaaaggtgagatactgcgcctaaggaggcagattagcacaaacagttctcagaaaccaagagcaagaggaccaccagaggccagtgaaactctgaaggagcaacctgtgaatgattataatcagaagaccagtggagttgttgctggaactccacagcctgtgaaaaggactgtaaggagaagaaaaggtggcgcataa

SEQ ID NO: 33236 - DNA, 750 bp, Zea mays
  Peptide Sequence Number=SeqID_76611
atggcggtgacgtacacctacaagaattctgatgggttggacatgatccgcgagtgcggcgcagcccacaccggccaagggggcactcgcctggaaccgggtgcctacaggggtctgcggtgcaactgcagtgaagtcgtagtcgaggttgcgaccctcgacgttctatcggcgctcacgcgcgctctccagggagatgcgggcatcctcgtctgcacgcctacggttgagttctgcccacaggtcctcagtcgggcggccctcaccgagggcaagtgcatagacgctgacacctcttgttggcgtcgggatgaccgaggcctgggtctggtagagctagagtgcgccatgctgagcaggcagtcgacgtcgtcacgccactgcttcatggcccccggcgaggccgtgaagctaggagggtggcgcaacaattctctggccgcagacagcgccccaggcgtagccctagactccctggatgtctgcgcaggagtgtgctgtcgtgcagagtgcacagcagcagcaccaggcactgggaggttagtagcccgtggcgtggaagaagcggcttcttcctccaccaagaagtccttgggcaaggaatcatggtgctcaacgatgtggaccatggcgtcgagcaggaaaacaagtgaatacctaaagcctagcccccctacctggcgcgccaaatgtcggagagggaaaactccggccgggtggcggaatgcacccaccctaatcctaagatga

SEQ ID NO: 33237 - DNA, 732 bp, Zea mays
  Peptide Sequence Number=SeqID_76612
atggtgtaccgcctgcttggatgggatgcgccggcgttcggcggaaggatttgtgccggcaccttccatcccggtgcgcggccttgtgggagcggcgctcttccatcggtgcttggcttcaaggatgttcgtcagcctcgcggtggtgaagagcgagctgagccacggctccacctcccacatgggctgaggtggttgccgccgctggtgaggctgcccggtgcagaggtggtcgcctccgctggagagccgctcggagcagaggtggccgccaccgctggcgagccgtcggtgcagaggtggtcgccgccgctgaccaacatacctaagaaagagttggcaatggtccccaagaggcccacggtacaggaccaggctgagcggctacacggctccggaccaccccaggagacaaactttcgggtacgggaccaggctaagtggccacataggctccagaccaccccatggaatgggctcccgttctttagaactggcccccaggctgtcgggccctcctgcttccgcagagaggtcctaaactgcaagcttggctgttcaattcggatgtcatcataccaacaggccgggcttatgagggcggacctcaccgggctggcgtacacagatgctccagtggtcaggaagaggtactccttcaatcgtagcaagatagtcacctctgggtcggcgtattctcgtcaccttgtagggtcctttccagctgggtag

SEQ ID NO: 33238 - DNA, 618 bp, Zea mays
  Peptide Sequence Number=SeqID_76613
atgccgactcgtcgaggcacagccgcgccggagcgcttgcggtgctgcgccaacgcggacacaggccaccggccgcacaaggcgagtcgtgccgagcaccgcgcattgggctgcgccacggcgagctcgcaccgtgccagggctggccgtgcaccacaccatgagccgagctggctgagctgggcgctgtcgcgtggcatcgacccagagtccttcatcgatgaggacaatgacgaatcgtatgaggacgtgggcaccgaagatgtggagcagatccacatggtcgcgctggaaatttttttgatctgtgaagcagttgtgggtcctacaaatccctatttgtttcagttcatctgtgcagcacctgttcactacttatggtctgtaatagaaagaaggttattgagtgaacaaaacatctatttgatgaaggtgtacaatgagcagattattgtcagtgttttgaaggtatacaatgagcagattcatgatttgctactgacaggatcccaaccaggagcaacaacaaaaggactagaagtaagacaagttggagaaggagctcaccatgtaccaggacttgttaaagcacgagtggctaacataaatgaagcttag

SEQ ID NO: 33239 - DNA, 900 bp, Zea mays
  Peptide Sequence Number=SeqID_76614
atgacaggcgctctctctaccccatgttcccccaccgaattcggccttagatccttggctcatgcgtgcgattttgtctcttactctgagtcttgctggcgcaggatgaggggcggcgcgtcggcgcagaagaggtccccaagtggcaagttcggtggcatcgtcggcggagagggcgcacagtggcggcgaatgtcgctgccggcgatgctgctcgacgagaccgtgcaggtcagccaattcgcgcggggcatcgtgacgactgccggcgctatgaatcgggagcccccgaggaccccaaaaccggctcccaggaccaggaagccagcagcgggcgagccgactcctctccacgcgcggcgtgcccgggagaagcagagccatcggggtggcaccacgacacggggcgctggcaccgccacaccgccgtcgcgcagtcgcgtgcggtcccggatccagttcaagcccgtgtcgtcggtcgctgtcagccggccgtccgtgtccgccaaccgcgtttcccccaagaaccggccgtgggccaagaaggcggtgatgttccagaaccccatgttccacgcctccacctctgccgccatcgacccttgtgcgacgtcgtcgccttccaagaagcagaagcggctctacaagacacggtcccctgtcgtggcacagcagataccgcacaagttcctggcgtcacctacaaaaacgtggcgctgctcgttctcgccgtcaagtttagcgacaaggctcatgtcgcctatcaaagagaggctgtcgctgggcaggagccgggacaacggcgtcgatgtcggtggtggcccgatgagcgtgctgaagcagcggccatgtgttagcttgatggtgcggacggtgtcgagcaagatatcatcgaggtga

SEQ ID NO: 33240 - DNA, 354 bp, Zea mays
  Peptide Sequence Number=SeqID_76615
atgcagtcacaaaagaatgtgttgctccagtatcaaataacacatttgcataatgtctgcttgactgggcattgggagctgtctgctgctgagctgctctctttgggcaatgattcgcccaatggccttgttccccacagtggaaacatgcacgacctcctccttgcactggagctacttggttgttctggttggttcctagggcaggaaggcggggtgtctggttgctctgatgctgatattgatttcctccctgctggttgttctggcggtaatgctgctgctgaggaaactgcctctggtactgctgctactagttctgacgctgatgctggtgctggtgaccttgcttga

SEQ ID NO: 33241 - DNA, 288 bp, Zea mays
  Peptide Sequence Number=SeqID_76616
atgatgctggtagactacacaacggctcttgctcctccgagagctccgtgtcatggctcaaactgccaccagcgtcgtcgtcgtctccgtctccatcagggtctcctccagcagttgggatgccctatggtggtgctgggggcatctctggctgaggtgcaggggcaggctgcctcccagactccacctcctactgaggtgagggggaagagtcctgctgctcctgctcctggcatcggcgctcctgctcctcgtgcaggcgatgatgcagtctcttcaagtggctag

SEQ ID NO: 33242 - DNA, 390 bp, Zea mays
  Peptide Sequence Number=SeqID_76617
atgacgtcggttgctctcaaccccctacggaagcaaggaaacgtcagcaggatccatgccgcaccgccagctatgcttctacagggctcaaggcacttctccgacagccacgttagcacgtgtacagggctcaaggcgcttctctaccagccacgggcacgcagcaacaaattcactagtcggttgacggacctcgcgggtccgaaacgccgacagctacgtagtgtatccctggccatccacctcggtagtgaagatcgggtctatacaacccaggctggaaagggatcacgactcgtgggtaaagtgtacgacctctgcagagtgttagaaactggtatatcagccgagctcacagttaagagcggccttgtgatcctctttgattag

SEQ ID NO: 33243 - DNA, 360 bp, Zea mays
  Peptide Sequence Number=SeqID_76618
atgccgttgtctctccggctttttcacatctcttgctgttctctgttgcttgcttttcttctctccctttcgcttccaccatgggggctcgcggcggaggtctggacgtacatccgggccgtcgagcgctccgggctcgagggctcggatgagtcggagtactcctcggatgaggaggactcagacggtgacggcgaggacgacgacgacgacgatgacgacgaaggcggtggcggcggtgacggtgacggcagcggcaggggcggcagcagcggcagcaaggacggtgacgacgacggcagcaggggcggcagcggcggtggcggcagcagcatgggcagcaacagggccagtggctag

SEQ ID NO: 33244 - DNA, 675 bp, Zea mays
  Peptide Sequence Number=SeqID_76619
atggcctcagggcaaacgctactgctgaaaggccctcgttcatgtcccctcacgggggacgagaaccagccattaaagccaaagagccggaggcccggagcgcaggtggcgctgacggtctcgtcggtggaggcaaccgcttccgcaaggggaagcctcacctatggcgaccaccacctcagcaccggcgacagtggccacccgcccaccaacaccgcaccggcgaccggcgaccggcagccaccccaaagcgcaccggcagggaccgggaaaggggatattccgaaaaggatccttctcagtgaaggaaacgggccccgagccctcctactgatcaggggttcgaaggttgcgccctccggggttcggcaactgccccagagcactcgggctccgagccctttactgatcaggggttcgaaggctggcccctcggaagggttcgacagccgccccagagcacgcagagtcagggatgaccctgggtacgtccgttacatggccgaggctcaggctacgctcccgaggtaccctaggacatttccgagaccagcgggaacgatttgtaacggaatcccaccggagggaggcatcgagccctcggaccctatcgaatgggtctgggtccggcaaatcacctacatgtacttttggagcgcgcctctgggccactag

SEQ ID NO: 33245 - DNA, 837 bp, Zea mays
  Peptide Sequence Number=SeqID_76620
atggatgactttgagaagttccaggactacgacaagttctatcacctggagagattgcatcgtcgcctgcatgaggagctggagcgccgacgcgaggagcaggagcaggaccaggagcagcaggactcttccccctcgcctcagcgggaggtggcgtatgagaggccaccttcccctgcacctcagccagagatgccccctgcaccaccccagggcatcccggctgctggaggagaccctgacggagacggagacaacgacgacgccggtggcagttcgagccacggcacggagcgttcagaggagccagagctggagggatggatcgcgagacccatcactcgtgacgctgctcgtgggtgtcacttccacgatgctctcgataccttgctatgtcgggccttcaaccaacacacatggtctatcgagtactgttgtgtagtctaccagcatcgtcgcgggctatacccggaccaatgggaggctacttgcttggtgcgtcgtccagacgatgatctctggggtgcagaggccttctcagagcactattctattactgagagggatactgccgaggcagccatgcaagatctgatgggccttgatctgaagtactaccctcgtcgttcgaccggcagtgctagaggtgtgattgctttgccagttggtgagggaaatcccaggctgaacagcatggtcaacttggccgtcgtgctcaacacagagttggaccacgcccttgacgagttgggcaagcacccttaccattcaccgcctcgtggtcgcttcgactatggtaccccagactgcaggacccgcatagatttagatccatag

SEQ ID NO: 33246 - DNA, 360 bp, Zea mays
  Peptide Sequence Number=SeqID_76621
atggccagaacggctcaccagagttgctccgacccgcctgaggctttctcaccgtcgatctcccctctctgcccatggattcatggccccttccccgtcattgagttcgccgtggcgccctcttcctctctgcccaactccggcgaccccggaacccccctagctcacgccttcctcaactccggcgacctcaccaccgcggagaggagcagagccgcccgcagccgttcacccctccccgacaacgagcagctcgtggttcctgagtgtgttgccgaagatccctctgagcaacaacctggaggtgaagctagcaacatggatgactttgaggagttccaggactacgacgagttctag

SEQ ID NO: 33247 - DNA, 612 bp, Zea mays
  Peptide Sequence Number=SeqID_76622
atgacgcatttcctcagtggcctcatcaatcttcttctgaagatcggcgagacgaagcatcttttctttcttcttctaaacttgttgatggacggcttcgaggtccctgatttcttggtccaactcctcctcctaagtggctgcaatgcaagtcctggccctgatgacttcttcggcgacatgacgaaggtcaaagcttgccgaaggtggtcaagcacaggacgtagcctcggtaaaattacattcatgtccttgacatttactattagccaaaagaaatatcgcgccgtggatatgggtcagcccctcgccggcgataagaacgccaccgcagcggatggtcgtcggcggctgcggcgtgctgaccgaggaccctttaactggtcacatgcctcgtcatggcatacccttgagagtcttttccttagtcgggtgaggaagcgacaaatttttgttgcttttgctccaaggtggtaccaaatgaagaaaaacaagactgaagtgcgggaggacttggtcctccacataggatcttttgcttataacttatcgggaggagtctgtgcctcccttagtttgtataacattactgctcagcactcgcctttttag

SEQ ID NO: 33248 - DNA, 552 bp, Zea mays
  Peptide Sequence Number=SeqID_76623
atggaaatgtcccgctgggcagaggatagaggaagcttctgtggacttgtccccacatggcggaccctaaacttcaactcgaaaggcctcctgcgatccaaagagcgaggcaagtactatgaggggattctcaccaacgtcagaggtgtgaaggatgctgcccacgcgcgcaggtcgaaccatggcggcgctgagggtagccgcccacgcgtggttgttgagccggccgcgcgattcgcggaccgcgcaagtctgttgcaaggcgccgggagaggaggcaacatcgcacagggcccaaacggtgattttgggtcttacaattaccacgagacgcctgacgagtatgcggagtctgcggtgtcgcctgtggtgtctattgagcaggtcgctggtaggactgtggctctcctccaggacttaaagggaaatgccggtgcacggtctgcgcaactcgtcgctcttggggttttccctggctacgtcggctataaatcaccatacagtccacgcgaggcgccggacagtctggtgctccagtcgtgcaacagctaa

SEQ ID NO: 33249 - DNA, 414 bp, Zea mays
  Peptide Sequence Number=SeqID_76624
atggggaagcctggcccatcactcctcgtgctcctcctctaccgaggtagggtcccactcgactatcaccccggtggcaagatggacggccaagtcacgccagcaaccatgtcctccagagaacctgtaaaaaattatgccacaagcaaggctgagtatactaatactcagctagacttacccgtgaccgcacttgtacccaccataaccggtatgggagaccacgtctcaggtcgcgtgaggggcaaagtctgctgccaggttcactcaggtcttgccttccagagctggggcaggcagatcctcgatggcaggctctggtgctggctcctggactacctcctgagcaactccttgctccagaacgaggatgtattccccgtcagcgagattacagtctatcaaatgcaatga

SEQ ID NO: 33250 - DNA, 255 bp, Zea mays
  Peptide Sequence Number=SeqID_76625
atgcctaataagaagcacaataggaagaaaaagggaattttgggagaactagataatgtacaactaaaaccttctaagcatctcatgaaacctaaagatgtaattacaaattactgtaatatcgctgatggggaatacatcctcgttccggagcaaggagttgctcaggaagtagtccaggagccagcaccagagcctgccatcgaggatctgcctgccctagctctggaaggcaagccccggttttatgcataa

SEQ ID NO: 33251 - DNA, 171 bp, Zea mays
  Peptide Sequence Number=SeqID_76626
atggcggtgaaacaccaagcggcccgtgaacacacgagacagcgatgctggccatcagggcccacatgtgtatatgcagatgcaattgtgaacattactccacaacccatcacactcaatcaaagatccaaatcagacaagtatcataagaacaaacaatcaagcgtatag

SEQ ID NO: 33252 - DNA, 411 bp, Zea mays
  Peptide Sequence Number=SeqID_76627
atgaaggcgcacgtagcccagaggcttcatgccaggttccgcccgttggcttatgccgcgcgtagtatgccacatggcagcatcgggtctctgcctgagcggggagcaggagttagtaaggggtaccctagtttctgggtaccgacagtagccctcacccctgctccacaaaaacatgactcgatagcagacaacctctaccccgacccaggtgcatccatcaaagattctagaaggctcaaaaacgaagaaaaggatattgacatgcagattggtgtgagaaaccaacttgtaactgatgttgtagacacgagccaaagtgagattgttatagatagcggtctagagtgggaagaggaacctgagcatgtcataacaacatctcatcctaatagtgaagatgaggaatag

SEQ ID NO: 33253 - DNA, 1017 bp, Zea mays
  Peptide Sequence Number=SeqID_76628
atgagattgatggttctggttatgattatggtattgatggctcgacttagacacactgcacgaaagtcagtcatccccttcttaccctcccgccttgctgagcgtccgcttcgccgtcccgtggccggacagtccagccacttggagagactacaccaccgcctgcgtgaggagcaggagcgtcgacgacaggagcagcagagctcttccttctcgctccaccaggagatagagtctccgccccctgcaccacccctgggcgccccagcttctggagtagctgctggaggagacccagacgacggagatggcgacgacagctcgagccacgacaccgacttctctgctaaccctgagccggaaggatgggttgctcgacccatcactcgcgacgctgctcgcgggtgtcacttccacgatgcgctcgacaccctgctacgtcgggcatttgaccggcatacttggtccgtcgagtatcgctgtgtggtctaccagcacagtcgcggggtctacccggaccgctgggaggcgacttgcttggtgcgctgcccggaggacagtctccagggtgcagaggcctgttcagagcactattctatctctgagcgggactcagctgaggcagccatgcaagatgctgcacggcgtgcgctttcgcactactgctcggttttcggtggggcagctgacggtcttgacctgaagtattacccccgccgttcatctggcagcacaggaggcgtgattgtctcacctgtcggtgagggcaatcctaggttgagcagcacagtcaacctagccgccgtgctaaacacggagctggaccatgcattagacgagctgagtagggttcgtgctgagatcgcccagctgcgggctgagcgcgcggaacgtcgttatctggatggtggttcccccgctcccgttgggactcagcacccgtaccgctcacctcagcgtggacaccagtcttatggcaatcccgcctgcaagaccaagatcaacctagaaccatag

SEQ ID NO: 33254 - DNA, 1077 bp, Zea mays
  Peptide Sequence Number=SeqID_76629
atggggttgcggtcggccaagggagaaatcagaggggagggggaaacaggggtcgtgccgccgggggggagggggacagggggccacgcgcctgggggctgctcaggccatgccaccatcgttgcaggctggttggggggccgcctctgccaccactggttggctggctggccgggcaccgcctgctcgtgcgtggagggcaggggaggtacatactgtgaaaatgaagagaaaataaagaagaacaatgagcaaacaaaaaccaacaacctgaagaacggagttcccaaaggaaagccccacaaaacctcggttgctccccttggcccttgccatcctcgttcctatcgccagttcgccacctcctttgctctcgcctcgcgcgcgctcccccccgcgcatcgtgccgttcgccaccgcaccgcgccgatggaggtcgccgccgtgcccagatccgccgcggcctgccgtgcggcgcccctgctcccggccgtccgagccgctgcgtgccacctggccctgccccggcgcgcgttctccgcatccgtcgcggcggcaccggcgccgcgccgcctcgccgctcgtcgcgctgcggatggtgacagcgtggagacggcgccggaggcggtccccattgagaaaaggttccctcccttcccgagcgtcatggacatcaaccagatccgcgagatcctcccccacagagtaattgaatacaaggctggagaatatgcagtggggatcaagaatgttacaataaatgataatttcttcccaggacattttcctgaacgccccataatgcccggtgtcctcatggtcgaggctatggcccaggttgggggtctggtgatgctgcaacctgaagttggtggatctcgagacaacttctttttcgccgggattgacaaagttaggttcaggaagccagtgattgctggcgatacactgatcatgaggatgacactgactaagtatcagaagaggtttggactcgccaagatggaaggaaaagcttatgttggtggtgacctagtttgtgaaggggagttcctcctagtcagcgcaaccgagtag

SEQ ID NO: 33255 - DNA, 1062 bp, Zea mays
  Peptide Sequence Number=SeqID_76630
atgcatatgcacaggtacgtggccgtgggcaacgagccgttcctggagacgttcaacgggacgtacctgaacacgacgttcccggcgatgcagaacgtgcaggcggcgctggcgaaggccgggctggccgacagggtcaaggtgacggtgccgctgaacgcggacgtgtaccagtcgccgacggggaagccgtcggacggcgacttccgcgcggacatccacggcctcatgctctccatcgtgcagttcctggcggccacgggcgcgccgttcgtggccaacgtgtaccccttcatcagcctgtacgcggaccccaacttcccgctcgactacgccttcttccagggctcgtcggcgcccgtggtcgacggcggcgtcacgtaccagaacaccttcgacgccaaccacgacacgctggtggccgcgctgcggcgcaacggcttcggcaacgtgtccgtcgtggtgggcgagggcttcctcgcgcacgtcgcgtccggccagggcacgccgctgcgcccgggccccctcgacgcctacctcttcagcctcgtcgacgaggaccgcaagagcatccagccaggcaacttcgagcgccactggggcctcttctactacgacggcacgcccaagtacccgctcagcctaggcggcaacgcctcctcgctgatgaggccggccaggggcgtcaagtacctggacaagaagtggtgcgtgctcaagacgtcggccaacctcgccgaccagaaggtgggcgacagcgtcggctacgcctgtggcctcgccgactgcaccagcctcggctacaagacctcctgcgccggcctcgacgccaagggcaacgtctcctacgcctacaacatgtactaccagaccatggaccaggacgaccgcgcctgcgacttcaacggcctcgccaccaccacctccgtcgacccgtccgccgggacatgccgcttcatcatcgagatcgacgtcggcgccgccgcgccacgctctgccatcggcttcgcggccgtgctggcagccgggctcgcggcctccgtgctatccgtgttgttgtga

SEQ ID NO: 33256 - DNA, 717 bp, Zea mays
  Peptide Sequence Number=SeqID_76631
atggttgcctttcaagggggtcccctccttttaaaggcaactctccccacttgcgtcctcagccgtcgcgggctgagtcttctccaacacgctccaaggtcctccccctacgacacgggggctgggctccgcgcatcatacaagctggcgcagggcagacagggccaaaccgccgcccacggtgcgcgcgactgcccagcggttacgagcactcctccactttcgcccaggccagcgggtgaaagcgcgggccgccacgcaggcggcgtgcaaccgcacccagggggacgcaccctttcgacttcgacgcatccagcatggaggcccaggcccacatgtcatgtaaccggcgcgccggttactacgtgcaagaaactggaccgccactcgctccagtaccgcgccttctcgactgcggaaccagtatcgcgactcgaggcgaccctgcgcatgacccgacagtgccaaccgagcacatcggtcacgggccggggtcggaaaaggggatactccgaaagggatccttctccgcgaaggaagcgggccccgagcccccctactgatcagaggttcgaaggctggcccctcggaagggttcaacagccgcctcagagcactcgggctccgcgcccactactggttagaggttcgaaggccggcccctcgaaagggttcaacggccgcctcaggccactcgggctccgcgcccactactga

SEQ ID NO: 33257 - DNA, 642 bp, Zea mays
  Peptide Sequence Number=SeqID_76632
gagcgcaatgttgacctttttaaaaatctggtacatgaatatgattacgcctgttggtcatgcagtgttgcaaggcttggttattcaggaactgttgttatatcacgggtacaaccaatctcagttcaatatgggcttggcataccagagcgtgatcaggaaggcatgcttattaccttggagtttgatgatttttacttggtcaatgcttatgtcccaaattctggtcgtggtttacgtagactggcatcagttggtacagatgaggatgctggagaatcaaatcccgaagcaaatgaactggagctatctagagtatctgaaatgcagctcatactagcggaccatggtcaattagctgagagcatgctgagcgtggggccaacagggcacgacaccgaggcaggagacgtgtggggcgagcccatagctgagagcatgctgagcgaggggccaacagggcacgacgccgaggcagggggcgcgtggggcaagctcagtgcgcggggtgaagccgtggtagcaccaaatgcccacctttcgttcttaacaatagtagagattgatgtttcagaagtcaaagtaagcttttgggatgtcttggttactgttggggacttgttctcaaatgctatgggttaa

SEQ ID NO: 33258 - DNA, 138 bp, Zea mays
  Peptide Sequence Number=SeqID_76633
atggatccaaaaggcaaggggaaggtgaccgacgagaaggagatcctcctcagtgacaaggaaggagagaccatcgactctgggtccggatgcgaagaggattggactaagatactgaggatgcaacacctcaaatga

SEQ ID NO: 33259 - DNA, 2046 bp, Zea mays
  Peptide Sequence Number=SeqID_76634
atgagggagaacataaccacgccaaatggcagtgctgtcactgtggatccaaatgcatcaacacatgccgataggctgacaaaaatcaagggtatactgtcaggagagacatctattcagttgacgctgcagttcctatacagccataataggtctgatcttcaaattttgaagactataaagcaagctgtggaaatgaggaacagtgtctgccacagtgcaacaatatgctccaatgcaatcatgcatgcagggacaacagttgataccttcctcagagaaaacttggaatggctaggtagggcaaccaactgggccaagttcagtgccactgctggactaggcgtcattcataggggccatcttcaacaaggccgcgcattgatggccccctacctaccacagaatggtgctggtggcagtggtagcccatactcggaaggaggtgccctctatgctcttggtttgattcatgccaaccatggtgaaggaatcaaagagtttcttcgtgagagtcttcgcaacaccacttctgaggtggtccagcatggtgcttgtctgggactcgggcttgcagcattaggtacatcagacgaggaaatatgcgaggacataaagaacattctttacacggatagtgctgtggctggtgaagcagctggtattggcttgggtttgctcatggttggcacggccagtgagaaggccacagagatgcttgcctatgctcatgatacacagcatgagaaaattatcaggggcttgtcacttggaattgcattgacggtgtatggcagggaagaagaagctgacaccttgatcgagcaaatgacgagagaccaagatcccatacttcgttacggcggtatgtatgcattggctctagcatacagagggactgcaaataacaaagccatccaccagcttctgcattttgctgtgtcggatgtgagcgatgatgtgcgaaggactgcagtgttggctcttggctttgtcctgtacaatgagcctgaacagacacccagaattgtgtccctactatcagaatcatacaatccacatgtccgttacggggcagccctggccgtcggaatctcctgtgccggatcaggattaagcgaagccatctccctactggagcctctgacatcagacgtcgtcgacttcgtgcgccagggtgctctcattgccatggcaatggtgatgatccagaccaatgaatcttacgatccacgcgtcggagcattcaggcgccagttggaaaagataatccttgacaagcacgaggacaccatgagcaaaatgggcgccatactggcttccggcattctcgacgccggcggcaggaacgtcggcatcaggctcaagtcgaggtcaaagcatgacaggctcactgccgttgtcggactagctgttttcacccagttctggtactggtacccgctgacctacttcataagcctcgccttctctccgacggccctcatcggcctcaactccgacctgaaagtgccgacgtttgagttcctgtcgaacgccaagccgtccctgttcgattaccccaagccagcgactcagcagactgcagccgcatctgtcaaggtgccggcggccatcttgtcgacatatgctaagtccaaggctagggcaaagaaggacgcagagagcaaggccaaggagaaagcagatgactcttccaatgcttctacttcgatgcaggtggacggcgccgctgcggagaagaaggctgccgaacccgagcctgcgttccaggttctgacgaacccggcccgggtcgttccagcccaggagaagttcgtgaaattcctggaaggcagcaggtacaagccggtgaaggctgccccctcgggattcgtcctcctgcaggacctcaagcccacggaggccgaggagctcgccctaactgacgcgccgtcaaccgccgccgccacgaccaacgccctggcatccagcgccagcgagccggctgccatggctgtcgacgatgagccccagccgcccccggccttcgagtacacatcgtaa

SEQ ID NO: 33260 - DNA, 936 bp, Zea mays
  Peptide Sequence Number=SeqID_76635
atggaggtcccaacatatacctctgaggttgtacaccctacagcagatgtatcggaacctgattcatcctcagataacacatgcgactgggttatccctgaatataccagtacacctttcatgccagcttcaacacaaactgaggatgtcggttcacccgatatgtctattgagccattaagacttgatgacaatgatgagggtgtcatattcggagaggataatgatgagaacgagggatatctattcgctgatgaggacactaacgtggacttcgagatagatggtactcaagatcaatctgttgccactgatgtgcctgacccgtacgacaaggtctacagtaacatccctgaagaaacacatatgctgaagcacgttcccgactgtggttattgcactgcgaagaagtttgagtatgagctgcctgggttttgctgtctaggtgggaaggttgagctagccccactagtgacccctccccagctcaggaggttgtgggatagtgcagactctgatgctaggcactttcgtgataacatcaggttttttaatggccatttttctttcacttccctgtactgttgcctcgacagtatgacaactaatatgagggattctggtatatacacattccgtgcacaaggcatgatgtaccataatatcaagtcattcggtattgaatgtggggcagagcataaacacctagagctttacttttacgaggatgatcccagtctcgagcatcgataccttggcatacttcgtggaaatccatactctgagcaacttaggagcatgggtcatgttgagaaccttgctgactatcacattgcattgaaccctgaccagacgttgaaccagaagacatataacacacctctcacttcggaggtggccgctgtctggatcgaggggagcgaacgacgaggctag

SEQ ID NO: 33261 - DNA, 774 bp, Zea mays
  Peptide Sequence Number=SeqID_76636
atgcgcagcttgctggagccccgcgccgccctgaggatggccggctcctcccctgcgccgccggcggacggaggtggcgcctcctcctccaccagatccgttcaccagcggcggtgcggcggcgtggtgggcgcgagtggcggcgctaggttgaggggagggagagcactggacttgtctgcagtggtgagcaaccgagaggataagtattttgtcataaaaggacacattccttgtagtgacagtttgctccatgaaaagcatgtctacaagatgcacaacgtatggtttggtcttaatccgggtgcatttaattttcgacatctaaatggtaccatggagttgtatttcacccaacaaactgtcgtagagccatacactgtcccagttcaaatgccgccatttccaaaacatatactcttgaaccttgatgatattgccgagttgccaaacaggactttagttgaaaacaagatcagatgggacataatgccggtcgcaaaccattcacagacatctctagcaatatcatttagaggtgatcaaaatgaattgctcggaccaatggtcgatgctaaggagagtaagaggaaaaggaatagggaaagatatgcagtgatgtccgttgaacaaaaaaacgagaagaataggaagcgtcgtgaagcacgtcaacgaaacaagggacacaatgtgatgcccaatgtgtcaggaggtgatgaaaaacgtccaattttaattaataaatctgcacataaacctacaattggaaagtaa

SEQ ID NO: 33262 - DNA, 483 bp, Zea mays
  Peptide Sequence Number=SeqID_76637
atgggagggtcccggatccgagctgagctgtgctccccgcgcgaccgacacccaggtctcgtcgtcccatgcaaatctgctcctcctcctgagataaggcttatgagggcttacataagttcatcttctctacggaaatctgcattgagggctcttgcaaaggcactgacgacagatcaactcttctacctaagagagcagtttacattattcggtccaaacaagagtggccatatatcattgcaaaatatgaagacgaaggattggagagaaaagcaggatgagttcaagaaaaagaagcgtatgagtaagcttgaagaaatccggcaagggactgctgttgctactactgccactccaaccgtgaatgctggagcgacaactgctgatgctactccgaagagtggacgatccggtgaaagaggcagagggggtcggaagaaagatgcatggatggcgaagtgcaccctccttactcactga

SEQ ID NO: 33263 - DNA, 1176 bp, Zea mays
  Peptide Sequence Number=SeqID_76638
atggccccctcatgtgacgtggtcggtccgagccctgggtcgggcgaggcggaggctcctccgaggtcgggcgaggcggagactgtcgtccgaggtcaaggccgagtccgagccctagggtcgggcgaggcggagttcgtcgtcttccggggccgagcccgagcccgagccctagggtcgggcgaggcggagttcgtcgtcttccagggccgagcccgagtccgagccctggggtcgggcgaggcggagttcgttgtcttccggggccgagcccgagtccgagccctggggtcgggtgaggcggagttcgtcgtcttccggggccgagcccgagtccgagccctggggtcgggcgaggcagagtttcctatggcgcccgaggccggacttggctgctgtcagcctcactctgtcgagtggcacaacagtcggagcgacgcaggcggcgctgtcttcttgtcaggccggataaggtgtcaggccatccttgcattaaatgctcctgcgattcggtcggtcggtgtggcgatctggccaaggttgcttcttggcgaagactgggtctcgggcgagccgaagctttgtgctgatgggggttaccagctgtcacacccgggttttaggggtccaaagcccgggcgcgaacataatcaccagaggttgcacatctttacccacaagtcatgttacccatctgccaagggatcacgacttcccatacacctctaccgaggagggttcttgcctgaccgccatcgcagcaaaatcaaccaaggacctccctacactgaccactcccctactgcccttgcccctttcggggtctctttagcaaaaatccacggccgaaggggtatcggggacataaaggcgaagggtgcagtggggaaattaccggtgattaggctccaaggaagtccgccctcgctgcgcggcggctcgaccgtgagaagagagggagcagcgaaagcaccgacggcggtgacttccttctcccctatctattttcttggctcggcaccgtgcactctgctagatgcccgatggctcggcgacgaagacctgcagtctagcaccctctacgtgaacccacccggcgctggaggcggcttcaacagccccaagcacggagcagccgcgaacagggggtggagcggcgcgcccgaccatatttag

SEQ ID NO: 33264 - DNA, 366 bp, Zea mays
  Peptide Sequence Number=SeqID_76639
atgcaaacggtgctaactcctgccaattcgcactctggagactgtaaccttgctgacggagagtacgtcctcgtgccggagcaaggagctgctcaggaggtagccccaggtccagcaccagagcctgcaccagaggacctgcctgccactgctttggaaggcaaaccccgtggactttacccctcacgcgacctgagacgtggtctcccattccggttatggtgggtacaagtgcggtcactgcacgacggcagtcggggctctctggaggacatggttgctggagtgacttggccgtccatcttgccaccgggttggactgtcgagtgggaccctacctcggctgaggaggagcatgaggagtga

SEQ ID NO: 33265 - DNA, 492 bp, Zea mays
  Peptide Sequence Number=SeqID_76640
atggcgtgcctcacgctgcgggggctccttcctcggcaaggtgggctcatagcaggagatgggggtgtcctctattcttctgtggatgaagaggacattcggaaaatagggcgtggagccaccctccgcatcccagttgtcgccttcgcaggcgcgacaaccaagatggtcttcagttttcctctcgtggctacgggagcaccagggccttctgctccttttgttccaagtaatctgggtccacacccggggccagcctgcgttagcggtcggggccatcggagaggaattctttttggccaagtccgcgacgcggtgcaggacccccttccggccagagatacaagagagggatctgaaatggaaaacctccctagcattgaagacaatcgtggtgttgaagatgtctaccatggagttgtcatgaatcgatgtcgcaccccatacctggcgtgccagctgttggtgtttagtcccaactatgcactatag

SEQ ID NO: 33266 - DNA, 348 bp, Zea mays
  Peptide Sequence Number=SeqID_76641
atggcctaccctgcacgccaaacacagagggtgtcagcaaatcctcacccaagcggcgaaccatctcctttggcccctcatccagaacctgacatgcgcgccgagacacatcgcgagaatagaatcagcagcggcctcgatgaacagccccacgctagtccgaccatgagcaactgcatccccgatgtggctgaggcagtcgtgatcgaggacttctaccgtggatctaatgactcggccttcatttgggccatcttccaaaaggcatcgaccaccttggaacagcttttctgcaaagcggacatctacatcaccgccgatgaacggacttgggacctcatcggttag

SEQ ID NO: 33267 - DNA, 453 bp, Zea mays
  Peptide Sequence Number=SeqID_76642
atgggcgcttctgtccagcccgcaggcaactctggccaagccaaccaatcctttgtcgccgtgaatctatcgaagggggagctcagggtccacgtccttgctatcacagtaggagtcacatcggatttcctggacgagagtgggccactaccgttcaaccaagtgaggttgtgcgaccaggtctcaccgatgggtgtttttgctagaggctttgcaacgtcaaggtgctcggggcacgagcttcggctaaccgatgaggtcccaagtccgttcatcggcggtgatgtagatgtccgctttgcagaaaagctgttccaaggtggtcgatgccttttggaagatggcccaaatgaaggccgagtcattagatccacggtagaagtcctcgatcacgactgcctcagccacatcggggatgcagttgctcatggtctggaagcgcttctagaatga

SEQ ID NO: 33268 - DNA, 966 bp, Zea mays
  Peptide Sequence Number=SeqID_76643
atgcgggggatcaggtccgcgcctcataggcttgctcgtcagaggcttggtcgtttgctctgcctcatgcgcttgcttagtggagacttggtcgtccgcctcgcctcgcagaattgctcagcggggacttggtcgtccatctcgcctcacaaacttgctcgatggggacttggtcatccgtctcgtctcccagacttgcttggtagggactttgagccttaccttgggtacctcattcttaggtacccgacagcagcccccgagccttcgggcgattccttggagtcgcacggacggacccttcctgcgattgatgccatgtgctggatgcgggtccatttccctttgatgacgatagaatgctcggggagcttcagttttgggatggagaacttctctcaagacagaacgaaggaaaacaaagagtgggcgacgaagctagaagccaaaggacttcggctgaacatgttgacgaagctcaataagtttggccaaccgaaggggagccccatggtcaccccatcaaccgggttgccgcagaagaatgtgaagtacgaccttagatgtggaatcgagcaaatgacctatgggccggatacgaaggcgtttgaggtcggttatgcttaccatgctttctcgcccgagcatctatggcccttcccctcagagagcttctcccgtcctcgtggtgacctcccttccatgatattcttccctgcccccatgggcaccttttccttgtgctccgctacccaagagcgcctcaatgacctcgataggaagggattcctccctcatgagtcggtctcctgttggcgtctagaggagaagggtggtgctccggcgtcacgcgatggcaaggtcgtggtgatggcctccttctatgagtgcggctttgggcttcccttgcacatccttcgtgcgagggttgttcttttattatgggctagagttgcaaaacattaa

SEQ ID NO: 33269 - DNA, 98 bp, Zea mays
  Peptide Sequence Number=SeqID_76644
atgtcgcgcgggaggcttgggccggagcgcagcgatgccaactggccttcccacggcccagggacgcctgggggtgcgggggggcggagccccccgcg

SEQ ID NO: 33270 - DNA, 510 bp, Zea mays
  Peptide Sequence Number=SeqID_76645
atgaagctgtggaaggagactttcaggagttccaagactacgacgagttctaggcgtgggttagcgacaacccccagtcggctgcccgtgaaggccgcgtttatctacgtttcttttccgcactttgatttattatggctcgacttagacacactgcacgaaagtccgtcatccccttcttaccctcccgccttgctgagcgtccgctttcgccgtcctgtggccggacagtctagccacttggagagactgcaccaccgcctgcatgaggagcaggaacatcgacgacaggagcagcagggctcttctttctcgctccaacaggagatagagtccgtgaggagctgctcccccgtgcttcctctggaggcgccccctgcaccaccactaggcgccccagcctctggagtagctgctggaggagacccagacgacggaggtggcgacgacagctcaagccacgacaccgacttctctgctgaccatgaggcggaaggatgggttgcttga

SEQ ID NO: 33271 - DNA, 168 bp, Zea mays
  Peptide Sequence Number=SeqID_76646
atggggagtagctctctccgggtagaaagggaatcacggcttgtgggtaaaagacattatggtacaggtggctatgagatcgatggttttggttatgaatatggtgctggcgaagatgaagctgtggaaggagactttcaggagttccaagactacgacgagttctag

SEQ ID NO: 33272 - DNA, 204 bp, Zea mays
  Peptide Sequence Number=SeqID_76647
atggcgggaggcggacccgcggcggcgagaaattcgatcggtgcccccaagtttccccccactgccaaccacgcgcacaatccatgcgacatggccaacctgccagacccccaacgcacgcgaggcacgcggaacaacgaaggggataagcctgacaaggttggcccacaccacagtggaacgagggcacacaagagactatga

SEQ ID NO: 33273 - DNA, 777 bp, Zea mays
  Peptide Sequence Number=SeqID_76648
atggatgcaggcgttgacgggggtggcgaggatgaaggcgactatgatgaggaggacatcggaccactgcttagcttcgatgagatgttgcacctccacacgacatgtcctgtttctaaggatttttcttctgctcggaagtggcgtctttgctgctacacaacttctgcgtctaccacatcaatccccaggggcacgagagtcctacagatgggagcagctccaatgtcgtcagatgtgccggtgccatctgctgctgatctcgctgatcaagtcacatatgtgcttgatttcttcagtttaggatatgtgatgtgccttggtgtcactgctggggcgtatgttctcaccctctttgcgaaggtagcatcggatggcttcatagggaatggaagcatggatgcaggcgttgacgggggtggcgaggatgaaggtgacttggatgaggaggacatcggaccactgcttagcttcgatgagatgttgcacctccacgcgacgtgcggcgtggcggttctaggcgacatgatggaggcaagctggtgccgaggaacccacagtcgtggacatcgtcgggacgcagctgatgccggaggaggaggcgctccagctttggaccggttgtgtccacgtctagacttccttgcctcgcctatcacctccaggaaggtacctgccgaggaccccccttccgtagatgattttgccaccgcctacatcgaggagcactttgatgaggaggaagccaaggcgtcgcacccatactcgtcaccatga

SEQ ID NO: 33274 - DNA, 1668 bp, Zea mays
  Peptide Sequence Number=SeqID_76649
atgaccgtgtcaaaaaagggaccgggaaagggggataccccgaaaaggatccttccccgtgaaggaaccaggctccgagcctccctactgatcagaggttcgaaggctggcccctcggaagggttcgacagccgcctcagatcgcgtgggccctacacccactactggtcagaggaacgatcttgtaacggaatcccatcagagggaggcatcgagccctcggaccccgtcgccaggggaccgggtccggcagatcacccgcagctcaccggagacaccatgttcggcgcccatcgagggcaacatggcgctttccccccctcctccttgcggaaaggcgacgcaggggccgtcaacatactagcccgagaacttgggacccgaccgtacacccgggctatggccagctcgcatgagggaacgaccagaccagccgaagcattacgcgaggcattaagacctcggaggagtgaaaccactcctccgaggcctcgggggctacacccggcggttgcgctcgcgcgcacccaccggaacaaaacgcaaccgagaaaggctggtccccttgcaaaaaagtgcgacgaaagcctccaagcgagtgctaacactccctttgaggctcgggggctaatgtcggggaccataattaggggtaccctcaaggctcctaattctcagctggagcatttaatgcaaaggtggcctgacacctttatcctgacgcgcgccccccagagccgaagcgaccgccgttacttcgccgctccactgaccagcctgacagaaagacagcgccgcctgcgccgctccgactgcggtgccactcgacagagtgaggctgacaggcagccagccccagaagacgacgaactccgcttcgcccgaccccagggctcggactccgccccggcatcagccggcgacctccgcctcgcccgacccgggggctcggactcaacctcggccacggaagacagactcgacctcggcttcggaggagcttccacgtcgcccaacctagggcgcagaccagccaccccccttacggaagcaagaggacgtcagcaaggactcaacagctccgacagctgtccctccgccaggctccatcgctcctccgacggccacgacatcacaccagctgggtgccaagatctctccggctgccacaacggcatgtacttagggcgctggctctcccctgctagacacgtagcactctgctacatcccccattgtacacctggatcctctccttacgcctataaaaggaaggaccagggccctcttagagagggttggccgcgcggggacgaggacgaggtacgtgctcgcttgaggccgctcgctccctctcccgcgtggacgcttgtaaccccctactgcaagcgcacccgacctgggcgcgggacgaacacgaaggccgcgggattcccacctctctcacgccggtctccggccgcctcgctctccccccttcgcgctcggcctcgcgctcgacccatctgggctggggcacgcagcgacattcactcgtcggctcagggaccccccggtctcggaacaccgacaaacaggttatgcataaactggggcttgccttccaaagcagtggcaggcaggtcctctggtgcaggctctagtgctggacctggggctacctcctga

SEQ ID NO: 33275 - DNA, 78 bp, Zea mays
  Peptide Sequence Number=SeqID_76650
atgggaaccaatgggcatctcgacctcgacacgggaggttccaagccgatcctaaggaagttcaccttagggccgtaa

SEQ ID NO: 33276 - DNA, 285 bp, Zea mays
  Peptide Sequence Number=SeqID_76651
atgggtgtaggcaagggacggcttgacggtttgaattgcatattgaatttttgtgactattcggtggccgtggccgtcgagcgtgccaggctcgagggctcggatgagtcggagtacttctcggacgaggagaattcctccgactcgtccgaggagggcagtggcggcgacggtggtgacggcgacgacgacggaggcgacggcgatagcggcggcggcagcggcaagggtggcagcggcgacggcggcggcggcagcaagggcagcaacaaggccagtggctag

SEQ ID NO: 33277 - DNA, 1050 bp, Zea mays
  Peptide Sequence Number=SeqID_76652
atgccgtgtaaatgggacaagataagttattgtaaatacttccgcttttccgtatctccgatgatttgtaatgtctgcaagacgggtgaaacgctcttgggaaaggactcctttttggatgaagggttcattcttgacaagaaaattggcattgggcaacctaagagaattgagaatgccaaaattttggttataaacactgctatggacatagatttaagattcatgtctaaggttgcagatattgaagatgctgaaaagcagaaaatgagagacaaggtgcaaaagattatagcgcatgggatcaactattttgtcaacagacagttaatctataacttccctgaagaactctttgctgatgctggcatcctcgcaattgagcatgctgattttgagggcattgaacggctagctcttatcactggtggtgagatcgcatcaacttttgataatccagagtctgttaagcttgggcattgcaaggttatcgaagagattatgattggggaggacatgctaattcatttcactgggattgaggtgggacaggcttgcaccattgtactgcggggaacgagtgagcatgtgcttgatgaggtcgagaggtccttgcatgacaccctatgcgtgctgtccgagacagtgaacgacacccgtgtcttgttcaggggtggatggcccgagatgacccctaggaagaaatctcatgatatcgatgctttctcccatgccctacaagccatcccaacgaccatagctgacattgttggttttgatcgtgctgagctaatctctcagctccaggctgagcaccacaaggagaattgcactgctagaattgatgtcatcacgggcaatgtcggagacatgcagaagctggggattcaagagtcgttcaaggagaagcaggccatccttctgttcgcgacagaggcggcaaagatgattctcaaggtcggtgagatcataacatgcgccccatgcagaagagaggacaagatgtcagcggtgtgcttgtattgtgactggagacgtgttgatgtctaa

SEQ ID NO: 33278 - DNA, 270 bp, Zea mays
  Peptide Sequence Number=SeqID_76653
atgaagaaaaagctgtccaacctggagttagtgatggaagagctggataacgtgaaaaagtcgatgaaggcagccatggttgaaattgaggaaaacaagaaatcgaagaatgagctgcaaaagcttaaagggtcaactaaagtgaagcatctacgagccacaatcaggaagaagaggattcccacacggagaaataaccgaataaatggacaaacaaggcatataattttgctaattgactgcattgttcactcaacagctccgagctag

SEQ ID NO: 33279 - DNA, 726 bp, Zea mays
  Peptide Sequence Number=SeqID_76654
atgttcgatgtggcagcgagggggcggtggatgcagtgggaggtggtggtggtgtccaacgaccgtggcagtaggcgaggcgaagcagctatcagtgtcatcgccgcgacggtcgccttcatcatcacattcgcccaggcggctactgaggcggacgctggtgtttcgaggttgtggcggtctaggtgggatatcgtggaatggttgtcctcccttgtttctgaaccagtctttaacttccatgcatatgaagaattcaaatcataccatccaataaaaacaccaagttttggattcaacaaaggagcaaagtgggaaccgaaggccctctggtctgggagcaccggactgtccggtgtacaccggacagtgtccggtgcaccaccggacattgtccggtgcaccagagggctccaactcgaactcgccaccttcgggaatttccggaggcgactccgctataattcaccggactgtccggtgtacaccggacagtgtccggtgcgccaagggaggtcggcctcaggaactcgccagcttcgagaaactccaacggctagtccgctaaaattcaccggactgtccggtgtgcaccggactgtccggtgcgactccggagcaacggtcttctccgcgccaacggctctctgccgcgcattcaatgcgcgctctgcgcgcgcagatggcaggcgcgcccactccggcacatcggacaaggaacagtag

SEQ ID NO: 33280 - DNA, 792 bp, Zea mays
  Peptide Sequence Number=SeqID_76655
atgagcgacggcaatggcccaccaaagctccacgccgcgaagcccgacgaccacgtcgaattactcggtgtagaaagtaattggaatatgggcgatgcagaggaggtactacataccagctatgatgaatccgtggaggccgaccatggtgggggacggtttaacagcggggcgcttgatggaggctcagaggaaggtggcttgggttcccaggtgtacaacattcgtgatttcagtgaacggaacacgacgcggggaggggatttcgcccgccaggcgcgcgttctgttggggacgacgacctggcagagggggggccaccggcaggacaccgtgcccaatggactcacccgcagcggcacatgttctacctcccatggcgacggacggcagaccagagccgcgaccgaagctgtgaggcggcgccccgccgagacgacgtcgagctcgagcgcccaggtggcgccagcgtggacagaaggatggagcgtgtggcgctccggttgccccaggcgcaacgctgctcgcccaactcgactcaccactttccccgacgttcgtgcagaccggaggagaggaaaaaaaagggtcgcggccttggatttatacccagggcggaaggagaaagctgtgtcacccgccagggtgaggctgacaacagctaaaggcacaacaggaagcttcgcctcgcccgaccttgggccccggcctcaggaaggaggtctccgcctcgcccgaccccagggctcggcctcaccctcgacctcggaaggtggtctccgcctcgcctga

SEQ ID NO: 33281 - DNA, 402 bp, Zea mays
  Peptide Sequence Number=SeqID_76656
atggtgggtacaagtgcggtcactacacggcggcagccggggtcagtggagcattgtaccattcaggaaatggttgatggtgtgacttggcctaccaccctgccaccgggttggacggtcgagtgggatgttgctccgaacgattttcgtgccttctcgactatatcgataacagaatcctacgaacgagtaagagtgcacgttcagacatcaatagagggagcagcagcaccctcggcgtcgttttcgccttcggcgagatctggcctggcctcgaacggcgacacgggcggaaggaactccacctcgaaggaggaatccagcaccgcgcttgggccatcgcagccaaggtcttctccagggtcccggcccgtgcagacacctcgaccggccgctccgtag

SEQ ID NO: 33282 - DNA, 390 bp, Zea mays
  Peptide Sequence Number=SeqID_76657
atggaaatcttcataccagtcgtcctcattgtagaagccctcctgatgaaagctctctgcgcggaggccttcggttctggtcatcttgagcaagatgacgaacctcttctgaagcttcatctatctgcctctgaaggtcagctagacgagccatcttctccttctttcgttgcacctgttgatggagcatctccagattttggatttcctggtccaagtcgtcctccggaggtgttggactgcggctacagagtggcagcccctgtcgctgaagcttttttcggcggcatgacgaaggtgatgcttgccgaaggtgttcaaagctcaagaaatggaagtgagttcaccggaggtgggcgccaatgttggggacttgttctcaaatactaa

SEQ ID NO: 33283 - DNA, 231 bp, Zea mays
  Peptide Sequence Number=SeqID_76658
atgcaggtggcgtgcaaccgcaccacggggacgcaccccttcgacttcgacgcatccagcatggaggcccaggcccacacgtcatgcgagcggaagcagcagtcaaatcgtctgcaggctcatgtcccctcctggggcagcaggggatccctctcccacgggaccgggaaagggaatatttcgaaagggatccttctccgcgaaggaagcgggccccgagccctcctatag

SEQ ID NO: 33284 - DNA, 1239 bp, Zea mays
  Peptide Sequence Number=SeqID_76659
atggtgaccacaagttcgatggtggggagaagcaagtcgggttgtggcctctgccctgccctcagcttcaaggatcttcatcatccttgctgtggcggggggcgagctgagccggagttctacctcccgcatgggccagcgggccacctcttccttcagcattcaggggagagggcgctcaccggcctagcagagggggcggacttcgacaacgcggggccggccggccaaaagcgtcgtcagctccagcatgcctggctcgctggctcagctggctctggcgctgcttccggtgccacctcccactgctggggcggagcgtggctgtccgcccactgtatgggcggctgttgcgccgtgcgcaccgggggaccgtccaagacatcgcacgccgctagggtggcgttcgtgttcttggattgtcttgtcctcactccggcacgacgcctccgtgcggaggtggccgctgtcgtcggtgctgaggtggtggtcgccagaggaggtttctccgcctacgagattgtcggcgccatctgcggtcggacctccagctctttggctttgatagcttgtcctctcccctcgagtggggacgtgggtgagggccttgtcacagcagcgtctaccctgaggtcatcgctgctgttgtttagtcgcccggagcggaggtcattgtcgctgctggtgcagcggtcggcggcgagccacctggagtttgctgtcccgcaggccctccgatgtggaagttgtccatacccgcgggagtggaaccggagttctgtttgtaatggcaccttgagtgccggtaaccctcggctgctctgcgatgagtcggaaccggaggcgacggtgtcggcgtggacccaggcggagtcggctcgagaagaggcttcgtcggcccaggagcacgtggcctccctggccgaggaggtgcagcagcaacgactggagcttggccaggtggagttccttccgcccgtgtcgccgttcgaggccaggccagatctcgccgaaggcgaaaacgacgccgagggtgctgctgctccctctattgatgactttttcgtcggtagcagaatcgtttatctgagcgagagttacttttcgcgggaggtgatgagtgagaaggtgatgagtgaggatcccgctattgaagcagtcgaaaagcgcgaaatacgttctggcagaaagacttttaccgaggaaaattttgacgcagagggggttccccccttctag

SEQ ID NO: 33285 - DNA, 321 bp, Zea mays
  Peptide Sequence Number=SeqID_76660
atggtgtactatagtgggcctttgtactctgtatctaatcatctaaccttagatgcaggcattagtttatgcgttgataccgtcatacgtcgttgtttcatgacaatgcccatcaagcagacaaagagtgacgacgacactagctcacatatgaagtgcaaagggttttcttccttcttgcatgttggtgtaaagagcagactctggaactgttgtggtataatgggcagacaatggaaatgttgttcaccttcaattctcagaggacctaccactattgtattgtcaattgttttgctgtttggagaccacaaggcttga

SEQ ID NO: 33286 - DNA, 192 bp, Zea mays
  Peptide Sequence Number=SeqID_76661
atggaaggcgtcgcgatctggggaagggcgaggatggtggggaagggcggtgatggcgggggcatggtacgaaaaaatatgctggaaatcctattagacattccatggaggcataaaaaccatggtgaaaaagttaaaaggaacacgaacttaggcatgaattacacatacataggaatgtttttaatatga

SEQ ID NO: 33287 - DNA, 873 bp, Zea mays
  Peptide Sequence Number=SeqID_76662
atggatgaagattttggttatgttagcccacttttggcattcaacttgggattgcatgtttcttgccttaaactttttattcaaagagaagggcaccctttcaagttctgttctcgagctgaagagattgatgcaactgccaggtctggaagtgatctttatcttcacttagaccttcttccatgccctcaagagcctaaatatgcattgcatttacgagtttctgttgtgaggattcctgattgcctaaattcatcctttggaggaagtgagtaccaagacatggtgactggcatggaacctatacttcgtgttaattgcaatgaaacaacccttgtacttggtggagctgcttctgctgcaatccccccttattccttttttgcttcttctggtaattcagtacctttgcacagtgaagtagtggagcatttagcatctgtcattgcaccagcattgtgtccttcggatattttaccaaaaatcaagtttttcacttttttatatggcccgccagagaacgagcagggcatattcgaagaggttttgcacgggaggctcgacttcgacgtggagccatggcccagcgtctccgaaggcgccaaggatcttgttggtggtttggctcctgacaagccgctggactcggctgttctttctcgcatgaagcagttctcggccatgaacaagctgaaaaatatggctctcagggatgaagtggagatggatggtcgggtggtggagcagaaagtgcagatgacggcggtggtggtggagatccggaagaaggaatccggcgagctggtggccatcgggaggcagtggatgacggcctccaggcccaaagtcgctgctgctcacagcaagatatga

SEQ ID NO: 33288 - DNA, 525 bp, Zea mays
  Peptide Sequence Number=SeqID_76663
atgggcaaaggtaggagaggtcgagggtcgcccagtcgtgctggcgacaagcggaagcgcgtcccaagtcctccctcggaggacttcggagattcggagtactcagatgaagtttccttcgggtctgagggatcgccggctcccacttctcccccggcatcgtccgatgactcggacgactccaaggggttgtctgctgcagtctggacgtacatccatgtcgtcgagcgctccgggctcgaaggatcggatgagtcggaggtctcctcggatgaggagaactcctccgactcgtctggggagcggagcagcgacgacagtgatgatgagggcgatggcagcgacgacgacagtggtgaaggtgacggtggcgaaggcggcgatgacggcggcaaaggcggcagtggaggcgatggcagcatcggcgatggaggcgacagtggctttggtggcgtcaagggcgacggtggcgacgacggcagcaagggcgacggtaaggccagtggcacagcgccactggtctaa

SEQ ID NO: 33289 - DNA, 390 bp, Zea mays
  Peptide Sequence Number=SeqID_76664
atgaaggttagggagcactgggaggataaggagggggaatgttttatccagtttggacatggcggtggcctgactccttccggtataaccgttaaggtaaggatgtgcgaggaaagaaagagattcggcattcggatctcacgacgcctcctgggactagtaattgtatcacatttgagtcccagaggatctggggcgcttcagctgtctagtagttctggttggttgctgggacaggaaggcgaggtgtctggttgttctatcgttggtactgatttcctccctgttggttgttctggcggtactgctgctgtggatgagggaactgcctctgatacttctgctgcaactggcgctgatgctagtgtccttgagggtgaccttgcttga

SEQ ID NO: 33290 - DNA, 588 bp, Zea mays
  Peptide Sequence Number=SeqID_76665
atgcccgcgccgagaagggtgcggagatgcgaaatccacggcgagatcggtaggcatgcgcgcggcggccgggttctgtttcgccagatcgcgaacgcagcggaaagaacggcgcagcggaagcgtgatgacaagggggtcccatatgtcatccgcaggcacgtgatggtgggctgggctggcgtcgcgagatggaatggagctgggccggtcgggttaggcaggttatgcaacccaacatgtaggtcaggattaggtttcctattcctaaaggtcactttaggcacaggatttcaaagtgtgaaatccacatttgtctttagaatgaaaagaggtggtaccctttacccacaagtcatgttacccatctgccatgagatcgcgacttcccatacacctctaccgaggaggcgaggcagggtaacactacgaggcctttacaaagttccactagcttcagaaaacccgctacagtttatgggaagctccaatgcaggaatcccttgcaggactgccatcacagcaaaatcctcccgagggcctccttacactgaccactcccctactgcccttgcccctttcgggtaa

SEQ ID NO: 33291 - DNA, 159 bp, Zea mays
  Peptide Sequence Number=SeqID_76666
atggggaccactctggcgggttctttatcgagtgctgtcaggcagacactcgacaaaggggatgatgaagatagtggtagagaagagaaatctaatgcaagtgtgactgtattctcatcttcatcatcactatcacatgaatatgaaccgcttgtgtag

SEQ ID NO: 33292 - DNA, 90 bp, Zea mays
  Peptide Sequence Number=SeqID_76667
atgatgagggtcatggacaagctcaaagggaagaagcgtggagaccgtggtgactcctcgagggctctacagcgtcaaggcaacggctag

SEQ ID NO: 33293 - DNA, 78 bp, Zea mays
  Peptide Sequence Number=SeqID_76668
atggggaaagatggatgcgtggaagagtcggtcgctaattcaataatggaagagagagaatcagagtacatgaagtag

SEQ ID NO: 33294 - DNA, 897 bp, Zea mays
  Peptide Sequence Number=SeqID_76669
atgcagcgagaagaactagaagtggacctgcagaaagttcgggaacaaatgctagctgtacaaccctctgggaaagcaaggagatatatggaagatggaatggttgatttagctgattcatctaggcacccaatagatatgcataatgagctcctctgtgctcaagagactattagaatacttagaagggaggtttctgagaaggaatcagagattgctcagtgcaatgcacatatctcagagctaaacgttcatgttgaggcagtggcacaagaatacaagcacaagatgaattctaagaaagatgaagagcttagtgctgcgaaacaacgtattgtggaactcgagggcatagcagctaggagacaaagggagtgcgttgttaatgctgttaagagcgtgtatgaggcacggagggcaataacaaggactcatctgacacacaaggtgttgtcagcagcagtttataaccactataaaacgatctattgtgaatcactcatcgttaaactgaagttccaacaggtcttgcatcttatggcttcacattcgccatttatgtttcatctatacattaaggcacgttctgttcctatactgtctgctatcaaaaatagatattataaggttactgatggggctttgcgggcgtgcggagagacaacctcggttgtttttagaccatacaactctatgtggtcgattacaacatgctttgggattgatttcaaaaaaacaaaaaacaaatgcataaatatgagaaagaagctaaagaaaaggattctgggagttgaggagagtgcttcacaacaagagatagagaaggtgtatcacaaattggctctgcgcctccacccggatacgaatcctgggaacgagcttgctattgaggactga

SEQ ID NO: 33295 - DNA, 267 bp, Zea mays
  Peptide Sequence Number=SeqID_76670
atggtatcagagctagttcctcctagggtttttatctatccctgtgacagcgctggcaggcaactgcgtgtgaccagcgtgcagctgatcaagcacatcatcacccttaagtgggtcttcaagcttaagaaggatgaggctggggcagtgatcaagcacaaggcgcgtctgttggtgcacagcaccaagaaagaagaggtggaaacgttcaaggctgagatgaaagcctcattccaaatgagcgacttggagccaccacctacctga

SEQ ID NO: 33296 - DNA, 1245 bp, Zea mays
  Peptide Sequence Number=SeqID_76671
atgtggaatgatatttcgttagatagttgcggatcttgtggataccctctaaacctttcatcttctaaccgaagcacatctgaagtaggctcatataagaagtctctgaagaaaggactgatttcattcatttctgttgatctcagccgatttactcaggtggacgagctagaaagcgggtcagagaggagtgctttcggtttaacttgcaagaattggttcaaggttcggaaccttggccggaaatcactaacattccattgttcttttaatcctgccatagacaaggagcatgccaagtgcatccccaagatactggctcactcaccttgtctgaaccggatatcccttgctgggctcacagagctacctgactcggctttgagcacgctgagagtgtctggatcatctctaaaatccttttcattgtactgctgttctggcataacagatgatggtctagcacaggtggcgattgggtgccctaatttggtggtggttgaacttcaaagctgcttcaacattacagatgctgccttggaaagtctttcaaaaggctgccgtggtttgaagagtctaaaccttggttcttgcatgggcattacagaccaaggggtttctgcaatcttcagcaattgtccaaacatctgcacgctaatcgttacaggttgcaggcgtctgtccggtgctggattcagaggttgttcaagttcatttcgttaccttgaagccgagtcttgcatgctttctccagacggtttgttggatatagctagtggcagtggactcaagtatctgaacttgcagaagttaagaagctccactggtctggatggcctgggtaaccttgcgctcgctaaaagcctctgcattctgaatctcaggatgtgtcgctacctcacagacgattccgtggcagcaatagccagtgggtgcccgttgctcgaggagtggaaccttgctgtttgccatggggtccatctacctggctggtctgcgatcgggctgtactgcagtaagctaagagtgctgcatgtgaaccgctgccggcacatctgcgaccagagcttgctggccctcggcaatggctgtccgcgccttgaagctgtgcatatcaatggctgtgccaaggtcaccaacaatggcctggccttgtttaccctttccaggccccacgtgaacctaagggtgtatgaagttatgtccattggcccttccattgagaatttgttccggttgcattga

SEQ ID NO: 33297 - DNA, 633 bp, Zea mays
  Peptide Sequence Number=SeqID_76672
atggcgctgtgcaacctcaccggcgtccgcccagctccgccgctccccttcccttgggcgcctataaaagggccgccccgagcaccccttagccccgcaccggcctcagccacccatctcccccctcacccgagcaatcgtgctaagcgccgtcgtcttcttccccttcgaagaagcggggaccgtcgatccggaacccgtagcccggaagaagggccggagcccgatctcccggagatggaagactctctggtcattaggacatcctactgctcagaggtggaggggttcccacatctgttgcaaagttgtgcgcttcgcatgggaatctgcaagaagccagaatatgtctggaaggaatatctcgagaatggaatggagaagtgctctatggcagtctacctgggagaaagccgaaactacccgaaccatccttctttccaagtcactttcaccagataccgcttcccagatacttgccaaaatgttgcccgaaaagccctccaacaactatgccagaactatagcagagtaatctttgaaacccccccttcgctactttccacccagcaacaaaaatacccccgcctggaggaaaagactttaggccctgtcagggagagaccctactga

SEQ ID NO: 33298 - DNA, 840 bp, Zea mays
  Peptide Sequence Number=SeqID_76673
atggcgcttcctgttgacgtggcgggtctgtgccctaggcagggtgacgtgggggctcctccgaagccgaggttgagactgtcctctgttgccgaggccgagcccgagccatggggtcgggcgaggcggaagtcgttcggccgagggcagggcggagtccgagccctggggtcgggcgaggcggagttcgccgtcttccgggtcttagcccgagtccgagccctggggtcgggcggagcggagttcgccgtcttccgggtcttagcccgagtccgagccctggggtcgagcggagcggagttcgccgtcttccgggtcttagcccgagtccgagccctggggtcgggcggagcggagttcgccgtcttccgggtcttagcccgagtccgagccctggggtcgggcggagcggagttcgccgtcttccgggtcttagcccgagtccgagccctggggtcgggcggagcggagttcaccgtggcgcctttggcaaggcctgactgcctgtcagattcactctgtcgagtggcaccgcagtcggagtggcgcaggcggcgctgtccttctgtcagactgctttatgctgatgggggttaccagctgagaattaggcgtcttgaggcccccgagcctctgcacggggcgagaggacgatcagggacagactcggctttttacatacgcccctacgtcgcctttccgcaaggaggagggggggagtgtgccatgttaccctcgatgggcaccgaacatggtgtctccggtgagctgctagcggcgaaggcgaagcgtcgcgcgcttctcccgccagaggcgccgcgtgtcccgccgcggagttaa

SEQ ID NO: 33299 - DNA, 780 bp, Zea mays
  Peptide Sequence Number=SeqID_76674
atgaaactcagatctgaagtgtctaggcttcgatttgattgtgaagagaaggaaaaatctttcaagatcctggaaaaggattttattgacagttgggccagagtccacaaaatgcgcgaagagaagaataagcttgaagcttctaacactgaaaaggacatgcgaattgcgttgctcgaagctaagctggaacgagtgaaagaagagcacgaagctaaaacaacaaagctgatgcaagcattcgccgaagtggctatcaaccttagcagcgctcaggtgaagatcgatgacctgaaggatgaaataaatcataagaagggtgagaaagaattaagtattgaagaatctataaagaatagggagaaggcacaacaagcagaaaaggttgtggacatcaggaaaaagcttcaaagcaggaaatccgaagcgccgcccgtggccgccgccgcccggggggctcgcgcgccagagccgacgccgccgcccgtggccaacgccgcggtggacgccgccgcctccccgcccctggccagcgccgcccgtggccgccgggacctccccgccgtcgtccacagcctccgcggccgttgcccgaggccgcagcggcccgccgccgcgttacccgaggacgcagccgtccccgagcccgaggccgtcgtcgagtcttgtcacgtgagcgcgcgcacgtggccgttcgcacggtgccgaacgcggccgcacgtgagcgcgcgcacgcagcttcacaccggtcgccagccgtcactcctgtgggcaattcag

SEQ ID NO: 33300 - DNA, 298 bp, Zea mays
  Peptide Sequence Number=SeqID_76675
gaacatgttgctgctgaagaatgtgatcagcctgaaccctgacgcggaggaggtgtcgcagcagaggttgctctcgctcgtggccgagcgcctcgtcccaacattcctggacaggttcggtcctaaatctcccgagatctggatgttcgtgttcgatgcgtcaatgcgggaatggcattgtgttaggatgcagcggcagtttgtcaaggatgaggggtatgctaacacccgagagcagaacatcacaaatgctattgatcttttcctgcacctcacgacaggcattgcgtcaacgtga

SEQ ID NO: 33301 - DNA, 440 bp, Zea mays
  Peptide Sequence Number=SeqID_76676
atggacagtcaagcgtatgaactcgtcgtcatttctgcgtttccaagtgaaaagcaggtgtcaagtaccgccaagcggttcattatagtgtttggtgaccaaaaaggcaccaacatactttttggcgactccgctggggaagaggttgaagatctacaaaatcaggcttatatggccgattctaaagatctcaacagggcttctccaaacagcagcacaaggctgactaatttatcggccactgagcataaaagattaaaagatgacatgaagaaaatagacgaggaggtccaacgacaaaaagatcagtgctcaaggtggcggataaatggttcctctcgcacttcaggtggattgccaccagagaccgtccaagaaagggaaatagacgccaattacatgtcatccgtgctacaacaactccccacaaatagtggatg

SEQ ID NO: 33302 - DNA, 459 bp, Zea mays
  Peptide Sequence Number=SeqID_76677
atgggcaagaacaacaagcgcaagcgtgagccgactcctccatcggaggagtttggtgattcagagtactcggaggaggagttctcctccgagcccgaggggtctccggctcccgtctctcctccggcgtcgtccgatgactcggacgactcccaggggatagccgcggaggtctggacatacatccgggccgtcgagcgcgccgggctcgaaggctcggatgagtcggagtactcctcggatgaggaggactcggacggcggcgacgagggtgaagacgacgacgatgatgacgacgacggcgacggcagcggcagaggcggcggcagggacagcaccaagggcagcagcaggggcagcaccaagggcagcagcggcggcagcggggacaacaccaggggcagcagcaggggcagcaccaagggcggcggcggcggcaggggcagggccagtggctag

SEQ ID NO: 33303 - DNA, 114 bp, Zea mays
  Peptide Sequence Number=SeqID_76678
atgaacgtcttcgacattaatcgtcggtatccatttgctgaatcgcagtttcaaactttagactttggacaatcaggaatcgatcaggaatccagatcaaacaagtataagtga

SEQ ID NO: 33304 - DNA, 879 bp, Zea mays
  Peptide Sequence Number=SeqID_76679
atgaccatgaacgctgcgatcgcctcccgactcggcctcgccgtctccaggtgtggggctgggtcccgagtggacagccggccgctgacgccggcagtgggtttcacggcggggccgagggcgcgctcagtagccgtcaccgccgcctcctcttctccggcgaccggtggcgtgacgccggtgccaccccgctcgaatcgctcggttatgaagcgtcacacgctatcagtttttgttggtgatgaaagtgggatgatcaatcgaattgctggggtttttgctagaagaggatataacatcgagtcattggctgttgggttgaacaaggataaagcattatttacaatagtagtgtcaggaacagacaaaatattaaaccaggtcgtagagcaactaaacaagcttgttaatgtcataaagatatactgcaactgcaagcatcatcctgtgtcccaaggaaacgttgcacagcgaagaggagggcacgagctggaaccacggagtgcagcccctcatggtcctgcggccaccagtgcgcaaacggtggtgtggctggagcagatggtggcgagaccagtagacccccttgtacgaaggagagtagtcgtggtagttgcccggtcatcgcagatgaaggccagcgtcgaacggagcgttgcagaggggcgccatgtcttgcagccccttgtacgcggaggtgaacaaccaccacgttgctcgggcgcgctggtgcagctacgactcccccgcaatggagcacccccatcatctgcttcacccgccgacgcgctaggaaaccgcgtgctgcagcctgcaggtgcctgcaggtggacggccgccgctgtatgtcgcggagcaagcaccctctcctggacatag

SEQ ID NO: 33305 - DNA, 1893 bp, Zea mays
  Peptide Sequence Number=SeqID_76680
atgccgcgcacgaagaatgcgtcgacatcagggggtggcgacgatgaggaccctcgtcgccccttcaggcaggtgaagggcaagactgtgtatctggagcagcaggaaggccgcaagaagcggcgttcggacagagaggctcgtgcagcagcagcagctgccgcagccgctgcacaggcagcacttggagatcagccggatgttccatcagatcagattgctttccgtgctcgtcatctcgcctcccggtctcgctcctccactcacacctccgcttccactccgccacccactctgcctgctccagtcacccctattgctccatccacctccaccgccatacccactaccagcactacgccagcttccactgctacccctgcacccgctcccgcttctgctccacctgtccctccacctcgcttccgggagcgtgatgagactgaggtccgtcctctggcttcggatcctcgtctatttgatcttcagcgtgctactgcagcccgagtacgtcggttcaggtacgtacccgtggagtcttggctgccagctcagagagacccagcagcaggagtcctttttagcacacggattcaggagtcattcttcagggctcagatgtctgctcagattgcgctgcgagtgcaccgcctattggatcttccagctttcttgctagcagccggtgctgagtctgaggcgcatctcacctatttgccaggccttttgtcctttctgactatcagcggcagatatgttgaggagtgggtccgcgtcttctatgcctctgtttggattgacccggatcatcattggatgaggttccgctttgagcgcgaggatgtcacgatcactgccagtcagattcgacagctatttggattccctgagtcgacgaatcgccttcacagtctctgctacggcacttcagatcctccacgtcgccctcacggcggtgtggctccagggacagctcacgtcgcggctctgttccgcccgcctttcacagatgggtcgcgacgttctccagcagacttcactactgcagcgaaagcacccttgaggcctcacgcccttgtgtttggatcttaccgtcctgctcctgagattccagtgccagcttatgctcctgtgtttgacactcaggccgaggatgcagcacttcgacagtttgacacccagggcacagcagctgatgatgatgatgatgattttgggattcctcctccgcctccgcctcctatgcctccacgctcacatgatcatgaggctgggagctctagtgctgtccctgctactcctccggctatggaccctgctcttgcttcgattctccagactctcactcagcagcaggctcacctagcagccgagcaggcccgtttatcagataggatgctctccatgtttcagaacatgcaggacaggcaggatgcacttcagcagcagcttattcaggatagggcagagaatagggaattcatggctctcatgcttcagcactctggtatctccgcacctccggttcagtctgctccgccttcttcgcttcacgctccagtggtgccttcgatattgtctgcaccccctgctgttacctctccgctccggccggtcaccttggcattcacttctccggtcctcagctctgtctgcccgcagccgccagtgccaccagcatctgctgttaccactaccgctgtggcagtatctgtgaccgcttctgttccggtagctcctgcagcgctgcctgcgtccgagtcagtaccagctccagcttctaccgcagatcctggatccgagactgactctgaccctccgtcagcgttcgctctgctacctcgacctcgaccggatgcgcccccgccgcctcctcctgcatcagatgtttag

SEQ ID NO: 33306 - DNA, 294 bp, Zea mays
  Peptide Sequence Number=SeqID_76681
atgggggaagtcaaggaactgctcggcggtggagcgagtaggacggagggtctgtttggttgggctgtggctgtggaaaaagttgctgtgggctgtgagctgtggaaaaagctgttttccatccaaaagccactaaaagcaggtccagagggtgctttcagttttgcactacgagaaagtcggcttttagaaaaagctgcttcctggatccagccctttggttggcttttggcttttagggggcaaaagctaaagccaaaagccaaaccaaacacacccggagacggggaatga

SEQ ID NO: 33307 - DNA, 1155 bp, Zea mays
  Peptide Sequence Number=SeqID_76682
atgacgggtcctcgccgggagccgtggcgccggagcccgccgccgctgtcgaccaggggagcccctatcccgcggcgtctccatctagagccgatccagcaccgccggcaaccgtgcccccaacactggatctttgagatctcgattcttaaagatttcgtggagcacaggcaggagagaggcgagatgcgaaggctagaggtccttgcatggtcttgcgccattgccacggtggtgctagctctcgcgccgggtgtggctgcggccagcgaagcaacgcatgacgtggacgacgtcagcctcgccgtctcaaggatcggcaccgcagcaccgtcgccgaccagcaacgtcacggcgatctgcctgtcgacgccgtacccgagcgcgtgcgagacggcgctctcgtcgccggcgcagggctcgtccggcacggacgacccgttcgcgaccctcgaccagctgggcgacgcgctcgcggcggccgcgcgcgacgcggacggggtgaccacgtggctgagcgccgcgctgacgaaccaggccacgtgcgacgacagcctcgcggccgacccggactccgcggggcgcggggccatccgcgcgcgcctctccgcgctcacccagttcatcgccacggcgctggctctgcacgtcaacaagtccaaggctcaccacagcggcggcggctcaccgtcgtcaggctcgctgccgactccagcatcgccgttcccgtcctgggtaacccagcaggacaggaaactcctggagtcgtcccacgcgggagccagtggcggcctcgcggtggacgctgtggtggcgctggacggcagcgggacgcaccggaccattaacgaggcgatcgcggccgtgacgacgaccgcggcgaacggcggcggcgcgaggaaggtgatacacgtgaaggccgggcggtacgaggagagcgtgaccgtctccagcaagcagaagaacgtgatgcttatgggcgacggcaagggaaagagcgtcatcgtcggacacaagagcgccggcgaaggttacaccacctacgcctccgccaccgtcggtacgacgtctgatgcgcgctatacgtctgcatcaagttattcatcttttcatcacccgcggcagcatgcatgcacaaaagctacatacccttag

SEQ ID NO: 33308 - DNA, 489 bp, Zea mays
  Peptide Sequence Number=SeqID_76683
atgggaaataaggtccgttatccagttgatgacataacaaggccagtgacgtgcacactggttataagatatggtattaacaataatcgcacgaagaaagtaggaacaggcattgcgatcccaggaccatcaacatttaggacaccaccaccttctccacagccatcaagggattcacgacaatcaaagaaatctaaattacctctaccaaaattggtgtccacattcgagaaaaagaagagtaaagctactactgctggcaaagctcgatttttgaaagggattggacgggacctcacgtcacatactgttgatttggccgagcacgaggagtctgtagaaaaggctaaggcaatggccgcaaagataaagatcccaactaaggcaggttataaaaatgtgcctaaacattatgtgtcggccagacctctactaactcttgagaaactgaggaaggtccctgttggtattaaaaggttgcatgactag

SEQ ID NO: 33309 - DNA, 117 bp, Zea mays
  Peptide Sequence Number=SeqID_76684
atggcgcaaagtcaactagggaaacgccacctagatcgaatcgaactcctcgatacttggctccacttgaaccacttgttcttctcctgtggggggtgtgagacagcaatggattaa

SEQ ID NO: 33310 - DNA, 456 bp, Zea mays
  Peptide Sequence Number=SeqID_76685
atgaacaggcttgggccgaaaccagcccaggtcggcccaacagcagcagaatcgcgcccgcgcccgcgcgcgcgatggcggctttgcagaaaagccctcgaggttttatctaacaggaagcgggttcggttactatttcctggggtcactgacatttcacaaaaaggtcctctggtttctgtctattctgtgtttcacgtcctcgacggcgttcaagcgcggccgtgctccggcgagcaactacgccggccgattgaggcagtgaccggtgctaatcttcggctgagactaaatccgagtccccaagaatgtttcccccaacttaattgcactattggtgggctagggagctccggccacggtggccgtaagtacaacggcaacatgatcgtgttcccggcgatgggcaccggtctagttcaattaaaggagtcggggagcatcacagaggcatga

SEQ ID NO: 33311 - DNA, 363 bp, Zea mays
  Peptide Sequence Number=SeqID_76686
atgagcaagaacgcaagagacacaagatttatcccgaggttcggtcacaccacaaaagggcggttgaacctcccctggcaggcctggcagcctgtctgccagtctgactggcagactgacgcgcagactgacctgcagactgactgttggtcagaggtcagaggggtcagagaccagctgaactgccccttaggaccagttcaactggtcttgaccagagagtttaggagagaaaaccccagctcaactgcccggaggcaagttcagctgctgaagaagctcaactcagctgaagtcaagttcagctggaaagctcagttgcagttgaagaagttcagctgcttttcagcaagaacactctag

SEQ ID NO: 33312 - DNA, 540 bp, Zea mays
  Peptide Sequence Number=SeqID_76687
atggactcagatctccctcttccatcacgcatattccatctgctggatgagttcgacgatgctaagaagagctgcaggaaacgcctagcggaccacaaccgccgccgccggaagtcaaagccatcggatgctgatgccggagacaagaaaagggcacatgcgaacaaagcagctgctgctaaagacaaagcagagagtagcagcaagaacatggatatcggagatgggttgggcgcacagatactgggaagtgcactcttgtccaaggaacaagatcaagccatggatcttggagaggtggtgaaagaagcagtggatcccaaggggaaggcatcaatgcaacagcattacggcttccccttccattcgtcgtcagcaggatcttgcttcccccagacccaagccgtctccagtgataccacatccaatataggtcaagtgcaagagccgagcttagggttccaccatcatcagcaccaccaacacagcaacatcttgcagctcggccaggctatgtttgatctcgacttcgatcactag

SEQ ID NO: 33313 - DNA, 507 bp, Zea mays
  Peptide Sequence Number=SeqID_76688
atggctagctggagaaagaaacttgaggcttgggcagcatcgcgagaaccgcagccagctacccaccctgctgcagctccgagcttttaccccgctttgactccactctaccgctcctccagcctctgttgttttgtttcccaccgcaagaatccggccgcctacctcctcctctctccgctcctcccgacgcctctctgctacttgccggccggccgcctggcgcgcaccgccgctacgcgcgctgggcctggcatgagaaggcggtggtcccgcgccgcggtgctcgcgtgcttactgctcctcgcgtgcgtcgccgagtcgcgcgcggtgcccgacgcctcggggggcggcggcggcccaggagagcagcggcggggcgcgttcgacgtcgtggtcgtcggcctcgtcagcatcggcctcggccgtcggtggcgcgccggcgagatggtcgacgaggacaagcgccgcgtgcccacggggcccaacccgctgcacaaccgatga

SEQ ID NO: 33314 - DNA, 174 bp, Zea mays
  Peptide Sequence Number=SeqID_76689
atgaagcacaaaaccgcagctctcaagctcactcaaagatttctctccaaagatttgaaatgggagaggcaagagatagagtttaggagagaaaaccccagctcaactgcccggaggcaagttcagctggtgtatggtcaaagaggttcacagctgaatttgactttcagctga

SEQ ID NO: 33315 - DNA, 381 bp, Zea mays
  Peptide Sequence Number=SeqID_76690
atgtcgacgtgctggcgtgctgctacagaaggtgttagatatatgcaacaatctgatattccatactaccttaaccatgtggaggttccaggcggagatgttggtgctcttctaatcccccacgaggatatatggaaggagtttacggcgttgtccaacgagaaagttcaggaagctcctatggtgtgcatctataaactccgagaacacgctgggggttcaagcttccattttgtgagtgattttaagcaagaagttttgacaaaaaccctggctcttccaaatggcaagcccactattgttgagttttatgcaaactggtgtgaagtctgcagggaactagctccatatatctacaaagttgaacaacaatacaagtaa

SEQ ID NO: 33316 - DNA, 1065 bp, Zea mays
  Peptide Sequence Number=SeqID_76691
atgtcggtctcggcgtcgtcaccggcggcggcggcgggcgatgagaagcaggaggcggcgcccgtcaggcgctgcaagggcgtcaacgacctcgacaaggtcgttctccgcgaggtccggggcagctccgcagaggtgtacttgtatggtgggcatgtgacatcatggaaagatgagcatggagatgaattactttttgttagcaataaggctattttcaagcctccaaaagctatacgtggaggaataccaatatgctttccgcagttctccaactttgggaatctggaaccacatggatttgcaaggaataggacatggagtgttgatgatgatcctccaccatttccagtgccaacctccaatagcgcttatattgacttgatcctcaaacctactgaagatgatttgaagatctggcctcataggacacctgaaagacttatctttgttatatttcttagtatgtttgttgcattagaaggcaagcgtggctatctggttgcacttagtcctggtggtgatttgatgctaacttcacgtataagaaacactaatgcagacgggaagccattctctttcacttttgcataccacacatacttcaagatttctgatatcagtgaggtgcgagtagaaggattggaaactctggattacctagacaacttacaagatagagctcgttccactgaacaaggcgatgcaattgtttttgaatccgaactggacagaatatatctgggcacaccatcgaaaattgccattattgatcatgagaagaaaagaacatttgttgtgaggaaaggaggccttcctgatgctgttgtttggaacccctgggataaaaaagcaaaggctatgtcagattttggggatgatgaatataaacgaatggtatgcgtggaggcggctgctattgaaaagactgtcactctgaagcctggtgaagagtggactggaaagttggaactttctgctgtgccatctagctattacagtggtcagctagaccctgaccgtgtgattcaggattccactgtcccggaggactccatcagctag

SEQ ID NO: 33317 - DNA, 2646 bp, Zea mays
  Peptide Sequence Number=SeqID_76692
atgatgcagcagctccgtcacagccagccgagcccgtgcctctgcggcctgcgggcggcacggcctatgctcgccctcggcgcagcagcatcccgttcgcggcccgccggaaaactgcaaccgagcgtctgcctcggcctcggccatgtagccccagccgcggcgagaggacagccccgtccccgtgccgttgccgactcggcgctgggagcatcgcctacgagcgtgcatgtcggaggcaagctgctgctgcagaacttcgccgccgacagccagcagcggctcaagctctccatccagcttgtcagcgccaccgtggccgatcccgacgggcgcggggtgaaggcggaggcgtcggtgctggacgccgtcgtgggcagcggggacagcgagctcgacgtggacctgatctgggacgaggcgctgggcgcgcccggcgcggtggtggtgaagaaccactccgacttccccgtgtacctgaggctgctgagcgtgccggccggcgtcggcggcgccgacgacgaggccgccgccgtccacttcgcctgcaacggatgggtgtaccccgtcgacaagcacccgtaccgcctcttcttcaccaacgacgcgtgtgtcaaggaagaaacgccgagcgccctgctcaagtaccgggaggacgagctcggcgcgctccggggagacggcgagacgacggagcgaccgttccagccgtgggaccgcgtgtacgactacgcgctgtacaacgacctggggaacccagacctgcgccaggacctggcgcgccccgtgctgggaggatcccaggagtacccgtaccctcggcatcctcggtcggagagcagagcgccgctggacgaagagatctacgtcccctgcgacgagcgcgtcggcttcgccagcatccccgcgccgacgcttccgccgctgggcgggcacttcaggtccctcgccgatgtctaccgcctcttcggcctcgacgacctcggccggctcccggaggccaaggcggtcatcaacagcggcgcgccgttccccgtcgtgcctcaggtcatttcagtgaacccgacacattggcggaaggacgaagagttcgcgcggcagatgatcgccggggcgaacccggtgtgcatcaagcgcgtcaccaagttcccgctggcgagcgagcttgaccgcggggtgttcggcgaccaggacagcaagataaccaaggaccatgtcgagaagaacatgggcggcatgacggtgcagcaggccgtagaggaggggaggctgtacgtcgtggaccaccacgactgggtgatgccatacctgaagcgcatcaacgagctccctgcgagcgaggagaaggcggaggtgtcgcagaggaaggtgtacgccgccagaacgctcctgttcctggacggcgaggactcgtcgatgctcagaccgctggcgatcgagctcagctcgccgcacccggagaaggagcagctcggcgcggtcagcacggtgtacactccaccggacagcggggacgacggcatcacggccgggaggttctcaacctgggaactggcaaaggtttacgcctctgccaacgacgcagccgagaacaacttcgtcactcactggctcaacacgcacgcatccatggagccgatcgtgatcgcggcgaaccggcagctgagcgtgctgcacccaatccacaggctcctcaagccgcacttccggaagacgctccacatcaacgccgtcgcacgccagatcatcgtcggctcgggtgaccagaggaaggacggcagcgtcttccgtggcatagacgaggtcacgtacttccccagcaagtacaacatggagatgtcctccaaggcgtacaaagcctggaacttcacggaccttgctcttcccaacgatctcatcaagagaggtctggcaaaaggagatccaaagaagccagagacggtggagctggcgataaaggactacccgtacgcggtggacgggctcgacatgtgggcggcgatcaagaagtgggtggctgactactgcgccatctactacgccgacgacggcgcggtggcgagggacagcgagctgcaggggtggtggagcgaggtcaggaacgtggggcacggcgacctggcggacgcgccgtggtggccggcgatggactgcgtcgccgacctcgtggagacctgcgccaccgtcgtctggctgagctcggcgtaccacgcgtccatcagcttcgggcagtacgactacctgggcttcgtcccgaacgggccctccatcaccacgcggccggtgccgggcccggacgccggggcggaggtcacggagtcggacttcctggcgagcgtcacgccggtcaccgaggcgctcggcttcatgtccatcgcctcggggccgatggggctcaagggcacggaggtgtacctggggcagcgcccggacacggagcagtggacgcgcgagcggagggcggccgaggcgctggcggagttccgggcgaggttggaggaggtcgcgggcaacatcgacaggcggaacgcggaccctgcgctgaagaaccggacggggcaggtggaggtgccctatacgctgctcaagccgacggcacagcccggactggtgctccgtggcatacccaacagcatcaccgtttga

SEQ ID NO: 33318 - DNA, 483 bp, Zea mays
  Peptide Sequence Number=SeqID_76693
atgagagcaatatcaaattacatttgtaccttgagcttgacagaaggcaaagtcggtgcatctggaagtacgcttcgaagctccgtgattggtagcttcggcattgttcctgttctggccttccgaaggcgtttcttctcacaggaccttcggcaacaaagcatgcccccaacagtgtccttggacaacaatgacgacctgatgtctggacattggatgggcttggtctcctcctctgacgaagatgatgagaacgacgatggcagcaatgactacgacatcagtgacgaggacaacgacaacagtggcgacgatgacggcgatgatgatggcggggcaagccaaagcgatgagatgcctcccagcaagcgtcatcagctgcagcatgataacttattatggtatgcgtggccggctttagatggtgtgcgagatgacacaagtgattatcctggttcgggcttctcgaggtcctacttctag

SEQ ID NO: 33319 - DNA, 378 bp, Zea mays
  Peptide Sequence Number=SeqID_76694
atggctggcagacgttatgggttaaggatattggatgttacagcagcagcacctaccatccacgccctgcgtctgaatgtgtcgttggccttcgacttcatccctctacccgaaggcatcaccgacaccgagagcctgcctttgttcgtggaggccatagtcccaacgacgtctcatatggctgaatcttcagatctgtacaagataaggctgatgcgtgatagggcaaaggcggctgcgggaaagacaaagacgaaggggaaagtgaaggaagccacgagcagcgaatcaacaagtgaagcattcaaaatgaagaacttgtggggtggattagtgaaggccaagcttttgaagcaatggaacatcctaaagggctga

SEQ ID NO: 33320 - DNA, 618 bp, Zea mays
  Peptide Sequence Number=SeqID_76695
atggaactatcgaaggaagtgaaatcaaaatatgaagaacttgttacattggcttttggcttcaaagaacagtcttcatataaggttccttcagctaagtggttgaggtttattgaggagaagtactatgaagatccttcggccaatgttggagctggaggtaaaaggaagagagctgctaagagtgaagctgacaaagagccaccttcgggtctggtaaagaagaatgctaaaatgtctgttcataacgatacaactgtgaagaagacctcgactccaaaaaagaccacaagacccaagagcaggaaaagggtagcaccactaccacttcgtcatataactgcacccagattatcaagtcccttgggaccaacattgacttggtttatgataaattcaaaggattctgacgaaggtggaaaatctttgaagggccaagaaattttatctgaagaggaggtagagagcccgcgcattctaggtcttggcacagctgccttcgcggtttcatcttcttctgagaaaatggcacaacgaaatctgtcgaagatgacaagtcttcggggcacaagaaaacagaaggagacccgaaagaggaaaatattacacttgagatag

SEQ ID NO: 33321 - DNA, 912 bp, Zea mays
  Peptide Sequence Number=SeqID_76696
atggatcttgccctagttgcagtgtctgttgctgatgtcatggccactactatcgcgagagggtcggtgcaggtgacggcgtcccccacattgcccttggatcccacggggcaccgcaaggaggtggctttttgggtcaagccacaaccttccgttcattcgtcggtcgcgctacgcatagtgatcaccagaaagcgatcatctcgtcttgattacgtgagcataagtgacgggcggtgtcttcttgctcgagcggtagcttgggtggaggcgctgcgatcagctgaggtggaggcgatccagctccacgcgagttcctcctgtgccaaagacaaagagcgcgagctcgctaacctccactccaaaatttgtcgtcttcgaagcgaggtgtcgcccttgcacgcggagtgtgatggtgctcgtggcgacatggaccacctccaggatgagggctctagactcaaggagacaccacgtggagtgaagtctcgcatcgaactggccaaatcatcctcatgggaggtggaggttcgcctggtgcagccaggctcggagctcacaagggagcgcgacacgatcgaagagctccacaagattgtcgttcaagcgtgggatgcaaaggccatggtggacaaggtgggggtggtggccatagaaaaaacatgcaagctcttgctcgctcgtgaaaatgccgtcaccgcggggtgccggacggacgcccttctttctgagaggagctccgaacaccaagagctctgtctggttgctagcattgtctgtgactacctctttcctctgtcattgaccaaagcgcccttgattgaccccctgcgagaggttcccaatcgcgtggagtgctctgtcgccaaaggtgttagtgaaagggaattaggcttacaccttttttcctaa

SEQ ID NO: 33322 - DNA, 210 bp, Zea mays
  Peptide Sequence Number=SeqID_76697
atgtcgcgtgcgtccaatgactactatatcaaggattgtgacgtcatctcggcgccggaggtgacgcggaggaggataggcagcaatgaccagttcgtcatcctcgccaccgtcgggggaaacttcttcaggcaggtgtgggacgtgctcttcaactacgagaccatgcaaatcgtggcatatattaaagtctgcatggcactcaactag

SEQ ID NO: 33323 - DNA, 225 bp, Zea mays
  Peptide Sequence Number=SeqID_76698
atgggctacgcgcaagcgaacgcgagtgcgtgctacaagaatgtggttttggggttgtcatccacgtgcggttctgcgaatcgcgtcgtgcggggagccatgcacaggggtagacgcgtgatgtccgtcttgacgagcgaggacatggcgcccacctcgcagtggctggtcggggttcgcgcaggggctatccgagggtgggacgaggttgctgttgtgcggtaa

SEQ ID NO: 33324 - DNA, 816 bp, Zea mays
  Peptide Sequence Number=SeqID_76699
atggcaaagtggtcaccacaccgagcgcaaacgaggggagaggaagaggggatggagataggaaggggaggggctcaccatgggcggatggagaagaacgacatgggcgacacggcctccggcggacggcgtgctaagcgcggcaaggcgccaatggcaagaggagggcgcggaagggaggcgcgaggcgggcccggcggctgggcgaacggcgtgggcgagcgcctctgctcgcgcgcccacacgcagggtggcggctgtggctgggacacccacgctgctagggtttgggggcgctgggccacggcgagcgagtgggccaaggggaggtgggcctcgcgcaggctgccagggagggcgcggctgcggatgggccacggggaagggaggaaaggagccagttgggcttgcgctggggagtgggccaggggtgttacaggccggataggcggcacctttggcaggcgaagcaggcgacgcttcacctccgccataatgaccgcgtcaaaaaagggaccgagaaaggggatactcctaaagggatccttctccgcgaaggaagcgggccccgagccccctactgatcagaggttcgaaggctggcccctcagaagggttcgacagccgcctcagagcactcgggctccgagccctcctactaatcagaggttcgaaggctggcccctcggaagggttcgacagccgcctcagagcactcgggctccgcgtccaccactggtcagaggtttgaaggctggcccctcggatgggtccgacagccgcctcaggccactcgggctccgcgcccactactga

SEQ ID NO: 33325 - DNA, 1509 bp, Zea mays
  Peptide Sequence Number=SeqID_76700
atggagaagtgcaaaccaatcaagacacctatgccaacaaatggacatctcgacctagatgagggagtgaccttgcctgcccgtgaaccgtctcctgtcctgcctggatttccacctctcgttcgtcaggtcaggatgccgcgcacgaagaatgtgtcgacgccaaggggaggcgatgatgaggatcctcgtcgcccctttaggcaggtcaagggaaagaccgccgagctaggagatcagccacagactccttcagatcagattgcgtaccgagttcgtcgcctcgcctcccggcctcgctcctccactcccaacgctgcttccactcctccacccactttgcctgctcatgtcacccctactgggccatccaccacctccactacaccagcttccactgctcctcctcccgctcccgtttccgctccacctatcccacctgctcgcttctgggagcgtgatgagactgaggtgcgacctctggctgcagatcctaggttgtttgaccttcagcgtgctacaacggcacgggtacgtcggttcagatacgtacctgtggagtcttggttaccggctcagagggaccctgttgcagttgacctcttcagcacccgtattcaggagtcctttttcagagctcagatgtctgcacagattgctctgcgagtgcaccggcttttggaccttcccgcttttctgctagccattggtgctgactctgagcgagaggatgtcactattcatgccagccagattcgccagctatttggatttcacgagtcatcgactcgtcttcacagcttatgctatggcacctctgaccctcctcatcgccctcacggcggtgttgctcctggtacagcccacgtcgcggctctgttccgatcgcccttctcagatgggtcgcgacgctctccggcagacttcaccacagcagcaaagtttctatatcagcttatgagacggacacttctgccgtggatggggtacagggaggctaccacacatatccagctctggctccttggtgccctggtctctcactcagagtttgacgttgtggatttccttatttgtgagatcgaggacaccgtattggatggtctgcgtgcacgtcgacagctgccatatgctcactatctatgtcacatttttgctcagctgattcggcctccacagttccagggcacacttgaggcctcacgcctcgtctttgggtcctaccgtccagcgcctgaggatcctgcgccagcacctgctccagtatttgacactcaggccgaggatactgctcttcatcagttcgaagctcaggacgcagcagttgattatgatgatgatgatgatgattttgggatttcgcctccgcctcctatgcctccacgctcacatgatcatgaggctaggagttctcgtgctacccctgctgcccctcctgccattgaccctgctcttgcttcgattctccagacactttctcagcagcaggctcacttggcagccgagtag

SEQ ID NO: 33326 - DNA, 537 bp, Zea mays
  Peptide Sequence Number=SeqID_76701
atggcgcccgagggtggacttaactgctgtcagcctcactctgtcgagtggcacaacagtcgggagcgacgcaggcggcgctgttttcctgtcaggtcggtcagtggagcggcgaagtgtctgcggtcacttcggctctgtcgactgaagagcacacgtcaggataaggtgtcaggcaatccttgcattaaatgctcctgcgatacggtcggttggcgtggcgatctggccaaggttgcttctctgcgaagactgggcctcgggcgagccgaaggtcttagcaaatatgatatctgctgcactgcctatatcaaccagaacattatggaccaaaaatcccttgatgacacaagatatgaccatagcatcattgtgagggtaatctttgagctgaaggtcgtcctgggagaagaaggcaagggtacaagtgtgatgcacgagcgagtacaagtcagcgtgaacagtacggggaccttcggcgacgaagcagacccccaacaatgcagctctacaacctcttttcaaaacaatgtctag

SEQ ID NO: 33327 - DNA, 501 bp, Zea mays
  Peptide Sequence Number=SeqID_76702
atgtcatcccgtcacatccccacgaagcgctcgaccagggtcgtcgtcccctacaacccggagaccagtgttggtctccaggcggccctcgtggcgcccgcgtcggcgcacctccatgtggccgagcccgttcgccgcagtgcccgcatcatcaccctgcaggcggtgacaaccaccgaccgacgccgcaacaccccctactgcatgatgaccagctcccgtttctgcgtcgacgatggttctctcttctgcaagctctgcgaccgccgcatgcacgaccgcatcatctacatgtacatgagcatggggttctgcacggaagagtgcaggaatgagtattttttggactacaggtgtaggctcaccatggcgacggtggaggccgagggcaggagcgaggcaaggaagccggtggaggcggcggcggcgacgacggagggacaaggtgttggctacaggcgcatcttcttcacttgtgccgaggtcgagtcgttcccttag

SEQ ID NO: 33328 - DNA, 441 bp, Zea mays
  Peptide Sequence Number=SeqID_76703
atggacgagcttttcaataagctcaactccatagagattgaccaccagactcaggccaagactgagaaccctggtgcacccaccatagctctggcctctagaggtggtgcttcctctaacccctcacctattatgtttgctttgttttctttggtgacgattacaaaggacaaccccaaccacttcatcgctagtttccccaagaagcgcaagaaggaggctagcccgctagaccaccactttggtcggcgcaagggcaaactagagtactcctttggcaagtacaagtccaagggaggatttgacaaggaatcactcaagaagaagtacctccagaaggctgagatcaaggagcgtgccttattcgcctccctcagcgacctcgaccactactccaacgatgtaacatcttcctcaaacgatgagaagactgacagatga

SEQ ID NO: 33329 - DNA, 252 bp, Zea mays
  Peptide Sequence Number=SeqID_76704
atgattccggcgaggaatcctggccgtggggagaggcaatcaggcgtgctaaagctcgggctagctccgacagaggaatgggaaagctatgggctacaaccggggctcagggcgaggctaatttggccggacatcgcgcgggtgcagcgagctggcgcggccgagctccagcgagggcgaattggtcatgatacagcagaattaaaggaaaccgagcacatgagcgagttcctcacctcgggaagggtttaa

SEQ ID NO: 33330 - DNA, 189 bp, Zea mays
  Peptide Sequence Number=SeqID_76705
atggctcgcttaactcccaccaagtccaaatccaccgggaagtctaagccctcctcgtccgccatggacgccgcggcggagcccgacgcgatatcgtcgtggcggccgaagcgtgacaagcgcggacggtccgcggcacagggccagacggtccgcgacctggtgcaggagctcgggttccctgcctga

SEQ ID NO: 33331 - DNA, 144 bp, Zea mays
  Peptide Sequence Number=SeqID_76706
atggctagttgtgcccccggcgcgaccgcatgcgccggcggcgtgtggccggcgtggctcgctgcccaggcagcgcgcggtaaagaagaaggtgtcgaggtggatctccaggagttccaggacttcgacgagttcgaggattag

SEQ ID NO: 33332 - DNA, 390 bp, Zea mays
  Peptide Sequence Number=SeqID_76707
atgcagaatgctacatggcgtgcgctttcgcagtactgttcgttgtttagcgaggtagctggcggcctcgacctgaagtattacgcccgccgttcgacaggcagtactagaggtgtgattgtctcaccagttggtgagggcgatcccagattgagcagcatggtcaatctggtcgttgtgctcaacaccgagctggaccacgcccttgacgagttgcgcaaggctcgggcggagattgcggaactgcgtgctgagcgcgtggagcaccaccatcaggaagatggttcccccacccctgttggaactcagcacccttaccgctcgctgctccgtggtcatcatgcttatggcacccatgactgcaggaccaagatagacttggagccctag

SEQ ID NO: 33333 - DNA, 534 bp, Zea mays
  Peptide Sequence Number=SeqID_76708
atgcgagcctgcaagggacagaaagtagcagctgggatctatgaactgtcggagtgctacctcggagacactgatgcaggctacaggggcactactacactgggcagggagccagggacgccggacgcagggcatgctgtggtgctgggcaggctgggcactgctgcactcgcctggatctcgctcctcgctggcggagtggcggtggcgggtggcggccgggtggctggggcagggacacagccagccagccacgcaggcggcaccgcgacaggatggcagggtagacgccggcgcgactcggtttctgctttctggcggctggtggtgccccaaccaccaaaagaaccgctggtggaggctgctggcatatggcgcaccagacagtccggtgcgccaccggacactgtccggtacgccagccacgtcacccgaccacagttggagcttctgacttctaggccaccggatagtccggtggtgcaccggataggcactattcactgtccggtgcgccttctggtgctgctctga

SEQ ID NO: 33334 - DNA, 771 bp, Zea mays
  Peptide Sequence Number=SeqID_76709
atgccggggaaggcgaactgttgctgcccagctaggatgcaacattccgtcctatgtcctcgctttcgtggcgaggacgggagtgaggacctgccggtgcgctttggggcggccggcgctcgctggtgcggcgttggtggacaggtggacgccgttgtcgatgctgacgtggtcgcagctggagaaagcttctccgccgtcgagaccgtcaacgccacctgtggaccaacctccagctctttggctttaatgtctggttctcgtcccttgagtggggacgcgaacgagagccttccggtggcagcatccatcctgggaccatcgctgctgctgcagaggtcgctggcgggtcgcctggagtttgtcgtcccgcaggctctccggtgtggaggttgttcatacccgcgggggtggaaccggagttccgtttgtaatggcaccttgagtgccgatgtctgttcattgtggctgtcggagcctgaacatgtagttaaaggaaccctcggccgctctgcgatgagccggagccagaggcagcggtgtcagcatggacaaaggcggagttggctcgaaaagaggcttcatcggccagagcctgaccgggccgtccactggcgggaccaacgccggagtcgagttgccgaggccatgagccgggctggtgtcctcgagggacagttggctgaggcttcagggcggtcggccgagccgtttgctcgggccgggttcctggaggagaccctggcggcgatggcccgggcgtggtgctaa

SEQ ID NO: 33335 - DNA, 174 bp, Zea mays
  Peptide Sequence Number=SeqID_76710
atggagagtcatgatctccgggcagaaagggaatcacggcttgtgggtggcaatgagattgatggttctggttatgactatggtactggttgtcagcattgcaaccactgctcaggagaagatgaagccgtggaaggagacttccaggagttccaagactacgacgagttctag

SEQ ID NO: 33336 - DNA, 1098 bp, Zea mays
  Peptide Sequence Number=SeqID_76711
atggctgaaaggtaccaactcccgcggagttgcgttcctccaacgatgaggcggaaagacagcgggtatcccccatccgggggcttggaaggtggaaagacacgatgcataagggagcgcgaagacatggtcgccttccaagggggtcaccctccttttaaaggcgacgatccctactcgcatccccagccatcacgggctgagtcttctccaacacgctccaaggtccccccctgcggcgcgggggctgggtcccacacgtcatgcaagccgactcagagcagaagaagccaaaccgccgcgcgcggtgcgcacgaccgcccaacggttacaagtgaccctccacttttgcccagaccaacgggcgaaagaggcgggcagccacgcaggcagcatgcaaccgcgccaagtgggcgcgcttctccgacccccaacacgcccagcctggaggcccaggcccacgcgtcatgcaaccggcgcgccgactgcttcgtgcatgcaactgcaccgccacttgcgccaccaccgcgcctccttgattgcggaacaaataccgcgactcgaggcgacccagcgcacaacccggcagcgccagcctggcgcggcggtcaatgcggccaaaaatgggccggcagtaatggcggtggcaggcgggcaggagcagcggccacgtcgagaagcgggcgacgcttcgccttcgccataatgaccgcgccagtaaaggctccgagcctccctactgatcagaggttcgaaggctggccccccgaagggttcgacagccgcctcagatcgcgtgggtcctacacccactactggctggcccccgaagggttcacagccgcctcagacgccgagcgagggatgaccatgggtacgttcgataataaccaaggctcgggctgcgctcccgagctcaccggagacaccatgttcggcgcccatcgagggcaacatggcgctttccccccctcctccttgcggaaaggcgacgcaggggcgtatgtaaaaaagccgagtctgtccctgatcgccctctcgccctgtgcggaggctcgggggctgctctcgcaaacccggctccggccgaaccgttga

SEQ ID NO: 33337 - DNA, 276 bp, Zea mays
  Peptide Sequence Number=SeqID_76712
atggccaaggtcgagaaggaaaaggaagaagcactaaaggtgcataatgttgatatgatgaggataaaagaacatgacaagtcaatcatcaaacttcataccaacctcaaaactacaaaagatagtattgctagcaaggacatagaaaatcaaaggatattggaaactttggagcagcttcgggctggtggaacttcgagggcaacttcacataccggcggggacattgagggggtgcttggttgtatcaagatccactggttttacaccgtttag

SEQ ID NO: 33338 - DNA, 666 bp, Zea mays
  Peptide Sequence Number=SeqID_76713
atgggaagaggatccgaggacatccgcgagccctccaagtcagcctccggcgtcatctcccaaagcggcaaccgccgctccgccaagggaagcaccctccgacggtggatggcggcaatcactcctgcggcgttgtgcaggatcgcccgcataaagtggctcgccggcacaccgaatcactgctcgtggaaggagacgaagctcacgacgtaccccggtggcggggacggagcggctccgctcgcagggggaatccactccggccgcctctcatcagagagagggcgaagtaaaccctcagcaacaagatcctccagatcacccgtcgtgaccgtggagaaaggccatggatcgcgcggcgagatgatggtcacccggtcggccatcaccgagcaaaaggggtggcggcggaaaggactgggtaagcggtttccttttctctggctaaacctctcgggttgcgaaaacctaagggggaggcgagaagcggagcaaagaaccgtcgccagaccctcctccgagtatataaagaccaaggcgagacccgttcaacgtttcgcctggacccgccgcgggattcaaaaacccaaagcgaaacgaccgttcctcgaacggctcgcgcacgcgcaacggccgccccgcgaaccgcacgccccgtcgcattaa

SEQ ID NO: 33339 - DNA, 873 bp, Zea mays
  Peptide Sequence Number=SeqID_76714
atgactgggcgcccgccgctctacgccaggtctccggctcgtcgccaggccttcgcgagcaacgagcacccaccaccaggtaagcgcaccctccctccctcccttccggcgatgaccgggcggccgccgccctacgccaggtcttcggcccgtcgccaggccttcgcgggcgacgagcatccaccaccagctctgctgggtcctccgccgctggtcgacccgagcgcaggccgaggagtgtgcttgatgagcacctcatggagggacaagcagcgcccggaactcgtcaatttcgtcgccacgttcctcgctaccaacatgtaccgcctcaatttcatgtcgctttctccggacttcatattcaacaatgggggcttatcggttgctttcgccttcgagaccgactggcttcctgaaagggaagctgcggtcttcagcagggtgactacactgaagaggcagttcaagtacctctatgtcgttgtcgtcgtccgctcggcagagcagaatgaatcatttaatcagtcatatttcaagtatggcatggagcttggctgtccaacattcgtccctgtttgtgatccagcgatgggattcgagaagattgtaaggatagctcatgctcgtggaggtaaaacctttgttgcttcatttactcagttcctggctcgtgttcaagttctgaaccgcgagctggcattgatcgcgtgtctgttttcttcagtctgcaagcagaaagacaatatcgcaactatgagaattgagcgtgagcaagctgttcagtgcatggatgcgtttttacgagtgctcacctctattcctggtattgacagtcatgatgcaaatgccgattcagggcagatcagtgcttaa

SEQ ID NO: 33340 - DNA, 741 bp, Zea mays
  Peptide Sequence Number=SeqID_76715
atgtggcgccgcctccaaaccctagccccctcgctccgccgcgccgccgcatcgtcgtccccggcctccgcccgcgccgtgcccttgtccacggtgccggtggccgcgttccggcgcacttcgaccctcctctcctctcccggcgacaagccggcgcccagcaaggtcgaggatgtcatgccgatcgccacggggctggagcgcgaggagctcgaggcggagctccaggggaagaagcggtttgacatggatcctgccgtcggccccttcggtactaagattaaacttgtgctaagcacaagtaatgacacaatatttcactccagtatggacatggctttaagtaaaaaagacccaccagatacatctcttgttactgatattaatatcgtaaactacaaagtatttgatatgtgcatgcttaagctgcattacctgaagcttgtttcaaatacaccagcagtcagccagccgtacatgaaattcgtaggacttcctatgctgcaagatctcaattgttctggacaatataaagaatcagccgtgattgaatcctactataacaagagaatagttggctgccctggtgccgaaggagaggatgaacacgatgtcgtctggttttggttggaaaaggataaaccgcatgagtgcctagtctgctcacggtactttgtgctcaaggtcattggtgatgggggtgatccagatggccacgatgacgaggatgatcatcactga

SEQ ID NO: 33341 - DNA, 285 bp, Zea mays
  Peptide Sequence Number=SeqID_76716
atgctgatctctgaagctatgaaggcttcgttgtcaagcaacaaggtcaatgcgcgcctccctggggatgaaacaatcctaactccaggaaaggacaaagttgtcgtatacaagagcttcttcaaggcaggacttcggcttcccatgtacaagatgattgtgaaggtgctgcaacattatgagatgaaggccaaaggtcagaccgaccttcataataactttgaatgctacaactttgtgtattgtaaggatacagctggtcaagttcttgcttaccgaacctag

SEQ ID NO: 33342 - DNA, 186 bp, Zea mays
  Peptide Sequence Number=SeqID_76717
atgaagtatcaagagttcttctactcaaagaggatcccaaggctgctcttaaccgggttgcacactttacccacaagtcgtgattcccgttctgcccagggatcaggactccccattgatcacttccaaagtgacctggtagggtctcactatgtagattttacaaagattccccagaggtcataa

SEQ ID NO: 33343 - DNA, 609 bp, Zea mays
  Peptide Sequence Number=SeqID_76718
atgacaggtcagtctagccacttggagagactgcaccgccgcctgcacgaggagcaggagcaccgatgccaggagcagcagcaggaggaggtggagtctaggagacaaccctcccctgcgcctcagccagagatgccccctacaccaccacagggcatcccgactgctggaggagactctgacggatacggagacgacaacgacggtggcagttcgagccacaacatggagctttcagaggagcaagagccggaaggatggatcgctcgacccatcacttgtgatgccgctcgcgactgtcatttccacgacgctctcaaccccttgttgtgtcggtccttcgaccgacacacttggtccatcgagtatcgttgtgtagtcaccagcatcgtcgtgggttatacccggaccagtgggaggctacttgcttgcggggtagctgacgacctcgacctgaagtactaccctcgccgttcgactggcagtgtcgaaggtgtgattgtctcacccgttggtgagggcaatcccaggctgagcagcatggtcaacctggtctccatgctcaacaccgagctggaccacacccttgatgagttgggcaaggcttag

SEQ ID NO: 33344 - DNA, 813 bp, Zea mays
  Peptide Sequence Number=SeqID_76719
atgtccagcaagcctttcgcgagcgtgctggcgtcgtccgtttgctcgggattgacgtgtcgcggggagtcggcgctcgtcttcgtctcaaacgcgaggtcgatgccctacgcgccccccgttggggcgctggcgccgtcgactcgcttgacagccgacgaggcgctgcctcctgcttggccttggttgccccgcctcctcctccgtcggcgagggagaggacgggctaccgtcgagagacatgaactcgagactcccgaaacggagcaccgtcccgggtcggagaggttgctggagactgcccatctggagcttgacgggaagctattcgtcaacacgcagcaggcccctacctggcgcgccaactgtcggcgtttcgagaccggggggtccctgggccgacgagtgaatgtcaccgcgtgccccagcccagatgggtcggcgcgaggccgagcgcgaaggggggaagcgaggtcgccggaggcgggcgtgagagaggtggaaatcccgcggccttcgtgttcgtcccgcgctcaggtcgggcgtaaggagaggatccagcctgagtcagctcggggtagggtgatgatggcgcctcctgtcgacgtggtcggtccgcgccctaggttgggcgacgtggaggctcctccgaggtcgaggtcgagtctatcttctgtggccgaggtcgagtccgagcccctgggtcgggcgaggcggagaccgtcggctgaggtcagggcggagtccgagccctggggtcgggcgatgcagagttcgtcgtcttccagggctgagcccaagtctgagccctag

SEQ ID NO: 33345 - DNA, 462 bp, Zea mays
  Peptide Sequence Number=SeqID_76720
atggggaagggcgtcctggaggtgcacctcgtcgacgccaaggggctctccggcaacgatttcttagggaagctggacccctacgtgatcatgcagtaccggagccaggagcgcaagagcagcgtcgcccgagaccaaggaaggaacccgtgctggaacgaggtgttcaagttccagatcaactcggccgcggccaacgtgcagcacaagctcatcctccggatcatggaccacgacaacttctccagcgacgacttcctcggcgaggcgacgatcgacgtgacggacatcgtcagcctgggcgccgagcgcggcacgtaccacctcaacgcgggccaagcacaacgtggtcctcgccgacaagacgtaccacggcgagatcaaggtcgccatcaccttcacctccacccagacccagaaatggttctagttaatttcagtggggaacagggtggagaatag

SEQ ID NO: 33346 - DNA, 2376 bp, Zea mays
  Peptide Sequence Number=SeqID_76721
atggcggcgcgggcagcgggctgctgctcctcggcggcgctcgccttcttccgtctccaccccctccgatgcgccgtccgcccggccgccgctctcgttggagggtgctcctctggcctccgcggcggctgccggagccgcctggcgcatagcatcgtggacttggttatggaggagctccgctcccgccggcgcgtccgggtctcggcgaagataggattgcagggcacgaaggaattgcctgacaataagatagtcaagagaacattacagaaaggattgctgcttgaatttcagaaagatcctgagagatctttgcttgctgtagttgaaaggcctgatggaaagaaaaactggatggtgactgatcagaatggtgtcatgtcttcgataaagccccagcaggttacatatgttgtacctggtatcatgaattttgactattcaaaaatagacgaatttcttgagaaaacgcaaaatcttttggacccaactattttagaatgtgcttggatggagctgtctgagaaggataaatcaataacagttgaggaatttgcagagatagtgtatggtaccaaggagtctttggaaagctactgtgcacatctcttgttgtcaagggatgtagtgtattttgtcaaggtagagagcagagattattccatgtaccaacctcgttcacctgctcaggtagaggaactcctacgacggaagcttgctaaagaggccgctgataaggaactggaagaatttgtccatttactcaagtctgccaaagcattgcctatggagtccaagcctcctaaagcgtcatggttggtggaagaaaaagtcaggcaaaaaatcgagtctcttcaagcatatgcagttgatgcatgtgatgatgaacaaagaagactagcaggaaatattctcaaagctatgggattcacgaggacatcatcagctgctctaaagcttcttataaatgttggatacttccctgtgcatgtcaatctcgaccttttcaggtacgatgtccgtataaggtacacagatgaagttttgtcagctgcagaggagcttctggtggacagccctgacacagacatgcatatcaggaaggatctttcaactttgaaagtgtacgccattgatgtagatgaggctgatgaacttgatgacgcattgagcgcaaccaggcttcctgatggtagaataaaggtctggatacatgttgctgacccaacatgcttggtcaaacctcatagcatcattgatagggaggcaatgcacagaggaacatcaatctttctaccaaccactacttttccgatgttcccagagaggcttgccatgaattctatgagcttgcagcagggtaaagaatgcaaatctgtaactgtatctgttattttaaacctagacgggagtattgcagaatatactttagaaaattcagtcatcaaacctacttatatgttgacatatgagagtgcaactgaattgctttacatgaacctggaagaagaggaagaactaaggattcttcaagaagctgctaggattcgtgaacagtggcgtcgtagccagggttcaatagacactgcgatgatagagccacgtataaaggtgtcaaatcctgatgatcctgaaccaaatatcaatctatatgttgaagatcaagccaatccagcaatgcagcttgtatctgaaatgatgatactttgcggtgaggcagtggctgctttcggttttgacaacaacctccctttgccatatagaggtcacccccagtccaacacagcagtgtcagtgttctctcatctacctgaggggcctgcaaggagctttgccaatatcagcgtgctccgtgctgcagaaatggattttcaaaaacctgtaccacatggtgtacttggtattcctggttacgtgcagttcacctctcctatccgaagatatgttgacctgctagctcattatcaggttaaagcttttcttagaggtgactctccaccatattcagctggcgatctagaaggaatgacatttattgcgagcatgcatgttaaagtagctaggaggcttcatagcaatagcttacggtactggctgttggaatacttgaggcgacaaccaaaggggagaaagtacagagcactgattctgaagtttgtcaaggatcgtatgggagctctgcttttggtggagcgaccaaaaacacatgctgtagaacagagggaaaaggacatggttgggatgcaagttacaacgacaatttcacgtgggaaagtgggagatcaagtcagtgttactgtggaaacagctcatccacgtgatgatatattatcagtcagagaggttgtagaggacaccaaggattctgagtaa

SEQ ID NO: 33347 - DNA, 351 bp, Zea mays
  Peptide Sequence Number=SeqID_76722
atggctaaagctgttaataagagcaaaaaatctaaaattaagggttcacatcatgatgacgagggtgcatattctgataccgattcacttagagcgttcagtgatagcagctatgacaactgtgaagagagatgctataagattttacagccaaatgcaagagggcggacaagggatgcaaatggcgcttttcatgcttctactagtaccaaaaaatatgtcggttgcaaggttaagacaaatggaccaaagcacacatgtggttcgtatgaggtgctgtttcttttgtatgagatgttgcttttgtatgacaatgtaatgggttcatggtactttgtcatgcttttgtga

SEQ ID NO: 33348 - DNA, 864 bp, Zea mays
  Peptide Sequence Number=SeqID_76723
atggggaggctagaaccccgggcagaatgggaatcacggcttgtgggtaaagtgtgcaacctctgcagagtgttagaaactggaggtgaagctggcaacatggatgacttcgaggagttccaggaatacgaggagttctattctactcttactcttgtgcttacggtgtcttttgtagatggcccgtatcaggagcgccgacgccaggagcaggagcaggagcagcaggactcttcccccttgcctcagcaggaggtggattctgagaggcctccttcccctgcacttcagccagagatgtcccctgcaccacctcagggcatcccggctggtggaggagacactaatggagacggagacgacgacgacaccggtggcagtttgagccacgacatagagctttcggaggagccagagccggatggatggatcgcgagacccatcactcgtgacgctgctcgcgggtgtcacttccacgacgctctcgataccctgctgcgtcgggccttcgaccaacacacatgcggggtagctgatggccttgacctgaagtactaccctcgccgttcgaccggcagtgctggaggtttgattgtctcgcatgttggtgagggcaatcccaggctgagcagcatggtcaacttggtcgccgtgctcaacacaaagttggaccacgcccttgacgagttgggcaaggttcgtgcggaggttgcggaattgtgtgctgaacgcgcggcatgccactatctggatggtggttctcccgcccctgttgggattcagcacccttaccgttcaccacctcgtggtcgcttcgactatggtaccccagactgcaggacccgtatagatttagatccatag

SEQ ID NO: 33349 - DNA, 249 bp, Zea mays
  Peptide Sequence Number=SeqID_76724
atggccatacctcgctggagcttactcccgagcactattcgccgccccacccgttgcaaaaccaaattggagagtagacgaaacgaaagggggaatcattaccgcaaattgtatagcagagaaccccagcgacgacgcacggcggctccggcatgcaacaacatcgtcgatgaggagttgcgcccaagccgaacaccccagttccccggagttggcgcgaaggtagttagggttaatcccgtggtttga

SEQ ID NO: 33350 - DNA, 183 bp, Zea mays
  Peptide Sequence Number=SeqID_76725
atgtacggtaagaccagtgatctcaagttcaccatagcctctttttcgggtagagacttctgggataaagtatcgcgctctaggaggctggtctggtggggctcatcggtcgccgccgtgggggtgtatgctagttgtcgtgtgatccgggccgttgaatccctggcgagcagttcggattag

SEQ ID NO: 33351 - DNA, 240 bp, Zea mays
  Peptide Sequence Number=SeqID_76726
atgggtacaagctcatgcagtcggtcggggcgcgcagacggatctgtgggcttcatcgggtccccgggaatgtactcatggcttcgggaggaaggattggacctgggtagagacttctgggataaagtatcgcgctccaggaggctggtctggtggggctcatcggtcgccgccgtgggggtgtatgctagttgtcgtgtgatccgggccgttgaatccctggcgagcagttcggattag

SEQ ID NO: 33352 - DNA, 991 bp, Zea mays
  Peptide Sequence Number=SeqID_76727
ctgcgcggggttctacgcgggcgcggggccggcgcgcgaggtatgggcatccgtcgaggagttcggggctgtgggcgacgacgccacgcccaacaccgcggcgttccggtgcgccgtcgcggagctgggcgcgagggccgccggtgggggaggggccaggctcgacgtgcccctcgggaggtggctcacgggcagcttcaacctcaccagccgcttcaccctcttcctgcaccgcggcgcggtcatcatcggctcccaggaggccgcgacggcgcggtcgcggtcgcgctcgcgccgtgctgaccccagatcggcggatgctgggcgcctcctggccggtttcgtccttggtgagcgctccggcccggccaccgagctggtcgcgaccgacgactccgacgccgcctcggaccgttcgtcggtggcgagtgagagcgacacgcagctgccgacgtcgctcgccgcggcatcgacactgtcctgcttcttcgccttctccgctttccactcgtccgcagcggcggggacgacggcattgccatactacccccgttctcctcttcccccaaaatctagccccaaatcggcggtcctcctcgggcgcggctccatggctggctcctcggcggtcctccaggcaagggcgcggcctcggatccggcgcaggggcgggcgcggtctggccccagcacccgtgcatcccggcgcggcgcgtgcccggccgcccggccttggcgttcctcctcgggcgcggctccacggctggctcctcggcggtcctccaggcaagggcgcggcctcggcctcggatccggcgcagggcgggcgcggtctggccccagcacccgtgcatcccggcgcggcgcatgcccggccgcccggcctcggcggtcctctcggcgcggctcacggctctcgtgctctcatggatgagccccctgcagtgcgggcgagctgctcatcgttgagccctgctctgcggcgagcatga

SEQ ID NO: 33353 - DNA, 387 bp, Zea mays
  Peptide Sequence Number=SeqID_76728
atggattttgacatggcctaccgtcaacacaactatgttcaattatccgagggatggaaaaattcggctacggtttcctctaggaaaggtcgcagagcaccagcgggcaccttcgcaggcagtccgcagacgatgcggtggtcactagaattagagaaatcgaagcctgtcatactaactggtgaccttaattgtgcgcatcaggagattgatatacatgaccctgctgtcccatatcatgccgcaagcagtgtaatattaagcatgttggtcacaccttgtataagaagcatcatatcaaagaaactggggccttttgagcagggaatggtccaagggtgcatcactggaataagctcgagaccacaagtgtcatatatcctctaa

SEQ ID NO: 33354 - DNA, 441 bp, Zea mays
  Peptide Sequence Number=SeqID_76729
atggagctactttggtatgtcaggtttggattgtggtggattatactaggggtcgcttcatccattggattaggttctggtttgcacactttcataatgtatttggctccccatgttgccctgttcactatcaaagcggttcagtgtggtagggttgatttgaaaagtgctccttatgacactattctccttgaaaggagaccatcctggttagagaaagactgtctgcaatttggacccccaatttatcatgaaacaattccattcagcaaaatattgcaagaagtttatcttgaagatattctttggagcattggaactgcacttggagagcttcctccatattttctctcaagaacaggttctgttcatactgctttgcgtactaagtacaacataatttacttgattacagctgttttctcttgcctgtccacttga

SEQ ID NO: 33355 - DNA, 618 bp, Zea mays
  Peptide Sequence Number=SeqID_76730
atggtgcacgttctgccgctgccgcggccgcaccccgccccgcatcccgcaattcttggtcaggtgagttttggacataatcctttacaagaagtagcaattcttctgattttcgattttgatggagtaaggattctgcgtctgcagaatgaaagccgatctgatgctgagaagatcttcaatgagttcaatgcacgaaaacccgaggaaaagaatgtcttcaaaggggtcacgaagaatcacctgttcatgggaataatcggtataacgatagtatttcagtgttgcctggataaaaatgttagaagtgcaggtcctgcgtattttgctaatgttgctattaagatcaatgccaagtttggaggaagaaacttagaatttgctaatcccaaagaaagcttgccgggtgttacaattgaaccaacaattatatttggtgctgatgttactcaccctgccgctctagatgataccgccccttccattgcttctgttgttgcctcccaagactggcccaaggtggctaactataatgggattgtccgtgcacaaggtcatcgtaaagagctcatcaatggcctggaagacattgtcaagtacggtcatcgtaatctctga

SEQ ID NO: 33356 - DNA, 1527 bp, Zea mays
  Peptide Sequence Number=SeqID_76731
atggagctagcctcgtcgtattcggcggcggagatcccccactacttcctctgcccgatctcgctggaggtcatgcgcgacccggtcacgctcgccaccggcatcacctacgaccgcgccagcatcgagcgctggctcttcaccgacggccacgccacctgccccgtcacgcgccgcgcgctggcgcccgccgagatggacgccacgcccaaccacacgctgcgccgcctcatccaggcctggtgcgccgcgcaccaggtcgagcgcttccccacgccgcgccagccgctcgactcctgccgcgtcgccgcgctcctcgaccaggggcgccacggcggggcggccgccgcgctcagggagatcaaggccgtcatcgccgagagcgagcgcaacaggcgctgcgtcgaggccacgccaggcgccgtcgacttcctcgcctcactagtcgccaaggactcctcggccgataggtctccatccaagcgtgccagcagccagcaagatgccgacgacggtgactccctgggggaggaggtgctggattctccgaccttcatgagctcgccggcggaggacgcgctcggcgtcctctactcgctcaagccgtctgagcggagccttgcccagatcatggaacgggaaggaaacttcctcgacacgctggcgtctgtcctgcgccgcccgagctaccggacgcgcgcctatggcatccttctcctcaaggcgatgacggaggtcatgacgccggcgcagttcatgatggtgagcgccgacctggtgcaggaggtggtgctcgtggtctcggaccgggtgtcctccaaggctgtcagggcggcgctgcacgtgctgtgccgcctctgtccgtggggccggaaccgcgtgaaggccgtccaggccggcgcggtggccgcgctggtcgagctgctcctcgatgagggcggcagccgcgtcaccgagctagccgtggtggccatcgaccacctatgcggctgcgcggagggccggtcggacctggtcgcgcacccggcggggctggccgtcctgtccaagaaggtcatgcgggtgtccgcagccgccaccgagagcgccgtgcgcgccctccacgcagtggccaggcactcgccgacgccctcggtgcggcaggagatgctcgccgtcggtgtggtggcaaaactgctgcttgtgctgcagaccaatgccggcgagagggctggtctcaggggtgcaggtgtgggtggcggtggctccggagtggaggcacctaatggcggcggcgtggagactctgggcgtggcagtggaggcttcgggcacggcggtggcgactccggccacgacgtggagactttgggtggtggtggctccaggcggagcccgacgccaccggccggcggagaggaggccggcggcgtgcgtgagcagggagacaagccagagaatgaaggaaataggaggagacgacagcatgcagtttcataaaatgactatgaatgtcggccagggcaaggtcggcgttcttaaagcttaa

SEQ ID NO: 33357 - DNA, 261 bp, Zea mays
  Peptide Sequence Number=SeqID_76732
atgatgggaccacttgaaagctctcttgtgggttttggtggtttggatgacaacccaattaagggactgataagtgtgctaagtgttgaacagacagctgatcaagccaaggaagaaagaaagaagagcttcgaggtaccgagttcacgggagaaggtcaaggaggccgaggaacccatagtcaggggtgaagaagaagacttcaaagtcaaggttgaccgagttgagaagagctataatgcatcgaagatcactagttaa

SEQ ID NO: 33358 - DNA, 408 bp, Zea mays
  Peptide Sequence Number=SeqID_76733
atggtgcacgttctgccgctgccgcggccgcaccccaccccgcatcccgcaattcttggtcaggtgaggtacaaacagcggttgtcgtggaccagatttggagatctcttgaaagaaagaagatccacttcctgcttctttgtcgatttgtgggaagatggtggctcagatgatggatatgtacttgttaagcaggaggatgttgttgatgggatgacttcctttatggctgcatgcttggtgtcaattaaaaagaccaaggacctgctccctgatcaacttcaaaaagctcttaggaaggcgatttcagttgaaaagaagaaaagtaaaatctggaaggcatgggatgaaactaaagtcatttataatgttgcttcatgggggcgccactgctgttgggcaacataa

SEQ ID NO: 33359 - DNA, 900 bp, Zea mays
  Peptide Sequence Number=SeqID_76734
atggactacgctgcaccaataagagtcgcgctggaagctggcttcgagctgcctcaccagtggcggcgaccacctctgcatcgacggatcgccggcgacagcgaccacccctccaacaacagcggaaagaaggcaagaccgggcaaccagcggtcaggaagacggaccgccgtgcaaggggcatgcaaccgccccacgattaagcgccccttcatcttcgccgtatccagcggtcaaagaggcgaaccgccgcgcaagaggcgtgcaaccgtcccacggctgtgcgccccctcagctccgctacaactggcggtccaactcaagggcccaggcccacgcgtcataaccagtgcagcaactcgaggcagccccgcgcatggcccaacagtgccgttaagtacgacggtcatgggtcagtcagccgtgggaataggcacgatagttggcgtggtcataagcgggccgacagtaattgcagcaacaggcgcacggaagcagcggtccaaccaccagacagactctggtcccacctgcaggctcgcatcctcccctgaggcgggaccgggggccactgtcggtaccctaaatcaggggtaccctctcttacagcataaaggcatcgcacccatgcgacgtcttctggccacgcggaggactgcgcctaactccgccggatgggcgggcccaagggtccggagccccagggtaggtccgaacttcggcagggttccagaacgagaaggaccttggggcggcgtcaaggtcatccagcaggcggcgcgcttgctgggtctgcaggcaaacagtgcgcccgtgccaagcagcgcactgtgttatcccttctacaagaagcttcccctgcacgccgaagatacacaaatctcggatgacaggatataa

SEQ ID NO: 33360 - DNA, 1434 bp, Zea mays
  Peptide Sequence Number=SeqID_76735
atgatgaggatcctcgtcgccccttcaggcaggtcaagggcaagaccgtttacttggagcaacaggaaggccgcaagaagcggcgtacggacagagcagcccgtgcagcggcagcggctgcagcagccgctgcgcaggccgagcttggagatcagccgcagactccatccgatcagattgcataccgtgttcgtcgtttcgcctcccggcctcgctcctccactcacacctccgcttccactccgccacccactctgcctgctcccgtcactcttattgctccatccacctccacagccatacccgctacctcctctgcgccagcttccactgctcctcctcctcccgctcccgcttcagctcctcctgtccctccacctcgattccgggagcgcgatgagactgaggttcgacctctggcttcggatcctcgactgtttgaccttcagcgtgctacagcggcacggagctcagatgtctgctcagatagctctgcgagtgcaccggcttttggatcttccagcctttctgcttgcagccggtgctgactctgaggcgcacctcacctatctgcctggccttcagacccttctgactatcagcggcagatccgccagctttttggatttcccgagtcgacgactcgtcttcacagcctctgctacggcacttctgaccctcctcgtcgccctcacggcggtgtggctccgggccgaggatgcagctcttcgacagtttgccactcagggtacagcagctgatgatgatgatgattttggggttcctcctccgcctccgcctcctctgcctccatgctcacatgatcatgaggctgggagttctagtgttgcccctgctcctcctcaggctatggaccctgctcttgcttcgattctggctcacctggcggccgagcaggcccggttatccgagaggatgctctcgatgtttcagaacatgcaggacaggcaggatgcacttcagcagcagctacttcaggatcgggctgagagtagggcattcatggctcttatgcttcagaagtctggtgtctcagtacctccggttcagtccgctcctcctcctccgcttcacgctccagttgtgccatcgattttgtcaggaccccctgttggtacttctccgctccggccggtcactttggcgttcacctctccggttctcagctctatctgcccgcagccgctaatgccaccagcatctgctgttaccactactgctgtggcagtatctgtgaccacttctgttccggcagctcctgcagcgcggcctctgtccgagtcagtaccagctccagcttctaccgcagatcctggatccgagactgactctgaccctccgccggcgttcgctctgctgcctcgaccacgaccggatgcgcccccgccgcctcctcctgcttcagatgtttag

SEQ ID NO: 33361 - DNA, 672 bp, Zea mays
  Peptide Sequence Number=SeqID_76736
atggaggcatcagtcgcggagaggatctcggagaggaaggcgtcagtcgcggagaggagagggaggtgtcagccgttggcagaacgcgcaccactggctgtgaactcctacaatagtactgtactacagactctacagtactgtaatacagatcacgcatgcaactgtgtctttttgccttggttgacacagatggaaaaacaaacaaacaaaatgggcatagactggtgttcacaatattttggaacaggcattagctgtaaaagacgcaagatggcttacgattattattatcagtgtgttccaactgaagctcaccatttcccagcaaattcctcccaactatactccacttgtagttggaaactcgacaaaggtatatttaacatgtggaatgaaaagcttgtttgttctgttggaattggaagtagctgtagcaggataagtgacacaactaccttctcaacgatgctagttcctttgtgcaaccaattcttattactaaagtcccctggtgcaaatcagtctgcacagtataccgcaccactgaacagtcagcacaggcatggctatcagatcagatggaccaaaaactggggattgcctcctgcaaaggctccaaaccagagtttttttttgaccctctctattggctttagcacagacagataa

SEQ ID NO: 33362 - DNA, 879 bp, Zea mays
  Peptide Sequence Number=SeqID_76737
atggactacgctgcaccaataagagtcgcgctagaagctggcttcgggctgcctcaccagcgacggcgaccacctctgcatcgacggatcgccggcgacagcgaccacccctccaacaacagcggaaagaaggcaagaccgggcaaccagcggtcaggaagacggaccgccgtgcaaggggcatgtaaccgccccacgattaagcgccccttcctcttcgccgtatccagcggtcaaagaggcgaaccgccgcgcaagagaaccagtgcagcaactcgaggcagccccgcgcatggcccaacagtgccgttaagtacgacagtcacgggtcagtcagccgtgggaataggcgcggcagttggcgtggtcataagcgggccaacagtaattgcagcaacaggcgcacggaagcagcgatccaaccaccagacagactctggtcccacctgcaggctcgcatcctcccctgaggcgggaccgggggccactgtcggtaccctaaatcaggggtaccctctcttacagcataaaggcatcgcacccatgcgacgtcttctggccgcgcggaggactgcgcctaactccgccggatgggcgggccaaagggtgccacgtggcgaggaagggcatcatgcctcagtccggagccccagggtaggtccgaaccccggcagggttccggaacgagaaggaccttggggcggcgtcaaggtcatccagcaggcggcgcgcttgctgggtctgcaggcaaacagtgcgcccgtgccaagcagcgcactgtgttatcccttctacaagaagcttcccctgcacgccgaagatacacaaatctcggatgacaggacacaagaggattgccccagcagcaaatatttatag

SEQ ID NO: 33363 - DNA, 219 bp, Zea mays
  Peptide Sequence Number=SeqID_76738
atggcggaccccggggcagtggtggctcccagatcggagacgcaacggcggtggctcccgatccggatgcgcggcggcaacggttcctcgatccggagtcacggcgacggttctcagattcagaggtgcggtggcggcgactccctgatctacagggcgagcgacgacggggcagtggggcgggtgagcggctgcgaccctgggcctcgaggcgggtga

SEQ ID NO: 33364 - DNA, 165 bp, Zea mays
  Peptide Sequence Number=SeqID_76739
atgacgtgctgcgcgcacgacgcgaagcgacggcaaggctgccgctacgccgcgcagactgtgacggggcacgaaatggtgcagaggagcagggtctcgcaaatggagaagaagatgggcgccatggaccagagctcagtagacgccgaggtcgataaagactag

SEQ ID NO: 33365 - DNA, 330 bp, Zea mays
  Peptide Sequence Number=SeqID_76740
atggtgacatcatgcagacggttcatgccttcgctcctcgatgcgaagctcaatcacgttttctctcttgcattcgaggcatatgatccactaccggaatccgtggctttgccgagtgctcggctctttgtcgagtgcttttgtcgggcactcggcaaagaagcctttgccgagagccgcactcggcaaagtcctgctctcggtaacgacagcgtttgccgagagcaggactctcggcacagaaatacactcggcaaagatgtctttgccgagtgccaaacactcggtgaaggcggcactcgacaaaaggtcgtcagcagtcgtctatag

SEQ ID NO: 33366 - DNA, 282 bp, Zea mays
  Peptide Sequence Number=SeqID_76741
atgaagacaatgcgatcaacatcaaccaacaggaatcaagtggtccaacggaagcgtgtgtgggtcctaacctacaagtccaagagatcctcaagaattgcatcgatcggtctcaagcatctaaaggtcaaagcaaccagtccacaagttaatcttgaagagtcaaagtcaactcaagaaagccgtgaacaacctatgaacaaacctcgatttcttgctagcttcttcttgaatcttgggggcgagattcctgttaagggggttagatttgtaacaccctga

SEQ ID NO: 33367 - DNA, 138 bp, Zea mays
  Peptide Sequence Number=SeqID_76742
atggataactcacaattctcaaactgggttgaaagaaaggggaggcttctaaaggataagttcaagattccaaggatacgggcatacccagacaagggaatagaaaagccaaaggataacgacttaaccacggaataa

SEQ ID NO: 33368 - DNA, 1314 bp, Zea mays
  Peptide Sequence Number=SeqID_76743
atgcagtcggcatgcaaccgcgccaagtgggcgcaccccttcaactccaacgcgcccagcatggaggcccaggcccacacgtcatgccaccggcgcgccggttgctacgtgcgagcaactgcaccgcccctcgcgccactaccgcgcctcctcgactgcggaaccagtaccgcgactcgaggcaaccctgtgtatgacccaacagtgccagccaggcgcatcggtcacaggccagtcagccgcgggagaaggcgcgacggtcgatgcggccgaaaatgggccgacagtaatggcggtggcaggcgggcggaagcagcggtcacgtcgtcagccaagctcacgtcccctcatgggacggacatgcggcacctttggcaggagaagcaggcgacgcttcgcctttgccataacgaccgtgtcaaaaaagggaccgagaaaggggataccccggaagggatccttctccgcgaaggaaacgggcctcgagcccccctactgatcagaggttcgaaggccggcctctcggaggggttcaacagccgcctcagagcgctcgggctccgcgcccactactggtcagaggttcgaaggccggccccccggaagggttcaacggccgcctcaggccactcgggctccgcgcccactactgatcagggcgggaacgatcttgtaatggaatcccatcagagggaggcatcgagccctcgggccccgtcaaaaggggaccgggtccggcagatcacccgcagtcacttcgccgctcctctgaccggcctgacaaaaggacagcgccgcctgcgccgctccgactgctgcgccactcggcagagtgcggctgacagcagccaaggctcggactcgggctcagccccggaagacgacgaactccgcatcgcccaaccccaggattcggactcgggctcagccctagaagacgacgaactccgcttcgcccgaccccagggctcggactcgggctcagccccagaagccgacgaactccgcttcgcccgaccccagggctcggactcgggctcagccccggaagacgacgaactccgcttcgcccgaccccagggctcggactcagccctggcctcagccgacggtctccgcctcgccagacccagaggctcggactcgacctcggccttggaagacagactcgacctcgaccacggaggagcctccgcctcgcccaacccagggcttggaccgaccacgtcacaggaggcgccatcattaccctaccccaagctaactcaggctacggggaacaagaccggcgtcccatcttgcttgccccggtaa

SEQ ID NO: 33369 - DNA, 1860 bp, Zea mays
  Peptide Sequence Number=SeqID_76744
atgccgacggactccgcgccgccgaacgcagcgtcgctgtccgaagacgaccgactgctcgtcgcccactgcgccacgctctccttcccctccagctcccccacagccgccgccgccactacccattccgcctcctccttccaggtacaccatgcgtcccacccctacccctgcgccgccttcgtcttcccgccctcctggtccgctgccgactggatgggaggcgatggcggccatccgccgttcggggacgccgaggtggacccggccctgttcccgtcactccgcgctgtcgggagcggcatccccgcgcgcaccaacgccgccttcctcgggaacttccgtcggctgctcgacggatcgacgctccagtccgaggtatcaagagctgttgcggaggagaaacgtgtagtattcacaggccattcatcaggaggttcaatagccacacttgctgctatatggtttcttgagaagtgcaccagacgaggaagtgttaatcaagcacatccattttgtgtgacctttggggctccccttattggagacaatatcttcaatcatgctgttaaaagagagggctggtcacagtgtattttgcatttccttcttccactagacattgtcccacgcataccactgactccacttgcatccttcagagaagaaactcaagctgttctggatcggttatcttctcagacgccaaacaactctcctgctgggaggtcccttgttatacctgaatattatgaaactttattgagaagcacactatctattgccagttatgaggcctgttctttcatgggatgtaccagctccatcctggggacattgacttctttcattgacctctccccttacagaccttgtgggacttatcatttcttgacaagcagtgagcaattgattgttctcgcaaattcagatgctgtactgcagttgttattctactgccttcagttggatccccagcaacaactgcttgatgctgctgctagaagcttaagtgctcactggcagtacgaaccaattaaatactgcatacaggatatagtttgtgtggattacctgggaacaatctcatcagctgttcctggtaggcaggcaggcagagtggcccttggaagcattgaactgagcagggaagctatactgcacctttctgcagctgctcaatgggagaagcaaagacagagaaaccaaacaaaaatagatgaaagctgccaaaagattcaggaagctctcaggtccctaaacgagtacaaaagatcaagggaactcgatggcgtgagctactacgattccttcaagctccaacgtgaggtgcatgacttcaatgcaaacgtgaaaaggctagagctagctggcctctgggacgagatagtggagatgctgcggaggcgtgagctgccggacggcttcgaggctcgtgaggagtgggtgagcctggggaccttgttccgtcgcctggtcgagccgctggacatcgccaactactaccggcactccaagaacgaggacaccggctcctacctctccaaggggcggccgaggcggtacaagtacacgcagaagtggcacgagcagctgcagcgcgttcccgtcgggtccagcctcgagtcctgcttctgggcggtggtcgaggagctccaggccgagatggccgacggtagggcgttcgaggatctgagagaacggttggttaaacttgagaacgatgcgcatggctggtataattctggaagtttgggcaaggacgtgtttctggggagctcgtctttcgtggcgtggtggaggacgctcccagagcagcatagggcggcgtcgagcattgcgaaacttgtatctctataa

SEQ ID NO: 33370 - DNA, 159 bp, Zea mays
  Peptide Sequence Number=SeqID_76745
atggcttcatgcaaatggcgacgcaaggaaggaccagatgatggaatacagcttgaggagtcgattgatgcaactgaaacaaaaacaaagcaaagtaatagaaggaaaatagatgagggtggggttgggggcacgctgccaggtcctttgttcaactga

SEQ ID NO: 33371 - DNA, 192 bp, Zea mays
  Peptide Sequence Number=SeqID_76746
atggtggaggaagagtataaggaaggcaactgccaacttgttttcaagttgttctcaaagctgcttgatgatgagattgaaaatattgtgcagtttatgatggaacaacaaggactgtttgcaaaggcttcaagttttagggaagaaagaggcaagacttcaagaattgccacttctacaggagatatctaa

SEQ ID NO: 33372 - DNA, 1890 bp, Zea mays
  Peptide Sequence Number=SeqID_76747
atgcccgcgtcctccgtctcggggggtagcggccccggaggcgtctccccggatgccatcatcgagtggctgcaggacgagatggggtacccctcggcccctcctgcaccggatcagctccgcaagatctgccggggcaacatgatccccgtctggtccttcctgctccgccgcgtccgctccgagcgaaccgtcgccaccgcgcgccgcaatatcctcgtccacggcgtcgcggcccggcgggcgcgggagggcggagcgatgggggcgggcgcgggtgacgctgcggccagggaggccgaggcgagggagcgggacctcgccgctgaggaggccgagcggttgcgtgggatcgtgaggaggcagcgcaaggagcttcgcgcgcgcatcgcggaggtcgccagggaggaggcggagcgcaagcgcgtcctcggtgagcgctccaatgccaggcacaagcaagttatgctccaagcatatgaacagcaatgcgatgaagcgcacaaaatatttgctgaataccagcgccggctacatcagttcgttaaccaagcaagggacgtgcgaagatcaagtataggcgtggctggagctacaggtgctcttgtggatatgcaattgcagagtgatagagatgatctttacccatcgactatcaaaagcaatagattgccagaggatcttttagaaactgcaggtgaaaggagcattcggaaggcatgtgaaactcttgctgcggatatgattgaaacaattcgaagttcattcccggcatttgaagggtgtggcattaattcaagttgccaattagatgcagaaaagctgggtattgacttggttggtgaaataccaacatatgttaaacttgttgcattggattccctaaagaatccattcatgcttctgcagtcaatcattacctacacatcacgcatgaaaacacttatacatagagaaactgacaagattgacatacgcgctgatgcagaactactgaggtataaatatgaaaatgagcaggttattgatgctgcttcaactgatgcaagctcacccttaccatatcaggtgtatggaaatgggaagactggatcacaattgtcaactcgaggaacatatgatcagctactagaaagacagaaagagcatgtacaacagtttttggcaacagaagatgctttgaacaaagctgcagaagctaaagcactaagtcagaagctattgcaacgcttgtatggcactgctgacatggcaggaaataagaagctgcccactgggaacaccacacagaatgtgaccaacagtaggcatttagagttggacgtttgggccaaggaaagagaagttgcaggactaaaggcgagcttgagtacacttacatctgaggtacaacgtttgtataagttatgcgctgagtggaaggaagcagaagattcactgaagaagaagtggaagaaaatcgaagaatttgacgcccgtcgatcagagctggagttcatttacagtgctcttcagcgggccaatatggattcatcagcattttgggagcaacagccattatcagctagaggatatgcatcaactacaattatccctgcgtgccatgctgtggtagacatgtctacgaactcaagggacctcatagagcgagagttagctgcatttagccagagcttggataatagcttgtgcaggttgccagcaacccctcaggcccttttggaggctgtgggttctaacggcgtgacaggatcagaagcacttgcagctgctgagaaacatgcagctttgttgactgcaagagctggtgccagagatccatctgctgtgccgtctatatgccgcatctctgctgctcttcagtataactttggtatggaatgcttatga

SEQ ID NO: 33373 - DNA, 390 bp, Zea mays
  Peptide Sequence Number=SeqID_76748
atggactccggtggaggcatggagcagaggcgggcgccgcacactatagggcggatgcttgagcagaggcctctacagcagtcgtacgctggagaaggggaggcggctgctgtgtggccgctgtggtacactggcgaacaagaaaaggtggtgagtgaaagatggcttccggaactgagaaatgcagttcaagaagctcgaaggtgttttgatgactgccagcgtgttaggggtctggttgatgagtggtacgagcagccagccgccacaattgtggattgggtaacgatagatggacagagcgttggtgcctggatcaacctcgtgaagcaactccacatggagatctccagacggacgttggccatgtcatcggtaggagacgactga

SEQ ID NO: 33374 - DNA, 492 bp, Zea mays
  Peptide Sequence Number=SeqID_76749
atgggcaagaacaacaagcgcaagcgtgagccaactcctccatcggaggagtttggtgactcggagtattcagagaaggagttctcctctgagtccgaggggtctccggctcccatccccctgcgtgagtcgtctgacgactcagacgactcccaggggctcacggcggaggtctggacgtacatccgggccgtcgagcgctccgggctcgagggctcggatgagtcggagtactcctcggatgaggaggactcggacggcggcggcgaggacgaggacgacgacgacgacgacaacgacgacgacgacgatggcgacggtgacggtgacggcagcggcaggggcggcggcggcggcagcaaggacggtgacggcgccggcagcaggggcagcaaccggggcggcagcagcaggggcagcaccaggggcggcagcggcgacggcagcaacaggggcggcagcagcggcggcagcaacagggccagtggctag

SEQ ID NO: 33375 - DNA, 345 bp, Zea mays
  Peptide Sequence Number=SeqID_76750
atggagctgtcgccggagatagccatctctcgccccgagaccttcccacactgcctgactagcgctacacgaaccagagggcatggcaaatcccgagaagcaaatctcaccgagtttggaggtgtggaattccctgcccatggagaggcgcggctgtggcagacgcccctgctccggcgagcaattgatcgcacagcgtccgacccccggctcaaatctaacgcggaattacgaagaggagaaccatacgactacggcagcctcggatccgagtgccacaccacacgaattctccccaatgcggcttgctgcgtcgaggggatgagatgtggctatgcgtcatag

SEQ ID NO: 33376 - DNA, 318 bp, Zea mays
  Peptide Sequence Number=SeqID_76751
atgaccgccaggacctcccgggagccaaccccgcccctcgccggacctctctcgccgccgttaaagaaaatagaaaaagattgcaacctcgctgacggagagtacgtcctcgtgccggagcaaggagctgctcaggagtttgtggacaacaatccatggggattggttgtccacgggataaaaattggaataaggattaaggtgtggtactgttctctggaggacatggttgctggagtgacttggccgtccatcttgccaccgggttggactgtcgagtgggaccccgcctcggctgaggaggagcatgaggagtga

SEQ ID NO: 33377 - DNA, 405 bp, Zea mays
  Peptide Sequence Number=SeqID_76752
atggctggacatccccatggtgatgaactcggtctgataaatcctttttccaataagtcttgtaattgcgtcttgagttctgccaactcattgggaggcatacgccttggggtcaaggagaggctggctctcctcagattccaaatctccagcaagctcgactccatccagcagactgctgctgccgtggctgccaagaggaggcttttggagctttacagaccaccagcgccatggtggtcctcttcgccagcgctcgcgtgtggggtcccgctcgtggttccgtctaagaggcttatagtggtgcccttctcggtgacccttactcgcgacgacggcggcagccctgatccgtacggagaggccgcggaacgctggacgtgtgacgaccagtacggtggctag

SEQ ID NO: 33378 - DNA, 261 bp, Zea mays
  Peptide Sequence Number=SeqID_76753
atggaactgtgccatggaagcagggagcatgcgcgtgatagccaccgtattgctgagttgtcagcagagatgtcgtccagaactcgtgctcaagatggggctggaacttcccgtggtggggaggaaactccgaacccgccgcctgtacctcccacgttggtagaggagttcaagcaggcgttcagggaacactacattccagatggagttttacagatgaaacttgaagaatttgtacgcttaaagcaaggaggagactag

SEQ ID NO: 33379 - DNA, 489 bp, Zea mays
  Peptide Sequence Number=SeqID_76754
atggcgtggctgcagggaggaacgtcggcagagggccgggcgagcgccagggagctcggcacggtggagcacgttacctggggcacgacggccatggcgtgcagaggacgccggccacggagcaggcgaggcagccatggctctagctgctccgtggggcgtgagctagggagatgggcggccgagcgcctagggcgaggtggacagtggccaggcgatgcagggcgcgatggaggggttcggcaggggaaggccaccgtggaggccgagctggagggtgagcagggagggcgcgttggcgagctgggagagagaagcagagagggtgatatagctgaggtgcccgatctttcggcgagtggagataattccgattgggcggaagatgacccttgcgatccgactacgacgagcaagcctgaggcgccaatgcaatcgctgaaccaactccctgtggttaccgaccttgctgatgcgagatcgacctaa

SEQ ID NO: 33380 - DNA, 363 bp, Zea mays
  Peptide Sequence Number=SeqID_76755
atggtgatcggcgaccgggctgcagtcagtcgtaggaagttagccagaaaaggggctacagttcgtgtcaacttgctctatagcatactgggagagatggttgaatttggcgagggccttggggttgacctctgcctccctgctgatgaatttgattccagccaattctcaaagaaaacgagtgttatcagcagtggcattaattacggcagcgataccctctaccaacgtgggagatcaactggtcatacagcacgtgcacttcctcgtgcagagtgttattatacacttgcagattttctagggctacgcttagctcttccacccgggctcgggcattcgcctcgcaatcccaggctatag

SEQ ID NO: 33381 - DNA, 531 bp, Zea mays
  Peptide Sequence Number=SeqID_76756
atgaagaccttaacgactttctgtggctaccatccccttgagatggtgatgcaccccttgggactcttccctgctgagaagaaggatgaccccatgtggtgcaaccgtgtgagccctatgaaggacgtatgggcgatgtatcctgacttggttgggagggtcactgttcagtgcatgagcgcattgtaccaccttcaggccctgcagagcgacgctatggcacatcttgctaacctcgctcaaaccaccaagctcaccgtcgacagccgagaggacttcgtggtcgacttgtcctcagagctagtagaaaaggatctacagctccatgatgtgcagcaggaacatgaagaagctaatgaccacctggacatgcaccacctggagatggaggccaatgaggccggaagcaagggagaagaggctcctgaggagttaggaccagctccttgtgccaatgtgactgcctccgcgatgccccttcacccgtatctagtgtcgcttccactactcagggttgatgagtcgttttga

SEQ ID NO: 33382 - DNA, 624 bp, Zea mays
  Peptide Sequence Number=SeqID_76757
atgcagtacaatggatcaagcagtctcattagctgcgagaagcagacgattcgaatcgagttttttatccttgcaaggctctggtgctggctccggggctacctcctgagcagctccttgcttcggcacgaggacatactcttcgtcagcaaggcgggtgttctcatcggcggcgagtgtaccggccaaaccacggtgatctggttcaatccaagggcacggcttcgattcctcgctcggggagcttcactggggcgtgtaccttcatctcagagggttggatggggctgggggaagctggactggccggtcttcggcggcagtggctcgggtggccgcggacacaccgcgcacgggcaaacgacggtgaactggactccggtgaggcttgagcgtgcgcggaagagtgtaaccgacgcctgggagggctttataggcgcgggcgcgggacagggcgccggctggccgttggcgcgacgcggggcgcgcgcgggcgtgctctggcaagctcagggcgcgtcgaacacgtggagctttcaatctgcccgtgttccacagctcacccaagtcgcaaacgtgcgaatcttggcaaaaatccggtgcgagtctttttctggcacctag

SEQ ID NO: 33383 - DNA, 210 bp, Zea mays
  Peptide Sequence Number=SeqID_76758
atggggaaaggatttcttcacacgttaggctggatacgaggcaaggcggatgtggtggctaccaggagctgtaagaggctcatcgtggacatgcactacgaggcgcatatcaaggccatcatcacttaccatggctccgtccttagagataagggacaatcagcgacatcaaagaaccctcatggatcgcctagcccttcgctgaactag

SEQ ID NO: 33384 - DNA, 870 bp, Zea mays
  Peptide Sequence Number=SeqID_76759
atgttgtgccaggtgggcagcgggcgtctacaagtttattttccaggagcaaaccgaacagctgaatttggtgaagatgagttgaggtgttcccttgagtgggttggtaacaaatggaatcctttgaagggaagaaaagatgtcacaagcaagctgacctccactgcagattgtggaagtgaatgtttgattgggaaacaagatccactgaatttttatgtgcctaaaaattcggaacctcaactagagagacatcaatatgacaaggggggtattgagaaatcttcagtcagcacaatttcacgagatcagaaacgtgtccttgccgacctgactaatgatttgaagttagataacttgaggtggaggccaagaaagaggagcagaagatctggctcaagaaagcagtcagacacaagcagtggaagcagcagcggggacatggacctgttcagccccagcccagtggaagctttggttagcatgacacaatttgtccaacatgtcacctcttttcacgtggaacacaaaataggtaaacgtgtatttatgccgtgtctctacatggacttcgacctcgcttcgctgtcaccacgcactggacctggacctgcaccgatgtcacgcacctcgtgcatgtgctcctacagctccgcttcgcctggtgcggcgagctcatccggtatgcccgcgccgtcgccgcgcactacgtctgctccgtcaagggtctctgctttgacctcttcatcattaggggtggaaacagagctttcaatgcatgctggaggtgcacggtgtgatcaatattatccatgcttgataaatgatgacaatggtgatgaccatgatgtacggtcaacattgtattga

SEQ ID NO: 33385 - DNA, 1564 bp, Zea mays
  Peptide Sequence Number=SeqID_76760
atggcgtggggagaggacgaggctatcgaccccgacgtggcctcgacgggtgttcacgtctcggagcggatcggccgcgacgccatttcctctctgccaccaagaccatcctccgcatccggctcagccagctctcctcgagcccagaagcacacccgagcagaccggatcggcggcgccatgtcgcacgacgagctcgccgacaaggagccgtcgtcctccgaggagtttcagctcgcgccgacggattccaagttccggagcctcagccctgcaccgattccgatcccagcttctccgggcatcagatcattggtcgactcggtgacagctacctgcaagctatatatagtgcctaaatccagacccagttcagatggagggctgaagaggaagcgtgatgcattcaacgatgatgctaatccacagaagttcattccttctgttccattcgaaaagccactaaaagcaggttcagggggggcaaaagccaaaagccaaaagtcaaaccaaacacaccctaagactccaatccaactgaggcacgccgcatgcctcgcccgcaaccctagccctagccacacaacgccgcactggtccgccgccgctctgccgcctctgcgcgtgagcgcgtcgatcatccaccgccctgctgcctctacggctctacgcgtctaccgtgcgaagcaccagccctacaggcctccactctgtatcggtctccgcggtatcggcaactcgactccgcaccggcgactccacaccggcaactcggcccgcgtcgattcaccgcaccgcgttctgcacttctgctccaactccggcttcggcgtcctgctcctcggtgcccacgacctcgctgcagaccgacccagcacgcaagctgtgatgaaaaagatcatcgacgttccaatgtcggggggagtggaaccagaagttgacaacgacagtcataccgactatcgagtacgattatacaatggacgtcgaccttggcagtacaagctgattattggttggcttgaagacggagggagtctctgggtccgcctcaccaatgtcggcgccactgtcaccttgttcctcgtcccggacaagaacggggttctcgctgatgtggtgctcggattcgactcgctggatccgtacctgaggcataaagataaaatcaaggtgcgctacctagaacttcaggatgctgatgagactggaaacttggaggagtgggttatgctaacacgagttgccaaacctgatcaactgggtctacgtttccttggaaggccaatggttcgtccacagcgcgtggaacaaagcaaggcctcatgctttgatgttggagccattgttgatgcttggtggcatggtggctggtgggagggaatcatgttgtgccaggtgggcagcgggcgtctacaagtttattttccaggagaaaaccgaacagctgaatttggtgaagatgagttgaggtgttcccttgagtgggttggtaacaaatggaatcctttgaagggaagaaaagatgtcacaagcaagctgacctccactgcagattgtggaa

SEQ ID NO: 33386 - DNA, 336 bp, Zea mays
  Peptide Sequence Number=SeqID_76761
atgtccggtgcaccagggggactcagactcaaactcgccaccttcgggaatttccaggggcgactcggctataattcaccggactgtccgatgtacaccggacagtgtccggtgcgccaagggaggtcggcctcaggaactcgccagcttcgggaaaccccaacggctagtccgctaaaattcaccggactgtccggtgtgcaccggactgtccggtgcgactccagtgcaacggctatctccgcgccaacggctctctgcggtgcaataaatgcgcgcgcagcgcgcatagatggcaggcgtgcccatgctggcacaccggacaaggaacagtag

SEQ ID NO: 33387 - DNA, 1212 bp, Zea mays
  Peptide Sequence Number=SeqID_76762
atggggaatcatggtggaggaccagggtccggattggcgggcgacatggcaccgatgaggtccgacgactggccttcatggcttccagatggcttcaatttagaatttaggatattcgctacaaaatcacgtttcccatggtttttgcacactgagcttgtagattctgacattatgaattacaaagatctgcttgatgaaatcatgaggaagtacccttgttcttacggggaggtggtgaaaatgtattattactgtgctgagtccaagtccaacattgaggtttgctgtgatgaagacctagttaatatgtttcagaaaaatgcatccactaagacatgtcatatttccattgctcactatgaccctagtactgaaccaccagccataccactatgggatgtaacatatgctaaggcagtggaaatcccttgcacatcatcaatgccagctccaactcaatctttagatgaaccaagccaacaaccagaggatgatgacaagtacctgcaaaaccctgaaccagaaaatgaatatgttggtgtcgatgaagaaggcatgtacattgacttaggaccacaggttcagggaaatgcagaccaagaggatgagtatattcctgagactaactctaacttggattctaactttgaatctgatggttctgatgatgagatggtggaggataatgttccaccccacacagccgaagcagtgtatgacaaagcccaatttgtcgaggaaacaaggggaccaccaaagaggaagaagaagcaagtaatgccagcatctactgagacaagcattgtacctgtgtcagcaccaagaatggttttccctgatcttggcctcacacctccagttacaaagaagagaaagagctcatccactacatcaaaggctgccaagaagaagaagagctcagccatgcctgttagcaccaaggtttggcgccaaaaccagagcagagggtctgcctcctgtggcaagaaagggaagatccaatttctttttcacggaccaaaccaggggcacactggtcctttcgtaatcctgttaccatccgttagcactaaatgggacggcagtggtttaaacgggatgaaaaatcttggacaatggcatgggacgaacggtagaaattccagtggttcatatggaatttggatcttttataatggtcgcaaaggaattgactccaaaaagatctag

SEQ ID NO: 33388 - DNA, 246 bp, Zea mays
  Peptide Sequence Number=SeqID_76763
atggacaaaggccctaagctaaagcttcggtttgaaggacacgttttcgtcatttccgaagataagatgtctcaagacaagaagacagttcctgagatgaagctaaccgaagaggagaagcttcttgaggagcagacttctggatttgttgagtcaatagcgaaaacgaatacagagaagattactaaagaaattctagaaggcttgtctgaagatattgatgatagtgacatctatgatatgtag

SEQ ID NO: 33389 - DNA, 99 bp, Zea mays
  Peptide Sequence Number=SeqID_76764
atgcggttcggcctgacccccggagtcaccccaattatctcggtcaaggggtcaaagggtgatgaagaagactttgctgaagatgttgacgagtactaa

SEQ ID NO: 33390 - DNA, 69 bp, Zea mays
  Peptide Sequence Number=SeqID_76765
atggggaagcctgtcccatcactcctcatgctcctcctcagacgaggtttgggttttgcccagggataa

SEQ ID NO: 33391 - DNA, 498 bp, Zea mays
  Peptide Sequence Number=SeqID_76766
atgaaggacatgcgcgagtacaccttcggcaagcacaagtccaaggggagcgataaggagctcgagacgcaggttgaggacaagctcaacaaattgtgcttccttgctaacaccacaggaggccttttcatcatgacacttggtgaggattcggtgggcggtgatgataggaacatcagtgatgactccacctctgatgtatcacatgctgccaatgatcttgctgctaaggtagatgagctaatgggtgttttggctagtcaggagaaattgcttaggctttctcctcatgagatgaaagattacaagagcaagtatgagagcacacttagtgagcttgagtttgctatagcttttgtcgttgtgtccaacgatattgaatgtgatgagcgcgctcttcacatgtcgaatatcaccacattgcaaaccaagtatgccacattattagatgagtgcgataagcttggatctaggtcaaggttgttgggtgcatgttag

SEQ ID NO: 33392 - DNA, 666 bp, Zea mays
  Peptide Sequence Number=SeqID_76767
atggcgagagtagtgtgtaccctccgtggcaagaggctggacggtggtgtatctgtgctctcggttggcgtgaacccattctggtatggcgtgtaccaagaccacccaatgaaaggcaactggacctcgaggcgtgccccgcaccagttggctcctcgacatgaggggagcagtagcggaagcaatgatcccatatgggatctagaggccagggtggtacgactcatgtcagaactgcgccatggaaatagggagcgtgcgcgagatagccgccgcattgctgagctatcagcggaggttaattgcttgcagcaggaaatcgtggaacgagacacagctatcgattgggtcgtaaattcgcgcgcttttgcctgggattgcgaggcaaatgctctaacccgggtagtggaactaagtgtagctctggagaatctacaagcatactgtaacactctgcatgaggaagtgcatgtgttatacgaccggctgcatccaaaagtgccaccggaagttgcagcaatgggagccggaacatctggagcagctagtggaggacctgatggggagttggatctttttggagcccctccttccatgaacctcgcagatgaacgttctcccaaggctggcattggagcgagagcggccaaggacgaagataattag

SEQ ID NO: 33393 - DNA, 1131 bp, Zea mays
  Peptide Sequence Number=SeqID_76768
atggggctcggtgtatgcggcttggtctaccaaggtggtgatgaggatgatggttttggttatgactatggtaatggtaagtggtattctttccgtttggaaaggatggctcgtcttagacacactgcacggaagtcagtcaatcctttcttgccttctcctctcgcggagcgtccgcttcgccgtccggtggatggtcagtctagccatttggagaggctgcaccaccacttgcacgaggagcaggagcgtcggcgacaggagctagagtggcatggctcttctttcttgcttcagcaggagatagagtctgtgaggagctgctcccctgtgcccccgctggaggtgccccctacaccaccactgggtgtcccgtccactggagtagctgttggaggagaccttgacggcgaaggtgacgacagcagctcgagccacagcaccgacctttcagaggagcaggagccggagccggagggatgggttgctcgacccatcactcgtgacgccgcttgcaggtgtcactttcacgatgcgctcaacaccttgctacgccaggcacttgaccggcgtacctggtctatcgagtatcgctgtgtagtctttcagcatagtcgtggggtttacccggaccgctgggaggcgacttgtttggtgcgccgtccggagaacagtctctggggtgcggaggtctgctcagaacactactctatttctgagtgggactcagctgaggcggccatgcaagatgccgcacggcgtgcgcttttgcactactgctcagtgctcggtggggtagctgatggtcttaaccagaagtattacccccgccgtccatctggcagcacaagaggcgtggttgtctcgcctgttggtgaggagaatcctaggttgagcagcacagtcaacctagccgtcgtgctaaacacggagctggaccatgcattagatgagctgagtagggctcatgctgagatcgcccagatgtgggctgagcgcgcagagcatcgtcaactggaggatggctcccccgctcccgtcgggactcagcacccgtaccgctcacctcagcgtggacaccatgcttatggtaaccccgtctgcaggaccaagataaatttagaaccatag

SEQ ID NO: 33394 - DNA, 1398 bp, Zea mays
  Peptide Sequence Number=SeqID_76769
atggacaggaaagaggaggaagggccgctcgaccgccaccgatggccatggcgtcacagtgtgccctgtccgtcccgcccaaccggtcaggatactcaagttatatgtttcttcagtcagatatcatacaagagtacaaatgagattaatggtaaatgcataaggatagagggattgcctaggcaaccttcatatactactggatttgggactgctttaaatatagagacacttgttgctgccgcggaacaaagagatacaccaattgagatttgtctggcaatgctgaggtatacaaatcactgctcagctaacagggcaagcattgaaccaaatttccatgatctgtatctgaagttctttgataaagtaaactcaaaatccatgaacaaggaaatactgaaagccacatatgagaactgcaaggtcttgttaagatcagaccttatcaaatctagttccgaggagcgctccttgctaaaaaacctaggcagttggttgggaaagttcaccattggtaggaatcaggcactaagggctaaggagattgatccaaaatctcttatcgtggaggcatatgagaaaggattgatgattgcggtcataccattcacttcaaagatccttgaaccttgccagtcaagtatcgcatatcgatctccaaatccctggaccatgggaattctaagtctacttgctgaaatttataatcttccaaacctcaagatgaatctgaaatttgatattgaggtgctatttaagaaccttactgttgacataaaggatgtgaaaccaacctccctgctcaaagatcgtctgtgcgaagtcgagggaaatccagatttttcaaataaagatgttactgcatctcaaacccctgtggttgcagaagtcccttcagggaccatcccttcactaactcatatggaacaacaacctgagatcaatatcacatcccgagctatgagccttccaaatatacttaatcagtatgctgctcctgtccgtctacctacaaacagcacggtagaagatgacaaagttgctctaatgatgcctgagcaagtgccctcgttgacccaggtttcgccagcacaaacacaatcaacatcaccatctccattttctgttaaccagcttatggcagctattccacgtgaagagatacgtttcaaaataaatccaaagctcggctcccttggtccacaactgcaatatagcaaaattatggatttggctttggataaggctaacagggagataatactccctgttattcaaagaagtgtgactggcgggaggaacaccgggcgtgtaggagtcatcaagaacagggagaagcacaagggcagctttgagaccatccatgtgctgcttggacctttttgctatgtctag

SEQ ID NO: 33395 - DNA, 372 bp, Zea mays
  Peptide Sequence Number=SeqID_76770
atgcgcggcgagttcgttgaggacggcactgacacgagaggcccacacgccagcgaggagtggaagcggtattacatgaagcaagaagaggaagaagcgttgcgacagtacactgaatggtgtgagaaggcaaaggagaagtacctatcgcatttcacgatgtcttgccatcataagatcatccgtcaaggagagatcaagacagcttctctcctggcttcgcttcagggccccactgcctgcccaattaaagatcaatgcacaagcatgacatacaatttcgacaggagagttgaccacaatgttttgaaagcacacattatttctagcttccaaagggcccagcagatggcagcaaacgaatcaagctga

SEQ ID NO: 33396 - DNA, 417 bp, Zea mays
  Peptide Sequence Number=SeqID_76771
atgagacgacctcgtcacaggtcttcgctcggtgacgtgtgggacgaagggttcatgcttctgaggtcagcattttgcactgttggacttcgattttcattgggtgcatcgaagaggtcaacattttgcttcttcggggatgatgattcattgggtgcacgaaaggtatggacttacatccgggctgtcgagcgcgccgggctcgagggctcggatgagtcggagtactcctcggacgaggagaattcctccgactcgtccgaggagggtggtggcggcgacggcgacaacgacggaggcgacagtgaaggtggcggcgacagcggcaagggcggtgacaacagcggcaagggcggtgacggcagcggcaagggcggcagcgacgacagcaagggcagcaacaaggccagtggctag

SEQ ID NO: 33397 - DNA, 501 bp, Zea mays
  Peptide Sequence Number=SeqID_76772
atggccagatcaatggccattacaccatcttccaccctcaagccaacccgagccacgccgttcgccaggcgcggcggcgatctcatcggcgccaatcgagctgccccccgtgaccaatacgtgccccgaatggttcccacccctagagacaacccaggcgaacacataggcgacatccatacctcgatttatggcgacaaccgcgcggttcatggcgcagggcggatccgcgacaaaactgagacacccgccgaggacccattgatgctcaccagcaagaacgacgacagcggcacaagctcatctctctctcccaatcgcgagctcactgttggcgctggttcgacacggcgagagggcgaggatgcgcgtcggtatttatacatagtggggagggtccaagtggtcgcaacaacttcgagatttccccgtgcttcacgattctggcgccgtattccgcgcattaagcgtgcctctgttgttctcgtcgcgcttggatag

SEQ ID NO: 33398 - DNA, 405 bp, Zea mays
  Peptide Sequence Number=SeqID_76773
atgaacaaaaacagaaacttgaagaatggaattggggttcagatgggtcagattcaagcgatagaaatcaaggagaccacggaagaaaggagaaatgggaagagcaagtccgcggataagaaaaggaacgtaaatgacggattcgtgggtgtcttctatcggaacagtgaccccacggcagatccaccacgaacagagctcctttggaggaagaactccgatagaaacgagatgaagaaggtcagattcagagacaacagacatatggtactgactattgtgatcgatggggggaatgattgcgacagacgactcgagctttcgcttgggcgccatctcaactgtcgggaccatgctcgtcgccgaagtctgcgaaaggaaacagcttcggctgaagctgcttga

SEQ ID NO: 33399 - DNA, 285 bp, Zea mays
  Peptide Sequence Number=SeqID_76774
atggccttgatgggttcaacatcggaaaagatgtacctctgccaggtaccagactttgggttgaaaataataaagctgagaccgggcgggcgacttgcacgagaagagagtctcggtgtagtgtctccatctgagtcgattaaggaccatctcgatgtaggcttgatgatcgatgtaagctttgcctcgggcagactaagatctactttagtaagcatttctgcaacagagtcattgactattgataagccttaccttgactcccttaagccagcatacccttga

SEQ ID NO: 33400 - DNA, 93 bp, Zea mays
  Peptide Sequence Number=SeqID_76775
atggagacgcggtgtcctgatgagaagcggctctggcgatccaacatccactgcgatgacatggaaataaggaaaaagaacggcgaggtggag

SEQ ID NO: 33401 - DNA, 648 bp, Zea mays
  Peptide Sequence Number=SeqID_76776
atgactgctgctcctagcctgcggtccaccaatcttgcgcttctggtcttccatctcccggtgcttcctctcagtcattattgctcgatcgatcagatgttgaaaggtattgaagacaggggcccttgctttagtgtcagaaattcttccttcctcgctatcatcaaaccttctagaacgtggtaccggtggaagttgtccctgaactcctcccaggtgatagcttcagggtcagcatgggtggcgagggtggcggtggaggcaactgctgctggagtgtctcatctcgtggggcatgctgctcttgctgggcatgccttccgcctcggctcctgttgtcagacatctgtagaaagcattcacacattagaactgacctcacagtcttttagcataagaaaaggtcctatagtcaggggtgccataagcatgatgaccacggggcggcgagcggtaagggtgctgagtcccaacaggggtgggggaaccatcctcctgatggcggcgctctgtgcgctcagcacgcagttacacaatcttcgcacgagccttgcccaactcgtcaagggtgtggtccagctcggtgttgagcacgacgaccgagttcaccatgctactcaatctgggattgccctcaccaacgggtga

SEQ ID NO: 33402 - DNA, 438 bp, Zea mays
  Peptide Sequence Number=SeqID_76777
atgcacgacctcctccttgcgctggagctgcttggttgttctggttggttgctagggcaggaaggcgaggtgcctggttgttctgacgctagtactaatttcctccctgctggttgttctaacgctactactgctgctgttgagggaactgtctctggtattgctgctggtgctgacactgatgttggggctggcattattgctctgtcgatcaaatgctggaagtccttcaggcacatggtaacgacgaaagttgttcctaaactcctcctaggtgatagcttcagggtcagcatgggcggcgaggctcctatggcatctaaacttgcaattggggttgaggtgggggttgctgctgctgcaccttctacattgctgctaaggtctgaccaatcgattggactgattgagtttgcatcaggaacatccgctcaatag

SEQ ID NO: 33403 - DNA, 459 bp, Zea mays
  Peptide Sequence Number=SeqID_76778
atgggcaagaacaacaaacgcaagcgcgagctgactcctccgtcagaggactttggcgactcagaatactcagaggaggagttctcctctgagtccgaggggtctccggctcccgtctctcccccagcgtcgtccgatgactcggacgactctcaggggattgccgcggaggtctggacgtacatccgggccgtcgagcgctccgggctcaagggctcggatgagtcagagtactcctcggatgaggaggactcggacggcggcggcgaggacgaggacgacgacgacgacgacgacgacgacgacggcggcgacgacggtgacggtagcgccaggggcagcaacggcggcagcaggagcggcaacggcggcagcagcaggggcagcggcggcggcggcagcagcaagggcggcggcggcggcggcagcagcaagggcagcaataaggccagtggctaa

SEQ ID NO: 33404 - DNA, 369 bp, Zea mays
  Peptide Sequence Number=SeqID_76779
atgacttcgctcggccatctcgaccgcttccagtctgaggcgacactcaacctggtgcgcaacctgctcgggtggggcatgccagcgctcgccggaaggatccgcgctggcgctgctcccctcggtgatctcgccgccggggagttcgtgttgttcatctcctacctctcctacgggttggcgctgctgatctcgcctttcttcttgctcctgttggaggagctcaggctccagcttcagcaactcacgccccactccatcctccaggcggccatcttcgtccacctctgcgagatgttcatgggggtggcccctctgcacctccctcttctgccatttcttcgtgttggtgaagtctgggaaggctaa

SEQ ID NO: 33405 - DNA, 705 bp, Zea mays
  Peptide Sequence Number=SeqID_76780
atgtacaccgtcagcagcggcggaggaggtcccaactgcgcccaccccgccatcaggggcgacgcggggggcgcgtctagctccatcccgccgcccactctggaggagccggatgtggctcttcatgagactgaggcggcgatcctatgggagtggggggtgcttgaggccgagcaccaacgcctcagcgactggcgcacccagctcgaggagtgcaccaaggcggcatcccgccagttcacctctaagcagtccgagctcgagcgggaccgcaaggattacaaaaaggacctccagaggttgtacactcaggagttggaggcgagtcggaaggagaagaggttggtcaagagggaggaggccttagaccagagggaggcggtcgtcacagagctccgggcaaagctgagcgccttgaacgaaatcctagaagagcaacggatccagcagaccacggctgtggagaggatccaaaaatgggagcgggagctggaggacaaggccagcaacattgccctggccgaggagaacctgaaggagaaggatgcatccctggatatgcgggaggcggatctcgcctggcgggagaaggatctcgccttcagggaggaaatgtttgaaaggcaggataagttgctggccgagcatgagctcgaggcggaggagaaggagaaaaagctagaagagcgggtccaccagttctag

SEQ ID NO: 33406 - DNA, 336 bp, Zea mays
  Peptide Sequence Number=SeqID_76781
atggaggccaagtcacaccatcaaccatttcctgaatgtacaaggggtcaagtagtctcattagctgcgagaagcagacgattcgaatcgagttttaaccttgcaaggcctcaccgccttggcatacaatgctccactaaccccggttgccgccgtgtagtgaccgcacttgtacccaccatagctagcatgggagacccagtctcaggtcgcatgagggataaagtccgcgcccggcttcactcaggcatcctccctggatccaagtccatagaccaacatagatcccgttatcaagatgaatacaatcaattcctggcctcgcgcgagtgctag

SEQ ID NO: 33407 - DNA, 630 bp, Zea mays
  Peptide Sequence Number=SeqID_76782
atgaagctgccgaagaaatgcgtcatatcacgcaagacgaccaaggacgaaggccacatcagagagagcttcgtcaagaaagcccaagcaatgacgataaatgacgtggtattcttccctttgcctaggaacgatcacgtcgtggcaaaagctgaaggacatgctgaggaaggctccacactaggcatgtcagaacaatccacaatcccaacacaagcgacgatagaggaaaccacgctcaaggccatcagcaaagctcccagtcttcagggacgcaacaaagttcgtacaagccaccagctccgagagccagaggaggaagaagcttcggaggaaggttcagtttccaacctagaaggttgttctgtttattctgtggggaggataagggacatacaacaaggacgtgccaagtcacgatctagaattaaaaaagaaatagctgaagccgaagcgcggcagaatcagctgaagcaggtcctccacacggcttcgtgctattctccatatattcccggtatgtgggcaaaccagcagcccacagcatcagttgcttcatcaagtcactctcaagctttatggggctccgctaccaacaccaccacctatggcatcaactttgacccataa

SEQ ID NO: 33408 - DNA, 156 bp, Zea mays
  Peptide Sequence Number=SeqID_76783
atggggtccaggcatagtacttgctctactgaggctggttgcatacgttctttgacttggttttgttattcacccttcctttggggagagttctcaggaggagatgctggcaacatggaggactttgaggagtttcaggactacgacgagtcctag

SEQ ID NO: 33409 - DNA, 429 bp, Zea mays
  Peptide Sequence Number=SeqID_76784
atgggcaagaacaacaagcgcaagcgcgagccgactcctccatcagaggatttcggtgactcggaatactcggaggaggagttctcctccgagtccgaggggtctccggctcccgtctctcccccggcgtcgtccgatgactcggacgactcccaggggatagccgcggaggtctggacgtacatccgggccgtcgagcgctccgggctcgagggctcggatgagtcggagtactcctcggatgaggaggactcggacggcggcgacgaggatgaggacgacgacgacgacgacgacgacaatggcgacggtgatggcagcggcagtggcaggggcggcggcgacgacagcaggggcagcaccaagggcggcagcagcaggggcagcaccaagggcggtggcggcggcaggggcagggccagtggctag

SEQ ID NO: 33410 - DNA, 1860 bp, Zea mays
  Peptide Sequence Number=SeqID_76785
atggcgcgctcccgggctgcgtgctcaagggccgcctggacacggccgacaggggcggtttcgacctcagcctcggcctgctcgacccgcgccaaggcggcgaggcgagcttcctggagggtagaggcatcctcgatcactggagcaatggagcccaccatggatgaggacgaagcaaggcagcgcctgagggttgcgcgctggaagggggtggtggcgcctgggtggcagcacgccagagcaaaggaagggtggggtggcggtgcctgggggctacgcgtcggagatggaggaggggcgggggtgcctaggactacgcgccggagggggaaggaggtggcggcgcctagggctgcgtgccggggcagtggagagggcagctctctggcaggtgtcggtgttttgaacctcgctccgacaagtaaatttattgtgcgcgttccgggctctggacggggtcgcaagctggcgagagagggaggagaggctcccaagtatcttatcgtggtggaggtggagctgaggcgcaggacccactcgagtggtttcccttcggtgcactcggccccccagtcaggttctgccatgcccgaccccaggctcggcgccacggggttcgttcgagggcggcactctgcatttggggttgatgatctgtccctgccagagtcaagaggagttggtgagttcaggaccagtctgaacattcgtcccaccgacgatcagattttggggggggatgttggttgtggaaagaccattgttgctttcctggcatgtatggaggttgttaattcaggatttcagggtctgaaaactggagagataggcatggtcattggaacacactgcttaatagctgataaaactgaattttcagctttacgtatctctgttatagatgaacagcagcgctttggagttgtacagagaggcaggtttaacagtaagctatatacttcttcctcaaagttgagtggtgaaaatacaagttcagacgaggcttctgattctgaaacatttatggctccacacgttcttgcgatgtcagctacccctattccaagaacattggcacttgctttatatggtgatatgtctcttactcagatcacggacctgcctcctggaaggcaacctattaaaacccttgctcttgaaggaaatgatgtagggtttgaagctgtcttccagatgatgagggatgaactgatagacgggggcaaggtctaccttgtgtatcctatcatagatgagtctgagcacttgccacaactccgtgctgcaacagctggatttgattccataaagcaaaaattcgaaggctatccctgtgggctattacacggccgcatgaggagcgatgagaaggaagaaactctcaacagttttagaagcggagaaacacgcattctcctgtcgacacaggtgatcgagatcggggtcgatgttcctgatgcttccatgatggttgtcatgaacgctgagcgatttggaatctctcagctgcatcagctgcgagggagagtaggtcgcggtgagaggaaatccagatgcatattcctggcttcaacttcgagcacgctgccaaggctgaaggtgctcgagaagtcctccgatgggttttacctggctaatgcagacctgctgctccgtggccctggcaatctactaggtaaaaagcaatctggtcatcttccagaatttccaatagctagattggaggtcgatggtggtattttacaagaggcccatcttgccgctctgaaagtgctggtcgcaagcaacgacctatcgttgtatccacggctgaaggtggagctcatcatgaggcagccattgtgcattcttggagattga

SEQ ID NO: 33411 - DNA, 846 bp, Zea mays
  Peptide Sequence Number=SeqID_76786
atgtccttcactggatccgcccctgtagtgaggataatatctttggagtttcggagggggcgcgctagaaggatggtttccaaaatgagatttcggaatgctctcggttctagaccatttcagtgttgttcgcgtgagaatcatacatatgtccggaagctgttggaccgagtgtcggagagatcaaagctccttaaaaaggtgtctgttttggtgggttacagtaatccacaagatttagttgagaaacaaagagcccctggggaatcttctgcagagttgattagtgccttgaaagaaatcgatttcccagaaattactgcaaagtttccatgcataaaagttggtgatgcatcacctgttgaactgtatgaggattctactaacatgaagtttaaagaagctgcactttctgaaaagctcacaaatttcatccaaggctcagctcgaaatttggagtcagcttatgaattccataatgactgtcatccattgaatcaaacacccacaactgcaggtgatctttcaatcagtgaagagatccctctcattgaaccaatagttgatacgaagtcccccgagtcattgtcagatgctataacctctgacaatagtatactggataaaagtataaggtgcttgcctggaacaactagtaggcaatatcgccagctagaggatggtggtttccatacggtccgcaaattattgcagcattttcctcggacttatgcagatctgcaaaaccctcaaggccccatagaatatgggcagtatattatgttatctggtactgttatatcttccaggagagctgcgtatcaatatattaagaagaaagggtga

SEQ ID NO: 33412 - DNA, 444 bp, Zea mays
  Peptide Sequence Number=SeqID_76787
atggcgcggatccagggacgacgttgtcaagcgatgcagatagaggaggcccacgagcctacgctcgcgcctaggtcgcgccgaggctgtacctcgccggaggagccagccgccagggcggcgccgtggccaccattgcctcgtgatgaggctccgtgtcgtgcgccgccgagccgtttcccgcgccggggccggcgtggccgcgccgccatggacggaccgtcgcgtccacactgccagggggtcgcgcctcgcgccgtcgaggccaggggctgccactcccgcgccgagctacgaggggccgcgcccatgcacagccgcgccaggggcaagtgccgccccgagagggaggagcctcctggagggcgacgacggctcaggtggtggcggctgctgtggggtgggaggcgaccggtggctactgtgggtttcagaaaaccctaa

SEQ ID NO: 33413 - DNA, 234 bp, Zea mays
  Peptide Sequence Number=SeqID_76788
atggggctcccgtgggatgtgcatatggaggcacacctgctggacagcgtaagcgatgtcgggccgggagaagtcgaacatgctagcctactccaggatgtcgagggtgtactggcactgatgcaggaagagaccctggggccggcgttcggcggtgatgccaaggaagtgatggagaggccacaggtccttcatcgcgaactcccgctagagggcaatgatcgcacgatgtag

SEQ ID NO: 33414 - DNA, 486 bp, Zea mays
  Peptide Sequence Number=SeqID_76789
atggaggaaggcgttcttgatgtcgagtcgatggatcgcccagtttctggagaggacagcgcgaacttgacgacagggttgaaggtgcataaaggttcaacacaaaccaataaaaagattgaagttagggatcaaattcaaaggagcaaagaaaccgagtatgccctgttctggcgcaccggactgtccggtgtgccaccggatagtgtccggtgcaccaggaccgtacagcgtccaactctccactctcgagtttctcttggggtgctctgctataattcaccggactgtctggtgtgccagtggagcaacggctccttcgcgcaacggtcaactgcaaaagttgaagattcagaggaacagtgcgcaacaatgcgcggcagagcagagccgcccgtcagaggcgcaccggacagtgaacaatacctatccagtgcggcaccggactgtccggtgtcactagaatacaaagcctccaacggttga

SEQ ID NO: 33415 - DNA, 786 bp, Zea mays
  Peptide Sequence Number=SeqID_76790
atggctatccagcgccaacggtcgactctaacaggagctatagtgagcaacagtgccatgcagaagtcagaggggcaccagattgtccggtttcgcctattcaccccccctctaggcgactttcagtatatcgacgctagagatccttctcgggtgactaaaagggtaatcacagaggaagatgtgatgggacggattgagatgatattgagaggtatcattgtcaatgatggtgctcctcatgcttattctgcatggaaccactccctggtagaatgtgcccttagaagatggtgcgaggccaactcaagaggaggtcaaagcaatgctagcggcctaagagggtttggccgacgaactgaagatggtgtgatgaaactgcaagtgcaaggcattgatgtttctccttttgattttcttttcgaagaggctatcctagaagacgcgatgagtgaaataccagaagtacatgtcattgatgttgacgtacatcaggcaagcgagccccaagtgttggctactccctgcaagtcgcaggtaaaaggcaagggggaaaatggttctgaaggtatagtccctccgttgcttcgttgcttgttggttcggtggtcgacttgttgcatgctgcccaaccaaaggaaagcggtgcgccggactggagagatggcagtgcaacatgccaccccttctccagcccccaaggatatgagggtggatatgatgtctgctgaagggaggtcgacgtttcctgattcacctttagcccccgagggtgagggtgcctag

SEQ ID NO: 33416 - DNA, 198 bp, Zea mays
  Peptide Sequence Number=SeqID_76791
atgaaaacaattaatccatgcataggccacatcagtgagacattgcagctcatacgggtcttgaaaggcgtcctgattccgatgaaagcccgaggcaagaggaggtctctaatcccttctaaagtaggctatatcactgagacattgcagcccataatagaagaggtatttgaggttcagctgctaatggtcctgtga

SEQ ID NO: 33417 - DNA, 1113 bp, Zea mays
  Peptide Sequence Number=SeqID_76792
atgtctccccttcgccgcgcgcgctctaccctgctcctcctccactacgtggccgcctcccacttcctgctgtgcgcgccgatccagcgcaccgccgcggccacattgccggaccccgcgccactcgacccggcactgatcctcccctcggcgacctcggtgcagcccaccgccactaccattcccgggggcacgatcccggcgttccccgagcagtcggactcgctagcggggtcctcgtccgcgtgcccgctcgccccttccccggcgctcctcccggccgtgcggtcctcctgcgccaccgacgacggcgcgctgccgccgaggctgcgctgctgccccgcgctggccgcgtggctgttcgccgcctacgcgcccaccgcgctagcggagcggcccccggccgcggccgcggccgctgctaccgtggacatgccgctgccgcccgacgactccgagacgtgcgcgggcgccgcggaccgcgcgctgcgtgcggcgggagcggcgctgccccgcccccctggcgctggcggcaacgggacgtgcgacgtggcgttctgctactgcggggtgaggctgaggcggctggcctgcgggtccccgccggccgagggcgggatgtggtcgccagctgacgccgcggcgagggagctggagaaggactgcgcgcagccgggcgtccccggctgttccaaatgcctccttgctcttaccacgataaaggccacgaatcccgagggtggcgccggcgcgaaggcaccgggcaagaagaaggagcagatcgaccgatcgaccgcgagtgaccgtgactgcgagctcatggggctcatgtgggtgttgcagcgcaacgccacacggtacggagcggcggccacgaccgtgatccaggccctaatggctgtggatgaggcgttcgccgcaggggtcacggtggcggcagatgatacggggggtagccgcggcgtgctcgctgcccgtggacgacgacatgcccctcccggccgagctagaccgtacgacgctcctcgttggtggctctggtgctctggttgcacaggtgagttggtgctccgtctcagccccttctcttttctctttgtccccaccatctag

SEQ ID NO: 33418 - DNA, 432 bp, Zea mays
  Peptide Sequence Number=SeqID_76793
atggctaaggttcaaccggttttaaaacaggttcaaccggtttttgcactgttcacctttttgaaaatactggttcagccggacactcaaccggacactcaaccggtttttgtctggtggaaacaggcaactttcaatggcgaccagcaggtgcgtgtagcccccgggcgccttctgcaaggggccgacgaggtccagaccccacacagcaaagggccaggtgcggacaattctagtggcgtctgccaccgctgttggccagtagaagccttgtcggaaggcattcccgacaagagctcgaggcgctgcgtgatggccgcaagcccccgagtgtatctcttacaggagttcctgaccttcggcgatggagatgcatcgctggaggatgcccgaggggctgcggtggtagatctccttctcatcgcccagtaa

SEQ ID NO: 33419 - DNA, 900 bp, Zea mays
  Peptide Sequence Number=SeqID_76794
atggagaaccatggaaaattggatgggtgggatgaagttctggaagaagaagatgagttagcgagtgtatgcaaatatcctattagcacatcgtacctttcttatggaacaagcagaaggggcaaaagtgtaaagaagcctagattctcattacgaggatatgattttgttccattagatgttaagactgataacttgtgcattggggagcaagatggttcttctgcagtgccatcaactaaagcttcacaaaccatggtggctgaacggttggaaaacgttgaggaacaaactgaagatttggcaccagagtttgcccttccacccaaagcaaatactttagtttctgagctgctagataatttacagcgtaggggtggttcttttgtcaggacaccatctttgttgcaccaacatgctccaagcatatcaatcagggagcaggaagtttcatccggagtgccaccaactaaagcttcacaagctttgatggatgaaccgtttgaaaatgacaatggacaaactgaagagttgccatcagagctcccctgctcgatcaagagaccaaaattttcagttgcagaacttctagaagacctacagggtagaagtggttcttatgttgagacagcatctttgtcacaccaacacaccagagctaaacattggaagccaaagttcctttcttccgagaagaaaacaatagctattctaggagacaggagtattgacagtgaggaccccttggagcatccttgctctgtggcagagctggtaactatggaagaatgcaacagattatgcacatggagaaagattggcatgtggaattctcgaggcagtatagcagagagcacagttattcaggtggtgctgttggtagcagttggtataacttaa

SEQ ID NO: 33420 - DNA, 2610 bp, Zea mays
  Peptide Sequence Number=SeqID_76795
atgtcgcagccccgcagttacggaatcctcgtcgccgtccttgtcgcggcggccgtcgccgtcccgccggcgaccgcggcggtggcgagcatcgacctcggctcagagtggctcaaggtcgctgctgtgcatcttgccccaggccgtgctccaatcgctgttgccatcaacgagatgtccaagcgtaagtccccggcactcgcctcgctcgccgacggcaaccgtctctctggggaggaggcggcaggcatcacggcgcggcacccgtccaaggtgttcgcccgcgcgcgggacctcttggccaagcccttgtcctacgtgcagtccgtcacggactcgctcttcctcccctacgatctcgtccccgacgcgcgcggcgccgccgcggttcgcgctgatgacgggcaggtatactccctcgaggagatcgtcgccatggtgctccactacgccgcggggctcgccgatgcgcacgttggggcgcccgtgcgggacgcggtgatcgccgtgccgccctactttgggcaggccgagcgccgggcgttgacgcaggctgcgcagctggctggaatcaacgtgctttctctcatcaacgagcacgctggggccgcgcttcagtacgggattgacaaggacttctccaatgcgtcgcggcatgtcatctttacgacatgggcgctggttaaggacgtaagatggaactctgagcttggaggcgttcaaatggaaatgcgtctggtcaactattttgctgcccaattcaataagcagctcggtgatggggttgatatccgtcagtctcccaaggcaatggctaagttgaaaaagcaagtcaagcgcaccaaagaaattcttagtgcaaacactgcagctccaatttcagtagaatctctgtataatgatgttgatttcaggagtaccataacacgtgagaaatttgaagagctgtgtgaggatttatgggagcaagctctaactccagttaaagaagtgctgacacattctggcatgaagatcgatgacatctatgctgtagaactaataggaggagctacccgggttccaaaactgcaggctaagctgcaggaatttctgggtaggcgtggcctggataaacatcttgatgctgatgaagcaattgttctcggagcttcacttcatgctgctaacctgagtgacgggattaagttgaaccgtaagttgggaatgattgatggctctacttatgcttttgtacttgagatagatggcctagattatgtcaaggatgaaagtattgaccaaattttggttccaagaatgaagaaaatgccaataaagatgtttagatccatcagacatacaaaggacttcgatgtctctctcaactatgacaaagcttatgaactgcctccaggcattccatcacacaagtttgcagagtattccgtatcaggactgacagatgccagtgaaaagtatgcaaaccgtaatttatctgcacccatcaaagcaaatctacatttttctttgagtagaagtggaattattgctcttgatagagcagaagcagtaattgagataactgaatgggttgaagttccaaagaagatattgactctagagagtaacatcaccaatcagaattcttcttctgaagtaggagcagctaatagcacaacagatagtaaggaaaatctgagttctggcagtaatactaattcgagcactcccattgatgagagtaatgctcaagaaattattacagagaaggtgctaaagaaaagaacttttagggttccattgaaggttgtggaaaaaacaactggtgctggaacaattctttcgaaggagttgtattctgaagcaaaaaataggttagaggcactcgataagaaggatgcagaacggaggaaaactgctgaacttaagaataacctagagtcatacatatattctatgaaggagaagctggaagaaagcgcagatattttgactgtctcaactgaacaggagagggaatcctttgctgagaaacttagtgaggtgcaggattggttatatatggacggtgaagatgctcaagctaatgaattcaaagagcgtcttgaccaacttaaagccattggtgacccaattcttttcagattgaatgaattaaaaacccgaccaacggcctgtgaaaatgctcgattgtatcttgatgagctgcaaaagattgttaagaactgggagacaaacaaaccatggctcccccaaaagagagtagatgaggttgtaagtgaagcagagaaagtgaaagcttggctgaaggagaaggaaaacctgcagaaaaatacccctgtctttaacccaccagttttcacatctgaagaagtttctgagaaagttctggacttacaagataaggtctcaagtgtcaataggattccaaaaccaaaaccgaaggtcgagaagaaaacagcaaaggaggaagaacctgctagcaaggagaaaaccacctatacggaatctgcacccgacgagggtgaatacaccgaaacgtctcagaaatctaaggctcaagaagaggatcagtctgcatcagccaacactagtgattcagaacctgaacctcatgacgagttgtga

SEQ ID NO: 33421 - DNA, 1002 bp, Zea mays
  Peptide Sequence Number=SeqID_76796
atgacggtggcaggcgggcgggagcagcggtcacgtcgtcagccaagctcacgtcccatccaggggcagcaggagaaccccctctcacggcgtgaagacgacgcgcccgtgatccgttactcgaacggctcgcgcacgcgcgacgaccgccccgccaaccactcgccccgtcgcattaactccgcggcgggacaggcggcgcttctggcaggagaagcgggcgacgcttcgccttcgccggaccgagaaagggggataccccgaaaaggatccttccccgtgaaggaaccgggctccgagccccctactgatcagaggttcgaaggctggccccccgaagggttcaacagccgcctcagatcgcgtgggccctacacccactactggtcagaggttcgaaggccggccccccgaagggttccacggccgcctcaggctactcgggctccgcgcccattactgatcaggggttcgaaggctggcccccgaagggttcacagtcgcctcagacgccgagcgagggatgaccaggggtacgttcgatacataaccaaggctcgggctacgctcccgagatcacccgtaggtacttttgggcgtgcctctggggaccgggtccggcagaacactcccttcgaggctcgggggctactgtcggggaccataattaggggtaccctcaagacgcctaattctcagctgaaggacagcgccgcctgcgccactccgactgcagtgccccttgacagagtgagactgacaggcagtcaggccctgccaaaggcaccacgggaaactccgctccgcccgacccagggctcggactcaggctctgccccggaagacgacgaactccgctccgcccgacccagggctcggactcgggctaagtcccggaagacgacgaactccgctccgcccaacccagggctcggactcgggctaagtcccggaagacggcgaactccgctccgcccgacccagggctcggactcgagctaa

SEQ ID NO: 33422 - DNA, 507 bp, Zea mays
  Peptide Sequence Number=SeqID_76797
atgtcgtaccctccgtcctccccctcggccctcgatgtgccgccgcatgccctccgctgttgccgccgcaatgagtttggcctcctctggaagctccctttcgcccatgcacctagccccgatggatgcggcatcgcctctgcagccccattcgccacgcgctccgttgccgcagcccgcgccgtccaggaggtagatgctggagggtcacgttcagtggtttggctcgagaatgtcacatctggacatggggacacccatggcctcctgatgatatgtatggttgtgtatgctagtggtggaaaagctcatgaaaggtacacaatgtttgataatgtcatcgactcgagccaggtgagggttcaatgtggaggtccatcgaggtttgttgctcgtagctctcgtcgctccactcaagatccagcaaaagtggagcaactacgcgaaaaacttaatggaggtatcgaccatcactcatcgttgtaccccgatggtgatcaactatag

SEQ ID NO: 33423 - DNA, 546 bp, Zea mays
  Peptide Sequence Number=SeqID_76798
atgcaagatgcagcacgatgggcactttctcagtattgctcgttgttcagcggggtagctgatggcctcgacctgaagtactacccttaccgttcgaccggcagtgctgaaggagtgattgtctcgccagttggtgagggcaatcctaggctgaatagcatggtcaatctggctgtcatgctcaacacagagttggaccacgcccttgacgagttgggcaaggttcgggcggaggttgcggaattgcgtgctgagtgcgcagcacgccactttctagatggtggttctctcgcccctgtcgggattcagcacccttaccgttcaccgcccagtggtcgcttcgactatgccaaagttagctcggtctgggtgcaccggactgtgtccggtggtgcaccggacagtgtctggcgaactcgtcgctctcgggagatgattaacggcgtacggctaaaattcaccggactgtccggtgagccaacggtcgaccaggccaacggtcggccgcgcgatctacacgggacacgtggccgagccaacgactag

SEQ ID NO: 33424 - DNA, 276 bp, Zea mays
  Peptide Sequence Number=SeqID_76799
atgctggtagactacacaacgggggcatctctggctgaggtgcaggggaaggcggcctctcagactccacctcctgctgaggcgagggggaggagtcctgctgctgctggtcctgctcctgctcctactcctggcatcggcgctcctgctcctcatgcaggcgatgatgcagtctctccaggtgactggactgacctggcaccgtgcgacgtagtggacgctccgccaggagagaaggcaaaaaggggatcacagacttacgtgcagtgcacctga

SEQ ID NO: 33425 - DNA, 458 bp, Zea mays
  Peptide Sequence Number=SeqID_76800
atgcacgacttcctccttgcgctggcgctgcttggttgttctggttggttgctggggcaagaagacggcttgcttggttgctctgacgctggtattggtttcctccctgctggttattttgacggtactactactgctgctgagaaaactgcctctggtactgctgctactggttctgacgctgatgctagtgctggtgctgaaggtagggaaagtgtggttcatcagctggtaatggaggggatcaaccaatcctctcaggaagcgggcgagaaactcctccttcctcactatcatcagtcccttgggcacatggtagctacggaagttgtccctgaattcttcccaagtgatggcttcagggttggcatgggtggcgaggcacttgtggcatctagacttgcactggaggctgaggcgggggtggctgctgctgcacttgctgcattgctgctaag

SEQ ID NO: 33426 - DNA, 87 bp, Zea mays
  Peptide Sequence Number=SeqID_76801
atggcgccgccgtgggggagcccgtttgccgtggttggctttggtaggagggttgggggagaaggtaatcctaatttaagcacataa

SEQ ID NO: 33427 - DNA, 663 bp, Zea mays
  Peptide Sequence Number=SeqID_76802
atggagcttggcggagggacagctgtcggagcggttgagtccttgctgacgtcctcttgcttccgtaagggggctgagagccgccgccgtcacagagcatgtggggcgccatcattgcctatctggcggagcgagccagatgggacgccggttgggcgatgtggaagctcctccgaagccgaggtcgagtccgagcccccgggtcgggcgaggcggagattgccggctggtgccggggcggagtccgagccctggggtcgggcgaagcggagttcgtcgtcttctggggccgagcccaagtccgagccctgggtcgggcgaggcggagatcgtcgtctgctggggccgagcccaagtccgagccctgggcgaggcggagatcgtcgtcttatggggccgagcccaagtctgagccctgggtcgggcggagttcgccgtcttccgggacttagcccgagtccgagccctgggtcgggcggagttcgccgtcttccgggacttagcccgagtccgagccctgggtcgggcggagcggagtttcctatggtgccttcggcagggcctgactgcctgtcagtcttactctgtcaagtggcactgcagtcggagtggcgcaggcggcgctgtccttctgtcaggccggtcagtggagcggcgaagtga

SEQ ID NO: 33428 - DNA, 333 bp, Zea mays
  Peptide Sequence Number=SeqID_76803
atggacctcagtgaggagcttgctggcttctcccttctggtgtcggagcgtgcggtggttgtgttcacgctgagcagctgctgcatgtgccacacggtgacgcagctgatggcggacctgagcgtgaacgcgctggtgcacgagctggacagcgaccccaggggcaaggacatggagcgcgcgctgctcaagatgctgggagggagggcgcccgccgtccccgccgtcttcatcggcggcaagctcgtcggcggcaccaacaatgtcatgtcgctccacctcggcggagagctcgtgcccatgctcatgaacgctggcgccctctgggtctag

SEQ ID NO: 33429 - DNA, 864 bp, Zea mays
  Peptide Sequence Number=SeqID_76804
atgccggttggggcccacgtgcgtgactgcccaccgcctatgactgtctacaacaagccctccgccatcacctcatccctgtgtgctccttcggatgacgctgcatccatcctcgccgccacccaggcagccgttacgacggctcgccagcgggcccaggacgccgcccatgctcttgagcaggagcagacggttgttgacgccaacgagcgtcagtacgccgagaactaccaccgtctctctggcaagggcgtgtcggatggctatcccacgttcgctcgtcactgcgccgacaccttcgagcccacgcccgccccagcctcaactcttcgcgcctctcttcacgctcaggcggcggccctcaccagcatctgggcaaccgtcaccgacgttcttgcgccggactccactcagtaccctcagtggcgcgaccaggtcctgcagaccctccatcgctacgccctcgccgaccacgtcctctccccggtcactgacccgactgaggattggctcctgatggatgaggtggtgctttcttggatctatatggcaccctcacggccgaacttcagcacattgttcgtgtgccagacgatacggctcaccggatctggggtgcccttgaggctcagttcctcagtaaccgccagactcagattttgtaccttgagaccgctttccaccagcttgctcagggcgttctacatatatgaaggtgtacgatcgattgagaacctccgaacatattacaatcgaatcaattactttctttatcatttatgtcgtaggagtaggtgtaacatggttctagttatagcttttcgcatatccagctccacccccattcgactttacattgtctaa

SEQ ID NO: 33430 - DNA, 570 bp, Zea mays
  Peptide Sequence Number=SeqID_76805
atggcgaggagggtggcgggacaaacccagatgctgctcttccgccacgggtggaagacgtcgtcgagttcgccgccgccgagcgagctgacagccgtcgttgttgctatcgcactgcggggggaggagtaccatgtcgtagccgccgtcgagggacatgaactcgagactcccgaagcggagcactgtcccgggctgaagaggttgctaaggactacccatctggaactcaacgggaagttattcgtcaacacgcaacaggcccctgcctggcgcgccaactgtcggcgtttcgaccccggggggtccctggaccgacgagtaaatttgtcgctgcgcgtcccagcccagatgggttggtgcgagaaggaacacaatggagaaaacgcggctcgtgttaccccgcgccaaagggagtgtgctcgtagtaggggttacaagcgttcgcgagagagagagagaggcgagagactccaatatgtggagattcctcgcaaacgggaaaagagtaaagaaaagaagaacaccgtggtattcaagttgatcattggatcacttgagaggagttga

SEQ ID NO: 33431 - DNA, 350 bp, Zea mays
  Peptide Sequence Number=SeqID_76806
atgggaagtgtcggacacctgtatatacggaccggacctccgggtaaggtccaggacctccacgggcacgagccggactcctggtatgggtcccggacccctctgtgtagggtccgggccactcacggcagggtcccgggattctgggacaaagagtacccgggccttaatcaagaccaggcgggggtccagagccgacacgtatccgggccatgccgtgtacgcttctgctccccgctcagacggagacccgatgctgccacgtggcctactgcccgtgacatccagatccaaatcacgcaggaacatgcatcccatccaggcggttattggccttctcacgtgcgcag

SEQ ID NO: 33432 - DNA, 399 bp, Zea mays
  Peptide Sequence Number=SeqID_76807
atgcaattccgcaacctccacccgaaccttgcccaactcgtcaagggcgtggtccagctaggtgttgagcacgacagccaggttgaccatgttgttcagcatgggattgccttcaccaacaggcgagacaatcatacctctagcactgccggtcgagcggcgaggggggcatctctggctgaggtgcaggggaaagctgcctcccatactccacctcctgctgaggcgagggggaagagtcctgctgctcctggtcctgctcttggcgttggtgctcctgctcctcgtgcaggcgacgatgcagtctctccaggtgactggactgacctggcaccgtgcgacgcagtgggcgctccggcaggcgagaaggcaaaaaggggatcactgacttacgtgtag

SEQ ID NO: 33433 - DNA, 174 bp, Zea mays
  Peptide Sequence Number=SeqID_76808
atggcgaaggggagtcctcggcggaacgaggaatactccggcgagcaattgcgggcagctaaatgcgagacagggaaaaggcaaggaagggggcgagagagcacagctgagggcacaagtgagcagggggaagtttgcgagcagggtgcgggctctaaaggggcgagggcgtga

SEQ ID NO: 33434 - DNA, 411 bp, Zea mays
  Peptide Sequence Number=SeqID_76809
atgggcagggcagcacaggggctcgtcggtggtgatgaagatggccggagcaggagcgatgcccagcgaacggtggagaggcggatgtgcagcgaggccgccccgatgaggttgcacaggccgcgctggccgcacctgggcaacccacgaaggatgtcgcgcctgggcaccgggacgctgcgccgcgcctgcacgctggccgcgctggccgcggacgagcagagagggcagtggcgaggctcctggtgcagcgatcgcgaggagagaggttacgtgcagggagagaatgtagggcggctccaaggcatcatgcacgtcctggttgaggagggagaggggccaactggtgggccagctgggcaaggcatgcaacacatgcaagccacgaccaggggcactgttgctgcgtga

SEQ ID NO: 33435 - DNA, 237 bp, Zea mays
  Peptide Sequence Number=SeqID_76810
atggcgaactggagaccgacagtggggttgaagccgtatagagaaccgatggcgctggggcaagatggaggacaagctcggacgtggaggccgcagaggtacgcgcacgacgcaggcgtgagggaattaaaaatggattctacagaaccagatccgatttcaaagggtagagtttgggcaagacgtcgatggctcaacccaaatgatactggattcgatgtttcgaaagattactga

SEQ ID NO: 33436 - DNA, 528 bp, Zea mays
  Peptide Sequence Number=SeqID_76811
atgccgatgctgctccaccagccgcaactgctcctgaacgccagtgccgaccaccatctcccatggcgcatgagctccccaatctcctcttgccagggcgccgtcgctgagctcgctctgccccaaccatggacgccgtcgggccacccgtctcctatctcccctcgccctcatcctctagctgctgccccttcctataactggtggctgagtcttattccatggatgctggccatgctgccctccctggtgctcacctctgccccctgcgttggatggccggttgctcctgccctaggtttgtcaagcgctaactctactccatctatccctgctcgaatcttgctgattggccctgtgcagattatcctcatgcccgaccacggtacaacagcaaccatgaaaccccatcgtgtcgcgccctcgacgtgttcgatgaaataccgcagcgagctccaacttgatctgcacagcccctgcgcgacgtcacaaactccggtgaaacctcgctgcccttgctgctcttga

SEQ ID NO: 33437 - DNA, 327 bp, Zea mays
  Peptide Sequence Number=SeqID_76812
atggcgagagtagcttgtaccctctgtggcaagagactggaaggtggggtgctgtactctcggaaacatggcgggcaccatggcgagaataaccatacccttgagagtcttttctttagtcggctgtatgaggtctttgagacaaggacaggtgcatgtgagcccgataacttgggaggttctgcgacagctggtatcggagctgaattaagtataatacggccattcagttttgaatggatcgacgctcaaggtaaggtgtacctccgattgaaaggagatgaaagtacaagtgtgacgcaaaaagcgaatgccaagtcagcgtga

SEQ ID NO: 33438 - DNA, 423 bp, Zea mays
  Peptide Sequence Number=SeqID_76813
atggcgaactggagactgacagtggggttgaagccgtatagagaaccgatggcgctggggcaagatggaggacaagctcggacgtggagaagaacacataaggttctatgtgtgcaatttgctttttctgatgaaactgtactatctgagtcggttgagcgggcgatagatatgcgaatttacccaaacagaatcagatgcaccatcttgggtaaaacacaaaaagaggtttaccaacaagtggttatgttacaagttagtcaaaaccaacttgttgtaccatttttgacattgggcatgtcctctcagtaccatcggtatcttcggatccaagtcggcgtcacggcagaccagagtaatacgaaggttgatacaacgccgaaggtgtacgcaggaaagcttcggcgcgacaacaaaaagtga

SEQ ID NO: 33439 - DNA, 297 bp, Zea mays
  Peptide Sequence Number=SeqID_76814
atggacgtcgtcgggccacccgtctcctatctcccctcgccctcatcctctagctgctgccccttcctattcctggtggctgagtcttattccatggatgctggccgtgctgccctccctggtgctcacctctgccccctgcgttggatggccggttgctcctgccctagctcgttgtcgatgtcgtgcttcgtgcatcgcgtgttcgacgaaaatcccaagtccatggacagcacatgcacaactcaaatccgatcggccaggttgtttgatgtgtattttactcatttgatttag

SEQ ID NO: 33440 - DNA, 519 bp, Zea mays
  Peptide Sequence Number=SeqID_76815
atggctcggcgactggcgatccgggcccgcgagacagagagagagagggagcacgcgggcgaagtaactggcgccgacagatcggccccagcgggcagcgagcgagagagggatgcgtccaagctcggtaagatggggggcctgagcaccctgcggtcgaagcgagggagggatcctcaagggcccaactgggtcttatcaaggcgctgccaccgagatgtggtgccaaagggccttcgtcagagctcttggcaaaagtcccagtggttttctcatgggattttccatttttcgtcggcgatggtgctggaggagccttcgtgtgcggaggaccgcctccgagctcttgacgctgagcacttcggacagtctacgaccattgacctcgtgtgcgggcatcttagggttccacggtcaggggaattgtccgcccagatctcccggatgacgctcatcgtcggatgcatttgtgaactggaggtccgtcctctcgatgaggactcgatcgagcgggattga

SEQ ID NO: 33441 - DNA, 360 bp, Zea mays
  Peptide Sequence Number=SeqID_76816
atgggccggcgacccggttcttcctccggcgttcgagggagaggggcatcctccagctgtgcggaggaggcgtcctccagccatgcgggggaaggcgaactgctgctgcttggacagggtgcagctgtcaccggcctcgcggagggggcgaacattgacaacgcgggcccggggcgactgtcgcgccgcgcgcaggtcgggcatgtctgtggcccttcccgcgtcgccgactgcaccgggggatcgtccaagacgtcgtacgccgctagggcggcgttcgtgttcttggattgtcttgtcctctctctagaacgacgcctccacgtggaggccggtgccgacccgtccgctaggacttga

SEQ ID NO: 33442 - DNA, 81 bp, Zea mays
  Peptide Sequence Number=SeqID_76817
atgccaccgtgcggatcttcttcgagcgctgactgctcggattctggtgggggaggaggaagagacatgggtgtccgttga

SEQ ID NO: 33443 - DNA, 780 bp, Zea mays
  Peptide Sequence Number=SeqID_76818
atggataccgcctgggggatcgacccctttttaaaggcggctctccccactcgcatcctcaagcgccacgggcaaagtcttcaccgatgtgctccagggtcctccccctacgacaagggggctgggtcccacacgtcatgcaagggcaagcgacacctttggcaggcgaagcgggcgtcgtttcacctccgccatgatgaccgcgtcaaaaaagccgccccagagcactcgggctccgcgcccactactgatcaggggttcgaaggctggcccctcggaagggtcaaggcttcgtctacccaagggacgcaatctcgcctcgcccgagcccagcctcgggcgggaactgtagtcccggacgaagttacgtctcgcccgagggcctcctcaggcagtgggcacaccctcggcacgcccgaggcccagctcgggcaggcttcgtcgagaagcaaccttggccaaatcgcctctccaaccgaccgtgtcgaaaacagcgccgctcaccccgctccgactgctgtgccagccacccgggcaaggctgacaacagcaagttcagcctcgggcgcaacaggaagctctgcctcgcccgaccttaggctcggcctcgcgaggaggtctccgcctcgcccgaccccaagactcgggctcagcctcggcctcgggaggaatcacgtcctcgcccgaccccggcctcggcctcaggagaagtctccgcctcgcccgaccttgggctcggaccgactgtgccacaagggatacatcattaccctcccctag

SEQ ID NO: 33444 - DNA, 444 bp, Zea mays
  Peptide Sequence Number=SeqID_76819
atggcgtcagggggtggaccggtcgggccgaggggagaaccagacgccgcgcggggttcaacggtggtgtcgggtaccgtaattaggggtacccccaacactcctaaacacggcacggttcaggtcaaggcttcgtctacccaagggacgcgatctcgcctcgcccgagcccagcctcgggcgggaactgtagtcccggacgaagttacgtctcgcccgagggcctcctcaggaagtgggcgcaccctcggcacgcccaaggcccagctcgggcaggcttcgtcgagaagcaaccttggccaaatcgcctctccaaccgaccgtgtcgcaggaaaacaactccgctcaccccgctccgactactgtgccagccactcgggcaaggctgacaacagcaagttcagccttgggcgcaacaggaagctccgcctcgcccgaccttag

SEQ ID NO: 33445 - DNA, 2457 bp, Zea mays
  Peptide Sequence Number=SeqID_76820
atggacgcggagcttctggagctgcagcggcagctagaggcggcgcagagcgcgaggtccagcgtgcgcctgtcggagcggaacgtggtggagttggtgcggaagctgcaggagcgaggcatcatcgacttcgacctcctccacaccgtctccggcaaggagtacatcacatccgaccatttgaagcatgagattaagatggagatcaagaagagaggccgtgcatctctagttgacttatcagataccctgggggtggacctttaccatgttgagaggcagtcacagaaggtcgtctccgatgatcccactctaatgctgataaatggcgagatcatgtcacaatcttactgggacaccgtgacggaagagataaatgagaagcttcaggagcgcagtcagattgccttggcagagattgctgctcagttacatattggatccgagcttgtcatcagtatcctcgagccgcggcttggaactattgtgaaaggaaggctagaaggcggacagctatacactccagcgtatgtctcacggattactgctatggttcgtggtgctgcaaggggtataacagtgccaacaaacctgccatctgtttggaactccttgcaacaacagcttcatgagatgcatggtgctagtggagtttctgtggaaggttcattcttccaatccattttcaatggtttgctaaaagaaggtgctgtactgggatcagtccgtgcaggaggacagtggacaccagctgttttcgcccatgcccaaaaggagagtgttgatgcttttttctcacagaactcttacattgggtacgacgtgcttcagaaacttgcaattcctcaacctaaacagttcttggaggcccgatatccagatggtattgcattggatgctgtctttgttcatacttctgtggttgatatgctcgatactgcggttggtgatgcaattgagaatggacactggattgattctctttcagttcttccatcatatattagtggaccagatgcaaccaaaattttatctatctgtccatctctgcagaaggctatcaagtcttctaaagcagtggtatttggagagtcatgtgtcttcagtaacatgtttattaagggtatttttgaccgacttgagaaagatatggactcgtttggtattagacttagtgttggtcaaggaagacctgtgaatacgaatctgggtagtgagcacaagacagggtctggtcagcactcggacacaaaagatcttggtggtaatggcactagcagtaccggtgcttcatcagacagagggtcaaagaagaaaagggggaaagggacagggtctaccaaaggtggatcacttgaaaaggatgatgacaatgaagaaagcattcctgttaagggcaagaaatctcacaggaaaaacaaggatgctggtgcatctggtgacataaaacatggtggtaaaaaaacgtcagagaaaatgatagaggagaatgcaaatatctttcctgatgaattgatagaagaaaaggttttggctgttgctccagagttagaagagttgggaggctctgatgactcaaatgccccccttaaattgttgtcttctcacctgaggccaatgcttgttgactcatgggcaaagaaacggaacaccatgctgtcaggaaatgctgaaagaaggcgacgcttgctcgataatctgcagaagcagatagatgaggctgtcctggagatacaactctatgaaaaagctttggatgtatttgaggaagatcctactacttctggtatactacacaagcatcttctaagaagtatgggcactccaatagttgacaaagttttgattacattggataaggacaacaaattgaagaatggaatggaggttgaggatagcgaagatcatgtccaattgagcactgctgaccgaagctctctggccaaggatcttcctagtgcattgtcattgaaggctcaagctttaattgaagcattagagggaaagaggtttgattcatttatggatgccttaagagatatactggaggaaagtggcttgacatttaagaagcttgataaaaggttagagaggacaatgctgcattcctatcgcaaggatttgacagcacaagtttcatcagagaatgatcctgttgcctttcttccaaaagtcgttgctttacttttcctgcaggcatataataaggctattcaggcaccaggaagagctgttggtgctgttatcacactgctgaaggataagctgccagctgcaacctacaaggtattgactgattatcacagcactactgtgaaacttttagcactacaagctgctgctactgacgatgaagaagattgcacatcagaccgaatgcgagaaaggaaggaggatctggaagaaaggctgatgccagaactgaaatccctggtcctcggcacaaacaaagagtga

SEQ ID NO: 33446 - DNA, 312 bp, Zea mays
  Peptide Sequence Number=SeqID_76821
atggcgctgaggtacgtgctgcgctggcacaaacggacgtcgtggcgcctacgtggcaccgagctcggcgccatagatcttggcgccgagcttagtttcgccagcaggcccagcccgcaccacagctcgcggcgcacctgcgcggccgcggccgcgtcgatcgccgccctctgcgcctccatcgcctccagctcacgcttgcgcgcctcgcttctgtctccggctcgcggcgcctacaaggctgcaactgctgtttcccggggaggatgctcccgatgggcttcgctacctgaacgtcacatggagagatga

SEQ ID NO: 33447 - DNA, 2580 bp, Zea mays
  Peptide Sequence Number=SeqID_76822
atggccgagatgtgctcgcattattactcagcatacccgccgtttgaagtggcggaggaggatgcggacgaaggggcccttcggtgcgccgccggcctgagcagcgggcgcgatttggttgaggagtttgtggcgtacggggtgtggcctttggcgcatggctgggcgttgggcgaagtatgccctcgccagatgccttcccatggtggaaagctggtgcgaagtcccgccttcgcgttggatctgcatagccgcgatccggccgcctttatgcgtgaggcggaggatggggcggtgcggatcgtcggtcggtacgtgccgaagacagagggccagtgtagctgggatattcgcgggtctaatgaccgcttgaacagggtttttgagttgaaccatctgccttatggcggttatcccggccaagacgatgtggatcgtcgcgggaagaagccggtggtagagactggagacgaccccgcgccggcggccgccccatcctctaagaagaggaaactatgtattgctatgggaggactgggggtttctgatggttttgctagggaattgatgaggacatgcgcggccccggggggaaggatgtcttcgcccgagctccgggagtcttcggcgcggatgctgagggttaccgggggttggtggcctaggaatgttcctatcccctgcgcggccggcgaagacttttttacatctcgcatggttcgtgattggagagtgtttccttacgggcggaatattgctgctgttgtgtcggtagtgatggacaaggatcgtcagggagctacgcagaagcgccaggcggtcgtcaggcttcatgaggccaggccgaagaggccgcgggggactgcgaaggctgctgcccccggtggaagccagccaccgctggcggcgaagtcggccgcccctgcatccagcagggcgccggaggctgcgaaggcggctgccgccggtggttccaagtctgcgaaggccgcccctgtgtccagcagggtgtcggaggctgcgaaggcggcccgagagttgccaccgccgggcaagcgcgtcgccgacttcaccaccgacattagtgtggaagattatcttgttgggtcggacgaaggccaacttgttgttgttccgcctgccgtggcgaccacggcggttgccatggtgtccagggcaaagggcagtgctcttggtgccggtggcgagataccggcgctcactgccgtcagggacgaggcgggtgctgtgtcccgccggctgagggagctgaaaggggcattaagtcaggcggctgacttcgtagaccgcgcggcgtcgggggctcttacgacagttgtgtctgccgaagtcgagagacttcggacgcaacatgctgacgccgtccgggaaaagtcggccaccgacagtaagtgccgcaagctggcggataaggtggccgcgctggagggtgagaagactgacctccggcgccaactggcggaggagaggaaggaggctaatgaggccctcaccaaggcgcagtctgcgcaggcggaggccaatttggcgcgggcggacggcagtcttgccaggcagcgcgccgagcagttggaggagcggctcagcgctctacagacccgtgtggagagggccgaggcctcgacgcgcttggaggctgagcggacacgcaaacagcttatggatttataccatgagctgggcgcgcggaccgctgacttcgaagtgccggaccgggagcccggactttgctgcctcgagtggatacagaaggagttgctggcgcttcccgccatcgtggaggggtttatgtcctatgcctccctggtcacctgcgaggggacgatgaacgcgctctctcgcgaagggtgccggcactatgaggtcttcgaccaagctgatgaggatttcgagcgtgatatctataaggttgaggaccctgtggtgaaggaatccgcgggagccctctacgaccagatgtggggccctcacggtcgggaggtggtcagggagcgggccgagacggcgaggggtcaggcggcgcgtggcgagagggtggatgacttcggggctttgaacagcgcgctgcctgacccggagccgaacccggcagcggctgtgtccgaggccgccctggagccgcccccggaaaccgccgaaggcgttcctgatgcccccgcagccactgcggccagcggaggcccgtcgccaactaccgcgccaagggctgaggatcctgtgaaggtggcggcggagccgacagcggaggatcccgcgacggctgggtcttcgcaggttcaagattttgggcctgcgcacgcaaccgctactactaattttttggcggcttcgaccgtggatgatggtaataaatcggatgggtctgcatctaagttttctaattttggtgactctgggagctcggttgagtggactgaggagtcgtcggatgaggacttggactactttgcggccttggatgtggcagcggcggaggcttcgccgcatgctgcggatgctgaagttgtgcctggtccgagtactgggcgtaggcggcgaagggcagttgcgaagcgttga

SEQ ID NO: 33448 - DNA, 1179 bp, Zea mays
  Peptide Sequence Number=SeqID_76823
atgcggggggggggggtccagctccatcccgccgcccactctggaggagccgaaggtggtttttggtcggcggctccggctcttcatgagactgaggcagcgatcctgcgggagtgggaggtgcttgaggccaagcaccaacgcctcagcgactggcacacccagctggaggagcgcaccaaggcggcgtctcgccagttcgcctccgagcagtccgagcttgagcgggaccgcaaggattacaaaaaggacctccagaaggtgtacgcccgggagctggtggcgagccggaaggagaagaggttggccaagagggaggaggccttgaaccagagggaggaggtcttcacagagctccaggccaagctgagtgccatgaacgaaatcctagaagagcagcggatccagcagaccgtggctgtggagaggatcaaaaaatgggagcgggaggacaaggccagcaacattgccctgaccgaggagaacctcaaggagaaggatgcgtccctggataggcgggaggcagatctcgcctggcgggagaaggatctcgccttcagggaggaaatgtttgaaaggcgggataagttgctggccgagcatgagctcgaggcagaggagaaggagaaaaagctagaagagcggatccggcagttccatgcgacgcaggcggcaccgagcccccaggcggtggaggcgacgaagaaagcacttgaagatctccaggcggagcatcgcgccggggtccagcgcatcgccgcatgggccggcgaggcgagcacggctctggtgccgctagggatgagtcccatcccagtgtcggagctgccgacgtccatctccgatgcgctcccgattctcggtgcccgcctggaggccgagggcagcaggctctgccgggcggtaatcgagtatatcttgacatgcttccggagccacgacccggctatctccttggagccggacctgcatgatttagcctgggaaaccaagccttatgcccggacctacaagatcacagctccaaatactagggcacccgttgtagagtggtggaggtgcaggcttagggtacgggaccaggctaagcggctacacagctccggaccactccaggaaacaagcgcccattctctagatccggacccgcaggttgtcggaccccctgtatcaggatag

SEQ ID NO: 33449 - DNA, 516 bp, Zea mays
  Peptide Sequence Number=SeqID_76824
atggctcgtcccagcctcgggcgactactctgggccagcgacagcacccgacccctccacgtggacggttccggggccgccacgtggctagagaagatgatatactccaaggtatcaacactgagtctggacccccatgggaaagtgtcggacccctgtatagacagaccgggcctccgggtaaggtctaggacccccacgggcgcaaactggacccctaggatggggtccggacccctctatgtgggatccgggccgctcacagcagggtcccgagattctgggacagagaatacccaggccttaatcgaggccagacgggggtccggagccgacacgtgtccggaccttatcgtttacgcttctgctccccgcccaggtggagacccgatgctgtcgcgtggcctactgcacgtgacgcgatgtgccgcctccacatttattgagccatgtccattccactgtcaggggcggaccgtctggaccaggggcgtggaccgtccgcggtcggcataa

SEQ ID NO: 33450 - DNA, 1401 bp, Zea mays
  Peptide Sequence Number=SeqID_76825
atggcgctcggcggcggcatggcagtggtcactgtagttagggacaacatcgtcgtcatgctgctgggcgccgccgagtgcgacgatatcgccgtcattgtcaactgccccaaccagaacgacctggctgcgacatctgccacaccatctcgagttcggtctccccatcactcgctcgcccgcgctctctgcgcccccgccgccaaacccgctaattcgctccagtccgccgcccgcgcggctgctccaacgaaggaaagtccgaccccgccgtcgccatccccgcgcggctgctccaaggaaggaaactctaatcccactatacccgtccccgctctcctctctcgagccatcatggaaggttcactctctctcgccatccccgcgcggctgctccaaggaaggaaggttcgaccccgccatcgccatcctcgcgcggctgccttcccctctcgccatccccgcacggctgctccaaggaaggaaggtccgaccccgccatctccgcagtgggagattccgatcctttgcgcccgcgcgcgccatggagccggtgtcccggaagcgcaagagcgcgccccggtgtgctccgccaccaggtccctccaagatttggcctcccgcaagcgcgcttaccggggctccgagccgcagcaatcccactgcaccgatgcccccgtcccagccgtggtgatgacggcccccgcggcgagcggcgcatcggcgtcagcgagggtcctctcggggcgcgagctcaagcggaaggtgggctgcatcgacaacgccatgcggatcgggcggcggaagcggctggagagcgagtacgacctcggcgatgagatcgggcacggcaagttcgggtccgtccgcgtctgccgccccaaggccgggacccggggcgaggaggagttcgcctgcaaggccctgccaaagaacggcgagcgccgcgccgccaatgtgatcaaggagctcatggtggtcctcaagtactgccacgagatgggcatcgtgcatagggacgtcaagccggagaatgttctgctcaccaggtctagaaggttgaagcttgcagattttggattggccgtgcgagttgctgatgtccttcaaaatgctgccaggtatctggaccaacatgaacaagctcatgctctagcacagcccgacaaaagccatcttcttgttaaatgggcagatagcctgatacacaacgaactaaatgatccaatgtctgccaagtactttggtggtggtatgaagataactccaatagctgatccgtctagcaacaatcttgaggttgttattctttatgatttcaaatggtactttcttctgaagcaacacagtctctatggaggcacacatctatcagtgaatggtgtttcatcaatgaggtaa

SEQ ID NO: 33451 - DNA, 498 bp, Zea mays
  Peptide Sequence Number=SeqID_76826
atgggggtaaacaaacaggcccttaggcggagtggagcactcgaagccgagaaggaagaaaaggtttgggctccacttgtccctctcataaagtttcttggttcttgtgtcgaagcatgtgatgaaggtggctggacaacacgattatgggtattttcttatcgagtgatacaagacattgttctgccactgattacacctcttaatctattatgttcattgtgccatgcacttggtgttcctatggacagacttgtgaaagccgcagattcagtttcgaaatatgaacaatacctagaggccaaaaatcttcgaaagaccctaggtggtggaatgaggcaggttggagttctgtgtgctgattctcatacactatgggaaagcttgctgtttcaggttgcagttttcatagcctacttgagacattgcagtgtcctacaactgaacttgaaactgtcttcaacctgctacttcaggctaaacttgaaattgtcttga

SEQ ID NO: 33452 - DNA, 348 bp, Zea mays
  Peptide Sequence Number=SeqID_76827
atggatcctcaaaagttggagtcagatttgataaacagatccctggggccattgatcttggaggcagttgtgagcttgatcatggcctattatgttcagtttgcctctgaagaaagtcaacaggtgcctgtaatcctgtttgtgaaggatgttgagaaaatatgtggaaataattacacctaccatggtctaaagaataagcttgaaagtttcccagctggagttttattgttgggtcccagattcagacagatgctcggaaagataagtcaaacaatgggtctccttggctcaagttctcatacagccaagcagcaatacttgaccttgcatttcaggtgcagttaa

SEQ ID NO: 33453 - DNA, 150 bp, Zea mays
  Peptide Sequence Number=SeqID_76828
atggcgggggcgggtgggggcgaggatgccggagagcggacgagggcgagaatggagcaaccaggtcgccggcagatgcaacagcaccatcgcgtcaagggctgccacggtcccgccgtcgctgaccatgccgcgcggcgaactcgctga

SEQ ID NO: 33454 - DNA, 933 bp, Zea mays
  Peptide Sequence Number=SeqID_76829
atgcgcctcatagacttcccgagcttcatccgcaccacggacccggacgacgcggtgctcgccctcgtcctgcgctcaatggagtgccaccgcaccgtcccatccgccgtcatattccacacactggaggagatggagagccaggtcatgagcgcgttgtcggccatcctgccacctgcctacgccatcgggccgctaccgctgctcctctccggcgccggcggaggcggtgatccggccatccacgtgtcaggctcgtccaccagcctttccaaggagaaccgcgcttgcctagagtggatcgacggcaagcggcataactcggtgctgttcgcgagcttcgggagcctagcgaagctggcgcacgagcagttggtagagctcgcgtgggggctggccaacagcggctacgagttcctgtgggtgatcaggagcgaccagcaggggctggtcgacggcggagccgtcctgcctccggagttcttggcggagacggaggggagaggctgcgtgacgagctggtgcccgcaggaggcggtgctccggcatgacgcggtcggggccttcctgacgcactgcgggtggaactcgatgctgcagagcgtctgcgccggggtgcccatgctgtgctggccggtcgcggccgatcagcaaactaacagcaggctcgcgtgcacagagtggcgcgtcggcgtggagctcggcgagaacgccagccgggaggaggtggagacggcgatacgccaggtgatgggaggggagcgaggggaggagctcaggaggtcggccatggagtggaaggagaaggccgctcttgcggcacgaccaggtgggtcgtcttgggcaaatctggagaaggtagctaacgaggtgcttgctcctctgatagcagcgcacagaaaagagtgtgatgatgcaatggaactatcataa

SEQ ID NO: 33455 - DNA, 126 bp, Zea mays
  Peptide Sequence Number=SeqID_76830
atggcagaacagcacatgctttcgttctctcccgcgctttatcggaagctcctaaagccgttcgtcgctgatgctggcggctgcggcgatcgcgcgatagcgggaggggcgccagaggaggagtga

SEQ ID NO: 33456 - DNA, 1710 bp, Zea mays
  Peptide Sequence Number=SeqID_76831
atgccttcgattgcgccaccgtcttcctccgtcgctgccctcacccgtcaaccggtgcaattcttcaaagggtgcagtgtatccaaggagacaaagggaccggtccgcagtttcttcactgcaaattcaaagagcaccaaggtgaaatcagcgggcttgaaagtagcatcatccttcaaaaatgatggtggttatccagctggcggtgtctcttggaaggacgacactctattgccaaaaagcacaaccattcgtggccaggaccattcggttgctgaccctgtactcccaatggattccatgattacgccagaaatcctctctgctaatgtggaacgtgttatagacatgtttgcagatgatgacactgatactgaacttgatttggatagcccgacagagggcttcacatcaattgcagaagccattgaggacatacagcaaggaaaacttgtgattgttgttgatgatgaatcaagggaaaatgaaggagatctgataatggctgcctccttggttaccccagaggctatggcttttatagtaaggcatgggacaggaattgtttgtgtcagcatgaaagaagatgatctggaaagactgagccttcctttgatggttaccacaaaagaaaatgaggagaagctatgcactgctttcactgttacagtgatgatgactttgcaacaattatgttctattgaattgaattctaaagatgcaaaagagggcacaactactggggtatctgccaaggacagggcaaaaacggtcatgactcttgcatctcctgactctaagcctgaggacctcaaccgccctggtcatattttccctttgaaatacagagaagggggtgttctgaaacgagctggacacaccgaggcatctgttgaccttgccatgttggctggattacctcctgttgctgtcctttgtgaaattgtggatgatgcagatggttctatggctcgcctaccaaagttgcgtgtctttgctgaaaaggagaacttaaagattatatctattgctgacttgattaggtataggaggaaaagagacaggctaattgaacgcgcttctgttgcacgcttgcctttgaaatggggcaatgtccatgcatattgctacaaatctgttattgatggcattgagcatattgccatggtgaaaggtgatattggtgacggccaagacattttggtgagggtgcactctgagtgcctcacaggcgacatttttggatccgcaagatgtgattgtggcgaccagcttgcgatggcaatggagatgattgagaaggctggaaggggtgtattagtctatctccgtggacatgaaggaaggggtattggtctgggccacaagcttcgtgcttataacttacaggatgatgggcgtgatactgtggaagctaatgaggaacttggtcttcctgtggactcacgggaatacgggattggcgcacagatattgcgggatctaggagtccgttcaatgaagctgatgactaataaccctgcgaaatatagtggtctcaagggctatggattgagcattgcgggcagggtgcccttgattacgccaattaccagtgagaaccgtaggtacctggagactaaaagaacaaagatgggacatgtatatgggttggccaatgcgcaggccaacctagcaaatggcagccagagcacagaagagaatcattag

SEQ ID NO: 33457 - DNA, 186 bp, Zea mays
  Peptide Sequence Number=SeqID_76832
atgaactttgcaaagctagattctattctagtgcgtaaggctagaaggaatagggtcaataataaggaagtaggctgtggaaggacacctgaccacacaaaatggataggtttttttagcagcaaacaagactttatcgatgtagttgagaaaacagaaactagaaaaatgcagatattcggataa

SEQ ID NO: 33458 - DNA, 462 bp, Zea mays
  Peptide Sequence Number=SeqID_76833
atgggcctgccgctggagctgtaccggtgcgacctctgccgcatccgtacacagcacaggaacaggaaccagacggaggatcagcatcaacggttctcgtggcgacggcgagtcggcgaccgctatggatgctccagcaggtcagcgttctcggcggaccccaggaagccgatcaagaagcctgaaaagggccgtgaagaaagagcggtgcagcggccggagccggtgctcacgacgttgtctaaggaaacgaggggggtggtgcagcctgccaagccgcggttcaaggtgaagaaggtgcggcggtacaagttactcgcggagggtgacatggtggataggatcatagtgaagctccccaaggagatagcacaacctagcttcagcaacacgtcattgttcatgacacaaatactcggccacgttgttaaagcttcaagttttcatgacgactttttatag

SEQ ID NO: 33459 - DNA, 1632 bp, Zea mays
  Peptide Sequence Number=SeqID_76834
atgaaagcacagatcagcaacgggcgtggtggttgcctggctctcaagcttgctgaacacgaagggcgaggagggaatttatccaagcttttacctctgttcttaactgaacaatcacttcatgaagctaaagcagatcctgccaaggcaactgctaatggtgttccaaatggtactggtcacagttacagtggaactgtaccaagccaacaaaattcagcactgacgcctgatggaaattatagggcgcccttgttaggtggagttccttctgctggttacctggacacgacatatgggtatgacagcacaggggcacaatttgcatggtatgatggctctgcttatgcaaatggacagcaaagaacaaccacaactaatcgttttccatcctcgtcattcagtggtaatggttcatcagcaagatatcagaacaagagctccaccacgcagcagatgggtatgcagaatagaagacctacaactacatcagcagctcctacctatcccaataggatgtaccctagcccccgaccgtacacccagtatgggaattcagtaaaaactggtcttccctacgggagtaacggttacgattccaggataaatggtcgatgtggtcttggtatggataacaggtacaggcccagggcatgtagtggatactatggttatggcaatgagagtcaggatggaacaattgagttaaacagaggtcctagatctggtcggttcaagaaccagaaattgtacggtcatactgtcactattgatccagtcatggtacagaaaaggcgtatatatgacatcactaatgttcttgaagggataggactgatagaaaagaagcttaagaacaacatccgttggaaaggagtcgacgactctcgacccggagaatttagtgatgatatgtccattttacagatgggaagggtcagggagaagctcgatatcgactttgttatatccaccggggacaacttctacaagaacggcctcaagggcgtgcgcgaccaggcatttaaagaatcgttcatggatatctacatagctcaaagcttacagaagccatggtactcagaacttgtggacttcttctttgtcgacaccactccattccaactggagtattggactcaccctggcaagcatcgttatgactggagaggggtggcgcctcgaggcaagtacatagccaatttgctgaaggatatggatgtggctatgaagagatcaactgcaaggtggaagattgtggttgggcatcacaccatgaggagtgtgagtgagcacggggacaccgaggagcttctggaattactacttccagtcctcaaggacaatggcgtcgacttctacatcaatggacacgatcactgcctggagcacattagcagcagagacagtccactccagtatttgacgagcagaggcggttccaaggcatggagaggagtcttccatccaaacaaggacaagctccggttcttctacgacgggcaagggttcatgtccctccagctaaaccaagaccagactcacttcatcttttacgacgttttcgggaacatactgtaccgatggagctcgagacatcctcagtcctccacctatctcgatgaggaataa

SEQ ID NO: 33460 - DNA, 654 bp, Zea mays
  Peptide Sequence Number=SeqID_76835
atgcagaatgaggatggaacaaaggtcgaatgcagggtgtggaaccccttccgttccaagttggctgctgctgtgcttggtggtgttgacaacatctggattgctcctggtacccatgtgttgtatgtatctcatgtgtctgatattgtagggccgtctacgctgttgagttctctcaggagtggaagagaccttgtcaacatggcaaagaagaggaccaatgtgatccccattattgaggatgtcaggcatccggcaaggtaccagatgttggttggcatggttgatgttatcttctctgatgttgcacagccaaaccagacacatgaaaatagcgaggatattgtttttcttcagccattggacaacgaaatctacattttggtgaaactcgtccttacccaatatttgattcctcggcttcaagcacaggacagtaagagagactatctagaccgtagcagtggaagtggagttggattgtacggttgtaccgaatgtgaagctgacgttgtcgcgttgatagaggaggaagtgccgcgtgttggggaagcggcacaccggttcgagtggataggcggcgaggttctccttttcctccctcttcagtcgcaacaaattctcaacgggaacacctccccgtgctcacgatga

SEQ ID NO: 33461 - DNA, 513 bp, Zea mays
  Peptide Sequence Number=SeqID_76836
atgggttcgcctgggtccgccaatggcagacgcggcgagtacgtgaggatccctgaggaggtggaggtggcgtccaagggggagggagatgccgcggcggccatcaaggcggctgtggcagcggagtgcccgagggtgctgcggtgccgcgcgatccggtggtgggccaaggtcgctgtgcttgggatcttccttgcaggggccgaagctgctgtcgtggtcttcctcggcccgctcgttattaagaaggacgtcgttgtccaaagagcctatttagcattattcccaactgaaacacacaaggagaagtgctttgccaattctctaagttttgacatccgccaatgcctcactgttatgaagggaatatctaattcaaaatttgtcgagcttaagtttcttcttccaatccattgtcggtggcttgaaaaggcatcgagtgctcaggaaactgaaatgctcctcattgtggcaccattctgtgctgctgctagagttaacccaggattttga

SEQ ID NO: 33462 - DNA, 378 bp, Zea mays
  Peptide Sequence Number=SeqID_76837
atggctccagcagcgtgcaaacaaaaaggagcggacatgtacaagccccggggcatgacccgtagaccggcctgcaaacagcagcagggttcttcgttgctctttggacggctggcggtgcccgggtgggtcggtgggtcatcagccggtcagaggaggagaggggtggacgatgacggtggtggcgcgaggggagggattgatggcggtgggaacgcgaggaggggagggctaaaggatgatcaaataatattgttcgttagatttgaagtgaacggaacggagcgtgactgtgagagcgggatgggaacagagcggctccgttcggttgattttttggagcggaatggttccagatctgaggagaatattccctaa

SEQ ID NO: 33463 - DNA, 348 bp, Zea mays
  Peptide Sequence Number=SeqID_76838
atgggcaagagcaacaaacgcaagcgcgagccgactcctccatccgaggacttcgcgtcgtccgacgattcggacgactctcaagggattgcctacatccgggccatcgagcgctccgggctcaagggctcggatgagtcggagtactcctcggacgagggggactcgcccgaggaggacagcgatggtgacgacgacgacaacgacgacgacggaggcgatggcagcgacgacggtgacggcgacggcaggggcggcaacggcgacggcaagggtggcgacggcggcagcaacaggggcagcaacggcggcggcagcagcatgggcagcaacaaggccagtggctag

SEQ ID NO: 33464 - DNA, 432 bp, Zea mays
  Peptide Sequence Number=SeqID_76839
atgggcaagaacaacaaacgcaagcacgagccgactcctccatcagaggactttggcgactcggaatactcagaggaggagttctcctctgagtccgaggggtctccggctcccatctctcccccagcgtcgtccgatgactcggacgactctcaggggattgccgcggaggtctggacttacatccgggccgtcgagcgctccgggctcgagggctcggatgagtcggagtactcctcggacgaggaggactcgcccgaggaggatggcgaaggtgacgacgacgacgaggacgacggaggcgacggcagcgacgacggtgacggcggcagcaggggcggcaacggcggcagcaggggcggcgacgacggcagcagcaggggcagcaacggcgacgacggcagcaaaggcagcaatagggccagtggctag

SEQ ID NO: 33465 - DNA, 273 bp, Zea mays
  Peptide Sequence Number=SeqID_76840
atggcggcgcggatgctcatcgccgatccgcccagaatactacgccgtcaagcccccaagccccatgcacccacctctccagccactcctcccgctgccaaaaagccagatctggttgagcgcactgcagatttcgcggtaattgtttcatcgagactgccgtctccagcgcccggtggaccgccgccggtgtgcagcgacgacatagaactcgtcccagagactccacagttcaggtttaattataaaactaattacacagataaaggctaa

SEQ ID NO: 33466 - DNA, 408 bp, Zea mays
  Peptide Sequence Number=SeqID_76841
atggcggttacatgcgcccgtctggctgcagcggctcccttaccaggcgctctacgcggaggtactgaagagcttgctggcagttgcattctgcttcctatagtggggaaggggaatgctgccgaacatgctagctccattatgtttgccatgaaaaacaaattggacattacgttaggagttgctatagggtcgtcaacacagatacaactaccctgcagactctcgagatcaatggtgcaaatactatgccagagtatgctttatacagttgtacccaatgaaaatggttacttatgttggataacgttcctgactgcgttatgttgtttcctggacagcggtgttctgttatttcctggacatgcggctataggagactcccgaggaaaaacgaatgtgttctga

SEQ ID NO: 33467 - DNA, 837 bp, Zea mays
  Peptide Sequence Number=SeqID_76842
atggatgacgacgacgtgtctcccgacgcccgcgacgtctacgtcgccaacgccaccgtatcctcctacttcgccgcctccgacgtcgcctccaccgaccgtctctttgcggaggtctccaccgacgtcgccgatgtcgtcacctggaccaccatggtcgtcggccacgccagttccggcggcctgggccgggcgaggcacttcttcgacgccatgcccgagagaaacgtcgtatcctggaacgcgatgctgcgtgcgtacgcctgcgccgggatgctcaccgaggcgcgggacctgttcgacgcaatgcctaccaggaacgccgccacctggagctgcatgatcagtgacctcgtgctgtcgggacgctgctgggaggcgctgcatgatcaggggctcttcggtgacatggtccgcagcagcggcatcgtgctgaatgagcccgcgctggagctgcatggggcgatgagtgttgtcctcgcctccgctatcgtcaacatgtacgggaaatgtgggggtatccacagtgccatcagggccttgtatttcgtcaagagcatgctcgtggagccacaccctggcttatggggcgcactagctagcgcctgcaagatgcatggcaaggttgagcttggtgaggaggttgccaagaagctcattgaactggagcctcgccatggcagccgatacatcctgctgtcaaacttgtatggctctgtgaatagatgggatgacatgacctctgtgcgtaagatcctcaaaaggagcaaggtgcccaaaggcactggcaatgcagtggttgggatgacatcggcatcctgtgtgtcgaatggttga

SEQ ID NO: 33468 - DNA, 2058 bp, Zea mays
  Peptide Sequence Number=SeqID_76843
atggcgaccacgaccttccccacctcgaccccattcttcgcggcccaccacggtccccgccggagccgaccctccatctccgccgcggtctacgcccgcggccgccgatggcgcccgctgcgggtggcgtgcgagaaggtggtaggcatcgacctgggcaccaccaactccgcggtggccgctatggagggcggcaagcccacgattgttaccaacgcagagggggcgcggaccacgccctcggtggtggcgtacaccaagtccggcgaccgcctcgttggccagatcgccaagcgccaggccgtggtcaacccggagaacaccttcttctccgtcaagcgcttcatcggccgcaagatgaacgaggtcgacgaggagtccaagcaggtctcgtatctcgtcatcagggacgacaacggcaacgtcaagctcgattgcccggcgattggcaagcagttcgcagctgaggagatctccgcacaggtgctgagaaagctggtggatgatgcatcaaagtttttgaatgacaaggtcacaaaggcagtgatcacagtccctgcttacttcaacgattcccaaaggacagcaaccaaagatgctggccgcattgctgggctggagcatatggttttgagaaaaaagaacaatgaaacaattctggtttttgacctcggaggtggcaccttcgatgtttcagttcttgaagtcggtgatggtgttttcgaggtgctgtctacatcaggtgacactcaccttggtggtgatgactttgacaagaatccactatttgtagaatatgttaaatttagtggggtcaaagagagaattgtagattggctcgctgggaacttcaagaatgatgagggtattgatttgctaaaagataagcaagcactgcagcgattgacagaagcagctgagaaggcaaagatggaactgtcatctttgacccaaacaaacatgagcttgccttttattacagctactgcagatggtcccaagcatattgagactactcttaccagggctaaatttgaagagctatgctcagatctccttgacaggctgaggacccctgtggacaatgcccttagagatgcaaagttgcaattcaaagatattgatgaggttattcttgttggtggctcaactagaataccagctgttcaggagcttgtcaagaaaatgacaggaaaggaccccaatgtgacagtcaaccctgatgaggttgttgcacttggagcagctgtgcaggctggagttctgtctggtgatgttagcgacattgtacttcttgatgtgacccccttgtccctaggtttggagacactgggtggtgtcatgaccaagattatcccacggaatacaaccttgcctacctcaaagtcggaagttttctcaacagcagctgatggccagactagtgtggagatcaatgttctccaaggagaaagagagtttgtgagagacaacaagtctattggtagcttccggcttgatggaatccctcctgccccacgtggtgtaccacagatcgaagtcaagtttgatattgatgctaacggtatcctctctgtcagtgctgtggacaagggtacagggaagaagcaggatatcacaattactggtgctagcactctgccaaaggacgaggtggagaggatggttggcgaagctgagaagtttgcaaaggaggacaaggagaagcgagacgccattgacaccaagaaccaagccgagtcggtcatctaccagaccgagaagcaactgaaggaactaggggacaaggtcccaggtgacgtcaaggggaaagtcgagtcgaagctgcaagagctcaaggatgctgttgctggtggctccacgcagacgatgaaggacgccatgagtgcgttgaaccaggaagtcatgcagatcgggcaggccctctacagccagcagggtgccccaggcgcaggacctggtgcagctgatgcttcttctgctggttcagcgggcacttctgagaagccaggtgacggaggcgatgtgattgacgcagattttactgacagcaaatga

SEQ ID NO: 33469 - DNA, 324 bp, Zea mays
  Peptide Sequence Number=SeqID_76844
atggactcgaacatcccttatggtgacacgcccacgaataaagtggagatcatgcttcgtgccctggtgctggacaaggttgatagagaggtagacaaggtactcttggtcaggggactatggagctccttcaagagctggtggaaccagaacgcctcaaccacaccattcgccagcgcccaacatttcagcctcagcgctcgagtgagagaccacatgttgccgcttcgacaaccaagagacgtgattgctccaaagaacgctgtagccagaggtggccctacatgtgttcgtgttacggctgcgttgtggtggaaggggtag

SEQ ID NO: 33470 - DNA, 459 bp, Zea mays
  Peptide Sequence Number=SeqID_76845
atggcgcctcctgttgacgtggctggtctgcgccctaggttgggcgatgtggaagctcctccgaagccgaggtcgagtctgtcttccgtggctgaggtcgagtccgagcccctgggtcgggcgaggcggaggccgtcggctgaggccagggcgaagtccgagccctggggtcgggcgaagcggagttcgtcgtcttctggggctgagcccgagtccgagccctgggtcgggcggagcggacccgagtccgagccctgggtcgggcagagcggagttcgccgtcttccgggacttagcccgagtccaagccctgggtcgggtggagcggagttcgccgtcttccgggacttagcccaagtccgagccctgggtcgggcggagcggagcggcgctgtccttctgtcaggtcggtcagtggagcggcgaagtgacggcggtcacttcggctctgccgactag

SEQ ID NO: 33471 - DNA, 246 bp, Zea mays
  Peptide Sequence Number=SeqID_76846
atggcgcggctcgcgtggacgcgcctccccaccgccgacggggagggggcgggcccctccacttccgaggccgcggacgacgaactcttatcgggcgctgccatagagagcctcgactacgaggtcatcgagaactacgcgtaccgggaggagcaggcgcagcggagcaagttctgggtgccctactacgtcatgctcaagtggctgttcgctctgctgatcggcgttggtgagcactctgtttga

SEQ ID NO: 33472 - DNA, 465 bp, Zea mays
  Peptide Sequence Number=SeqID_76847
atggtgagagaacgaagaacacaaacaaacacaatgagcaagaacacaagagacacaagatttatcccgaggttcggtcacaccaccaaggtgccctacttcctcgttgaggcgcccacaaagagctgggtctctttcaaccctaatcctccctttgccgaccacaaaggtcaagcccacacaataatctttgctcaaacgagcggggccggttcaaccgcctgggggtcacagtggcagccagtctgccagtcaggaggtcagaccggtcaggtgaccctgacaccggttgaacctcccctaggaccggttcaaccggttttgaccagtgaggtccggggaaaataccccggccgaactttccctggatactggttgaacctctctggaccccggttgaacttgccctggaccccggttgaacctctctggaccccggttgaacttgccctggaccccggttga

SEQ ID NO: 33473 - DNA, 297 bp, Zea mays
  Peptide Sequence Number=SeqID_76848
atggctgctgtaccaaagatgaagatgtcaactgaataccatttcccatggtacagtgtctgcaccggatcagaccgccagcgcggctgtcttcaccgccgacgaccgatcttcgccgtgattcgcgccaccgccgttgtgattcacgtcgacgatgacccgataaggccgccaagtaaaagccatgcacctggggataactccggtgactcaccgccgtacccctcgtgctccgcggctgtggcagataagttcaccgacgagagccgccgtccgaccgtgcgccgcgtgtcttaa

SEQ ID NO: 33474 - DNA, 525 bp, Zea mays
  Peptide Sequence Number=SeqID_76849
atggccactaccaccgcattgaagtcgttgttgagcacgtggatcttgaaccaggaggggatgaacgagattctggagttctacaaccttcagatcgggcatctcacccctaactccatcctcaccctctcgacctttgtctaccaggcattctggtggtgttcacactatttgggggctgccatcgaggccacaattggtgtccttgtagcgatagtaggcgcgggcttgaggtctgctggtgatgagacgaatgtcgaggagtcgtcgaaaacagtcctggttggcgctaccggggatgcatctgcgagagctgacagacccgcaaatgaggaccctccctatccaaacgctgaaacgcatcagcgccataggagatatgaagggggcttgcatagagtaaaaaacactcgttcaaatgtgacgtctaatgtgggagaccctttcagtgggagaccctcgttcaaatgtgggagtaattggagccaggcgtccaggagtcccacatggtatcgacgagtatga

SEQ ID NO: 33475 - DNA, 1191 bp, Zea mays
  Peptide Sequence Number=SeqID_76850
atggggtgtcagtctttgcatagtttattgtcttcttatcgtgctaatcatagccagtataagatctttgaagcctgtcttatatctttggtaacatccacgatttcctttgtgttgccactactgaggaaatgcagcccatgccctaagttagaaactaattctggcatagaatgccctcatccacctggcacagatgggaattttgttaacttctattgttcacaagatagagagtacaatgatttagcaaccattttcttcaatactcaggatgatgcaatacgtaatcttttcagtgcaaaaacatttcatgaatacagtgcacaaagcctgatcactttcctgtttttgcaggtcatgttttatttcttggctgttgtgacatttggaactgcagttccggctggccagttcgttcccggaataatgattggatctacatatggaaggcttgttggaatgtttgttgtcaagttctataagaaactaaacattgaggagggcacgtatgcactccttggtgctgcatcgtttcttggaggttcaatgagaatgactgtatctttatgtgttatcatggttgagattacaaacaacttgaaactcttgccattgatcatgcttgttcttctggtttctaaggttgtctgcctaccacgtgtttcaagggttgttgatatcatttctgttttgcgaactaacaagcataatggtttccctgttgttgaccgtgggcagaatggcgagtcacttgtcataggtctcatacttcgtagccacttattggtacttctacaagctaaagtagatttccagaacagtgctttcccctgtgggccaggcgtactgaacaggcacaattttagtgactttgttaaaccagcatcaagtaaaggaaagtcaattgatgatattcatttgacagaggatgaactggggttgtatttggatcttgccccatttttaaatccttcaccatacatagtgccagaggacatgtcgttggcgaaggtgtacaatctcttccgtcaacttggattgagacatatatttgttgttcctaggccttctcgtgttgtaggattgataaccagaaaagatttattacttgaggaggataacaacaatgtgatgccggagctccaatcgacgagtgggcttgctgaacggcaaaatgctcgggggtaa

SEQ ID NO: 33476 - DNA, 993 bp, Zea mays
  Peptide Sequence Number=SeqID_76851
atgacgacgaaatgcaagaacaagcagccaacattgaactccagaagtttcagaatagagaaggcccatttagcaagaagcttgcaaggacttttgaaaacttcgattataatccaggtgcacactaagaagagaaataggcttactacagaccgcctcaacaagttggtctacattcagttcaacaacaggctgattaataagagaacaaagatcaagtccaagaaaattactgatgttctcttgtctagtggtacaactgaagctcaaggtttcctccaagagaatggagatgattgtgcattagtttcctttagagatgacgaagatgaggaagaagtcatggaaggtgcagggataccttggtctgtgcttggagatgcagtgggagcagaagaacaactagagttgcgtagaagtgcaagggctatcctatgctgctggtcagtacttaatggatgggagaaggcagtgcttgaggattcaatgatcagcagatctgcaaagacaaaggacctaagccctctgcctggttggaccctccttgacgccctccccttcatcgttgccatcgttggatctgtcactgtcgcagccttctcggccggatccgtcgttgttatggccttttcggctagatcctccgtctctttggccatatcgtcgtcttcatggctggatcagtcgatgtcgtggccttcccggccagacccgtcgctgcctcttctgttctgtcgtcgccacctcccctggtcagaggccgaagtgacccctctggcgggcgcgaccaccctgatcaacatagacctcgttggctcctaccttcggctcttctccaatctcatcgtttgtggtgaccgttgtgactgggggtggagggctcctccgctcttgcctccaaggctcctcatcgggcaaccaactctgacggttgtcgccgacaccgcaacgacggtcgtgggggcagtgcccctcacaatggtgctcccctag

SEQ ID NO: 33477 - DNA, 600 bp, Zea mays
  Peptide Sequence Number=SeqID_76852
atgcacatcctcttcataccatctttcttctccacaaataacactagggctgcccaaggcgaggggcattgggagctggctgatgctgagccgctttctttgggcaatgatttgcctaatggccttgttccccatagtggaaacatgtgcggcctcctccttgcactggaaatgcttggttgttctggttggttgctggggcaggaaggcgaggtgcctggttgctctgacactggtactgatttcctccctgtgggttgttctgacggtactgctgctgctgctgctgaggaaactgcctctggtactgctgctgctggttctggcgctgatgctgtcatgattgctctgtcgatcaaatgctggaaggtggggaaagtgtggttcatcagctggcacatggtaatgatgaaagttatccctgaactcctcctaggttatggcttcacggtcggcatgggtggcgaggcacttgtggcatctaaacttgcaccagaggttgaggtgcggattgctgttgctgcacctgctgcatcgctgctaaagtctaaccaatcgcttggactacttgagtttgcatcaggaacatctgctcaatag

SEQ ID NO: 33478 - DNA, 546 bp, Zea mays
  Peptide Sequence Number=SeqID_76853
gagcagcaggactcttccccctcgcctcagcaggaggtggagtctgggagtcagccttcccctgcacctcagccagagagcctcgtgcagtaccacagggcatccctactgctggaggagaccttgacggagacgacgacaatgacgctggtgactaccagcatcgtcacagattatacccggatcaatgggaggctacttgcttgcgggatagctgatggcctcgacctgaagtactaccctcgttgttcgaccggcagtgttggaggtgtgattgtctcgcccgttggtgagggcaatcctaggctgaacagcatggtcaacctggtcgctgtgctcaacaccgagctggaccacgcccttggcaagttgggcaacgtttgggcggaggttatggaattgcgtgttgagcgcgtagcgcgccactatcaggatggtggttctcccgatcctgtcgggattcagcacccttatcattcgccgctccgtggtcgctttgattacgacacccctgagtgcagaacccagatagatttagagccatag

SEQ ID NO: 33479 - DNA, 597 bp, Zea mays
  Peptide Sequence Number=SeqID_76854
atggggatggtggggaaggcagaccacatcgtccccatcccgatgcgccctgagcggggttatgtgtccctgcaatttgttgggctatctggaaagccagaaataaaatggcttagcaagagagagctccaggaccttctgcaagagggcgccaagatgctgggtgttagagtcaaagaggaggcagcggtagtggaaagggccgccgacccgctccaggctggacatgaggtccacgctgccaaggtggctgcgacgcctctgacattatctgccgaggccatccccgacccgtctgcgaagaccgagggcaagagggtggctgatgctgatgaggccggtccctcaaggcggcccgaggtcccggtcatgggacgcaccgcgcttttccccgacgatgagaaagacggcgagccaatgtacgtcctcaacaacaaggaagagcaggaaatgtggtctaagttccagctcatggctaggggtctcatggtgaagttcgtggccaagtccatcttccttcgctacgagcatgacatctgggacacgctgctgcaccagaggggcttgcttgatcaattaaatgagcagcttgcctag

SEQ ID NO: 33480 - DNA, 183 bp, Zea mays
  Peptide Sequence Number=SeqID_76855
atggaggcaggagcggctggctgggcggcgccgccacgccaggccgccgaatctggctggggaggctcgccggggcgtgccgccacgccggtgccccgccgagccgccgagtcggggccgcgcgtccgcgccagacggctgctgctgcgccggcagaaaaagagaaggaaagcgaagaactga

SEQ ID NO: 33481 - DNA, 816 bp, Zea mays
  Peptide Sequence Number=SeqID_76856
atggaaacctctatttataggctcaaggagagccttcaggcgtgccagggtttgttgcgtacagagagaaggcatggccgagcccctgtagtcgggggatgtccggttcctgtatttgcatctttgactgagcagagtatcgaggctagggccgagggctcggtcacgtacccaagtttgtctggtggagaagatgaccaagtcgtagtggttggagtagtgatgggctcgggcgtggttgaaacggcggttccgtggagaggggaccttaggcgggacaaggatttcctcgagaaaagaacaattggaaatgtcttggctcgagcagccaagactctgctcagtctggagcaccggactgtccggtggtgcaccggacagtgtccggtgcgccaggctggctcaggcgaactggccgctctcgggaagaatttgacggcgtacggctataattcaccggactgtccggtgagccaacgatcggccgggccaacggtcggctgcgcgatctgcgcgagacacgtggccgagccaacggtcgggagggggcaccggactgtccggtgtacaccggacagtgtccggtgcgccaatggctcccaggcgccaacggtcggcttcgccaggaaaggaaagaaatccgcaccggacagtgtccggtgtgcaccggactgtccggtgcgccaggcgacagaaggcaagatttgccttccaggaatgctctcaacggctcctagctgccttggggctataaaagggacccctaggcgcatggaggagtacaccaagcattctctaagcattcctaagcactaa

SEQ ID NO: 33482 - DNA, 183 bp, Zea mays
  Peptide Sequence Number=SeqID_76857
atgccaatgccatgcacactgctcgtgctcgctcctccgtcgtctccaccaatggaactgtgcgtgaaagggccgcccctaactatatacggaaaaggtgcagaagcatttcaggattatctcgtttccatccaagtatgcagttacggcgtctactatgtggcgagctatttcaccagctag

SEQ ID NO: 33483 - DNA, 2025 bp, Zea mays
  Peptide Sequence Number=SeqID_76858
atgggggaggacatggacgcggccggcgcgggctggctgtcgtggcgagcggcggcggtcgccgttctcgcttggctggcgctgcacgtggcggcgcgcgtggcggacgcgctgtggtggcggccccggcgcctggaggcgcacttcgcggcgcagggcgtgcgcgggccgccgtaccggttcctgctggggtccgtgaaggagatggtggggctcatggcggaggcctcgtccaagcccatgtcgccgccaacctcccacaacgcgctgccccgcgtgctcgccttctaccactactggcggaagatctacggaccgaacttcttgatctggttcgggccgacgccgcgcctgacggtggcggagccggagctggtgcgcgagatcttcctgacgcgcgcggaggcgttcgaccgctacgaggcgcacccggtggtgcgccagctcgagggcgacggcctcgtcagcctccacggcgacaagtgggcgctccaccgccgcgtcctcgccgacgccttctacccggacaacctcaaacggctggtgccccacgtcggccggtcggtggcggctctggcggagaagtggcgcgccatggcgtccgcctcctcgagcggcgaggtggaggtggacgtcgcggagtggttccaggcggtcacggaggaggccatcacgcgcgccaccttcggccgcagctacgacgacggccgcgtcgtgttcgccatgcagggccgcctgatggcctacgcctccgaggccttccgcaaggtcctggtccccggctaccggttcttgcccaccaagaagaactggcagtcgtggaagctggacagggagatacggcggagcctgacccgtctcatcgcccggcgcagcgacgaggccgaggccgaggaggaggagatgggcagccactccggcgggttccgcgaccttctcggcgccatgatcaatgccggcgagaggaagacgccgccggcgggggcgatcccggtggcggacatgctggaggaatgcaagacgttcttcttcgccgggaagcagacgacgacgaacctcctggcctgggccaccgtgctcctggccatgcacccggagtggcaggaacgcgcacgccgcgaggtcctcgacgtcttgggccccgacgagctcccctccaaggagcaccttccaaggctcaagacggtgggcatgatcataaacgagaccctgcggctgtacccgccggcggtggccaccatccggcgcgccaagacggacgtgcagctctccaacgggtgcctgatcccgcgcgacacggagctgctgatcccgatcatggcgatccaccacgacgccaggctctggggcgccgacgcggcgcagttcaaccccgcgcggttcgccggcggcgcggcgagggcggcgaagcacccgctggcgttcatcccgttcgggcttggcgcccgggcgtgcatcggccagaacctggcgcgcctggaggcccagctcaccgtggcggtcctgcttcagcggttcgagatcagggcgtccccgaactacgtccacgcgcccacggtcctgatgctcctctacccgcagtacggcgcgccgcagcacaactcagcaaaacagaatcaagcagaactccaaagacatggcatggcatcgtcctcacagcatcaaggaggggaggacgagggcgaacaatgcgaggacgaggacgaggccgcgccgtggctcttatttccaatggatcgaatgcttgcccgttgccatgccactctacctgatcttaaccgcgcacagcacatctgccgagctggagctggattgctggagctgccgctagcaggaaagcaagcgctggctcgtcaccagatcggactcgagagcgccagagaaggacgcacagcacattgctcatctcgtcttgtggggcgctactgtaatactgctaccgaaaaagggcaaggcagcagctgccgaaacgccaagcttgtgcaggccaatatgttggacgtggtcgatctcgcaaaggagtag

SEQ ID NO: 33484 - DNA, 357 bp, Zea mays
  Peptide Sequence Number=SeqID_76859
atgcactgttcactgtcaggtgcagatcaccttcctaaactggcgcagccgaccgttgaagatttggagccgttggcgcaccggacactgtctggtgcacaccggacagtccggtgcccccatcagaccgttggctcggccacgcgtcacgcgtggattgcgcggtcgactgttggtgcggccgactattggctcaccggacagtccggtgcaccaccggacagtccgaccacatttgcaccacttgttttgtttttgcaaattcttttggaaaaatcttttcaaaatctttttcaaatagtcaaagcccaggcttttctcttctccccagaaactgacaagtcgtctgaggtgctg

SEQ ID NO: 33485 - DNA, 477 bp, Zea mays
  Peptide Sequence Number=SeqID_76860
atgcggcggccgccctccggcaggaggggccgccggaagcccggccgacgactccgacacgctggaggtgacgacgctcgccgtcgttcagccccacgttatcgaagtccgcgccgtccgcagggccagcgaacgcctctacccccaagcgccacgggaaagggcgacccgcggacccacgcggaagggaccgggaaagggggataccccgaaagggatccttctccgcgaaggaaccgggctccgagccccccattactgatcaggggttcgaaggctggccccccgagggttcaacagtcgcctcagatcgcgtgggcccgacacccactactggtcaggggttcgaaggccagccccccgaagggcttcatggccgcctcaggctactcgggctccgcgcccattactgatcaggggttcgaaggctggcccccgaagggttcacagtcgcctcagacaccgagcgagggatga

SEQ ID NO: 33486 - DNA, 423 bp, Zea mays
  Peptide Sequence Number=SeqID_76861
atgggcaagaacaacaagcgcaagcgtgatccaactcctccatcagaggacttcagtgactcggagtactcagaggaggagttctcctctgagtccgaggggtctccggctcccatccctctgcgtgagtcatctgacgattcagacgactcccaggggcttgcggcggaggtctggacttacatccgggccgtcgagcgctccgggctcgagggctcggatgagtcggagtactccttggacgaggaggactcgtccgaggaggacggtggcggcgatggcgaggacgacgacgacaacgaaggcggtggcggcgatgacggtgacggcggcagcaggggcggcagcagcggcagcaaggatggcgacggcggcagcagcaggggcggcagcagcaaggacagcaacaaggccagtggctaa

SEQ ID NO: 33487 - DNA, 879 bp, Zea mays
  Peptide Sequence Number=SeqID_76862
atgtcttctcgctcccttgtgcatcgcgtctctccaccttccaagcccccggatgggggatacccgccgtcttttcgcctcatcgttggaggaacgcaactccgtgggagttggtacctttcagccatcgttcggcttcaaggattttcatcatgcagcccggctgcacccctccgccggcggtcacccgagatggtgacttccagcttgatggtgggggaaagcgagccgggctgcggcctctgcccctccctcagcctcaaggattttcatcaccagagctggggaggggagtgtgccgagttgggctgcaccgtgccttgctctcggacgcgagtggctttggagcctctcgcggcgccggcgtctgccacggcagctggaagaggttcttccgccggcgagagagccaaggccagccacggaccgacctccaactctacggccttctgtccgtccttgcctcacgagtttgggcatgggcgggggcctcctggcagcagcacccgccctgaggtcagtgctgccgctgttcggccccccggagcagaagtcgtcgtcgtcgctgctgctggagcggacgacggaacgccgttcgtcggtcttctgttgctccgcaggcccacccctatcgagtggggttactcgcctgttgattatctgaaccgcttcaccaagtatgagtcgccccgtgtcaaggtgacgagtgagctattgtccgggtgtggcgatgacgtcgtccttcggagtggaggtcttcggaccacgtcgccgtccgaggctaggtcgaacctcgccgaagttatcgtcgatgccgagggtgctgctgcccccttccagcgtcaagacccgagcctgcaggatcagattgtcttgtag

SEQ ID NO: 33488 - DNA, 528 bp, Zea mays
  Peptide Sequence Number=SeqID_76863
atggcgttggtcgtcacttatgtcttgatatcttttgacatggatgagagaagccctgcgagctgtgcggtgcctgtgcacgccctggtgtcccgctcgtattttagacgccagtataaagccagcgagagagaaaaaaacaaagaattcaatgaaaaggcgcaccggattcctgtggcggtggacgcgtgcgggtccggttttatccataagcaaaatgtccaacggcataatgttcgcggcagcggctgcctgactcccaacgtaggccgggccgcggcggctcaccgtgaccacgccatcgccttgatgcatgctgagagttgcgagagctcggcgcatacgtctggtacgacagcgcgtccctacgacgcgcgctctcatccgcgccacggaatctgcgggcgccatgccatggacatggacatggacatggatggggcggcacgccgcgacatcgctgtcgcgccgcgcagggcacgtgaacgcctccgccgcccgcccgcccgcccgctcgcgcatcactag

SEQ ID NO: 33489 - DNA, 3522 bp, Zea mays
  Peptide Sequence Number=SeqID_76864
atggggcaggagtggccaggcccgaatctggagcacatgcgtggcccggtggccgtctccatccacgggatgcccgcaattcccggcctcattgtcatgtgcctccccagtccccacctctccaaaccgtcacggaacaaggcggcgacgcacgagcacgacttcctctcgctgtacgccgccgccgccgccaaggacgctcctctcctgctacacgactccaaggcgccgcctccttctcaaggtaatttcctcttgaagacgcacgacttcctgcagccgttggatcagaagccgggagcgccgccggagccgtcgccgctgcccgcttccgccgcggagagcaggcaccagccgcagcagcaggtcgtcgtcgcgaaccagcacgcgctgcccctgcccggcggcgtcggcaccttcagcatcagccccgcgcccgtgtccgtcgcgctgccggcggccgtcgtcaagtcggagccgccgttcgtgctctggggccagcctgccgcgacgctccatccgggcgcgcgagggcaccagcagcagtgggcgctccccttcgccggcgccgggcaggtcaggctgccgccgcagcaggcgcctccggatagaaagggccggggcggcgccggtggcggcgtcatggagtctggctccagatccagcggcggggcggggttcgacgacgacgacggcctcacgacgcgccgcgaggtctcctcttcgctccaagacgccccgtccttgttctcatcgggggtagtgttccgtgttcgtgtagcagagttaacggtgaggaagaggatgactggtgtggaagggatgagtccgcacgcgctggtggcgacgggcgctggctggcagtggcagccggcacacgtccaccggctgcatgcgcacctcctcgtctccggccgcctcagcggctcgcctacccttgccgcccttacgctgctgcgcgtcgcctgccgtgtcccagcgtccccttgcctccgcccgctcgcccaccatctgctcgaccgaattccccacctgtccccgcacctcctccacgccgcagcgcgcctcgcctcccgcctccgcctgccttccctcgcgctgcgccactaccttgctctacgtgcgcgccatccggccttcctcccgcccgcccctgccatcgccgacgtgctgaagtccgcccctggccgggcagcacatgcccacgcgttgcgagttgccgcacacgcagtggatgctcgtttccttgacaacacgctcatctccatgtactttgcctgtggcgacggctggagcgcacgccaagtattcgagggaatgtctgaccgggatgttgtcacatggacttcgctaatatcgggacttgtgcagaacggctgccccttacaagggcttcgccattttgcatcaatgatgcacagtgaggtgtgccctgactttgtgttgctcatatccgtcctcaaagcctatatggagctcgatgactttcctggtgccacagcagcccatgccttagtggtcaagagtggctttgacaatgaactagatgtgataattactctgacagccatgtatgctaagtttgggtgcatcgtgtctgctaggacactctttgacagggtgccaaccccacgggtgaatgtggtcctttggaacgccatgatatcaggttattctaagaatggacttgccaatgaagccgtgcaacttttcaagcagacgaggaaggttgcaaggagcatgacccctgactctgtcactttgcgatcggtgatcgtggcttgtgctcagcttggatccgtagaacttgcagaatggatggattgctatgtccaaggcagcaagtacagggatgatgtgcttgttaacacagcgctcatcgacatgtattccaaggcagggagcatcgcccgtgcacatacagtctttgaacgtatggacgtgcaggagcgggatgtggtcgtttggagtgctttgattggtggttacggggtgcatggtcatgtcaaggaggctgttgccctgttcgatgacatgaagcatgctggggtgaaaccgaatgatgtgacattcctgggcctcctgtcagcttgcaaccatgccggtgctgtggatgaagggtggagctacttccattcaatgaaacgtgactatggaattgagccccggcaccagcattatgcctgcatagtggacctgcttgctcgtgctggtcatcttgatagggcttaccggtttataatggacatgcccatcaagccagaaatgagtgtgtggggtgcgttgcttcatggttgcaggatgcatgggcgctcagacatggcgttggctgagtgcgctgcgcagcatatttttgagctggagcattccaacgcagggcattatgtgcagcttgcaaacctgtatgcatctgccgggatgtggagccatgttgctgatttgacagtaagggtggaccggaagggtgggagctgcagcgatggtggtacggatcagcggccaaacacaccgcggtcaaaacactcggccacagagcagcgcagacgcagcaagatcaatgataggtttcagatacttagggagctgttgccacacagtgatcaaaagagagacaaagcaacatttctcttggaggttattgaatatatacggtttttgcaagagaaggtgcaaaaatatgaggcaacatttccagaatggaaccaagaaaatgcaaagatgcttccatggagtaaaggccaaatctcaggagattccccgcctgacccttcacatttcatgagaaatggatcctcccctggatctaatttcactgggaaacttgatgataatcacaacatagtgacatctgcagctgcatcaggggcacaggatcaggtagaaaccgaccacatggctagcggatgctacagatcagcagaaactacggcgaattttacaaataatgctatgtctcagtcccaacctcaatggactggtccgtcccctgtggatgactctgcagtgaacagtgagacgcttaacaaccagcagttggtgattgatgaaggaacaatcagagtgtccagtaactattcccaagaaatattagctcagaaagcactttgtgtttgggcatgggcagctaatgatttgttatcttcgccgaagataaatatcaacatgggaaagcgtgccgccaagagacccgctgctggtgtatccagcaactccaagcacgcctgcctgagacagacatgcgactttgcgagtagagactggtaccccgtcgcgatcatgcgccgctcgatcggcactgcgaaaactgcacggcggcttggagttggagatgcatggggccccgacaaagcgctgaccgaaccacctcccacccatgagggatcaaactcgcacgccggcgtgggggcaaggcgatctcgcgttcagatgcaggccaccgcggtggaagaagaagagcccaggtgcttgtccggtcaggaatggattcaacagaattcgaagagatctagatccttttgctag

SEQ ID NO: 33490 - DNA, 1992 bp, Zea mays
  Peptide Sequence Number=SeqID_76865
atgcagcttgttaaaacctcacaaaattggagtgatctttccaagctattctcatgtgaaagggttgaagttatatcacatgatggtgtttcaatacctttagtgatcctgtattcatggggagcacattgtcatggagaatcacctgggatcttatacggttatggagcttatggagaggatttggacaaaagctggtgttctgagaggttaagcctcctctctcgaggttgggttcttgcatttgcagatgttagtgctggtggtctgttggtgggtgccgtcattaatatgcttccagacttattttctgctgcagttctcaaggtcccctttcttgatatctgcaacacaatgttggatcctactttacctctcactgtcttggactatgaagaatttggtgaccctaatagcccagatgagtttgaggcgatcagcagttattctccttatgataacttagcacctgatgactctacgagggacgttcgtcgtgcctcggatgagatgggtggcggcggcggaggaggaggaggcgggaagtccgagaaggcgcggcgttcgtcggcgcgggtgaggttgtgggtcgcgcgcgccagcaccgtgctgctctggacgtgcctcgtccagctcgcggcctaccgggagctctgggcgcccagcgtgctctccaggtggcctggctgcctcaaccagccgcacgtcgtgcagaggccatcggagcgtgtggcggacgccggccagacgcaggcagcgcgcgctttggtggtgctcccacccaaaagaatctacaggaacaacggctatctgatggtctcctgcaacggcgggcttaaccagatgcgagcagcaatttgtgacatggtaaccatcgcaaggtatctgaacgttactctcatcgtaccggagttggataaggcttcattttgggctgatcccagcgatttccaagacatatttgacgtggactacttcatagcgtcgctgagagacgaggtccggatcctgaagcagctgcctccgaggctcaagagaagagtggagatgggatccctccggtccctgccaccagtcagctggacggatgcccggctcgcgaacaacggcctgcccgtggagatgcagagactgcggtgtcgcgtcaactacaatgccctgagatttacccctgaaatcgaggatctgggcagacgcctggttcgagctcttcgccggaacgggccctttgtggtccttcacttgcggtatgagatggacatgcttgccttctccggatgcacgcacggttgcagcagcatggaggctcaagagctcacgaagatgagatatgcctacccatggtggaaggagaaagtgatcgactcggacgccaagaggaaagacgggctgtgtccgttaacgccggaggagaccgcgctggtgctgcaggcgctcggcattgaccgcggctaccagatctacattgccgcaggcgaaatatacggcgggcagagaagaatggctgcgctcacctcggcttatcccaacgtggttagaaaggagacgctgtttccttgggaagtcggcctgttccagaaccactcctcccagatggctgcgctggactacatggtgtccctggagagcgatgtcttcatacccacctacgacggcaacatggccaaggtcgtagaaggccatcgcaggtacctggggtttcggaagacggtgctgctggaccggaggcgtatcgtcgagctcgtcgacgagtacaggaacggcacgttgcgctggaccgacttctcgtctgccgtcatggcgtcgcacaccagccgcatgggcgaaccgtccaggaggcagacggttcctgacagacccaaggaagaggactacttctacgcgaacccgcacgagtgcctgcaccagccggaagatgtctccgccttcagacgaagtcgtgaagataataacaacagcagcagaatcgtcgtgaaaaagtcgttggagtag

SEQ ID NO: 33491 - DNA, 639 bp, Zea mays
  Peptide Sequence Number=SeqID_76866
atgcgtgagcaaggagacacgcgcgggcaggaaaattcacggcgcggcggtcagagagctcgaccgggcattgggcaaagtcaggacgcgacacaggaaggggaaaatccgagcaggggtcgcagccggctagctgaggacacgacggtgcgcagggaaataagacaggggcgcgcggctagcagagaggcactgggcagcactggcaggaaagcaggcgagcagatggtcaagcgcctagggagccggacgcgccatggctggagctggagcttcggtcggctggaaggggaagcacgacgcgcggcactgggaaaaactgagccggccgaccggacctgggaccaggtggcttcggccagggaacaggcgcgccggcaggggaaggccaggagcgagcgagctggggagagagagcgagctgcagggaggagggagatccaggcaccgagcgtggaattccggcgagctgctcggcagccatgggagggggaatccgagctgaagctcgcgacgcagggagccagcgtgcgcaggaaccgaacagggacgcagggggaggaagaaggagacgcggttgcccaggaagacggctgggctgaggaagaagataggggcgagcgtcggctggatttttga

SEQ ID NO: 33492 - DNA, 840 bp, Zea mays
  Peptide Sequence Number=SeqID_76867
atgaagcggctcgttggcactccgaacccccgctcatggaaggggatgaaactgagcacataccccggcggcggagtcgggttgctgaaaccaaagaagaaggcaagcgcaaatggtagggtaaagaaccagcaccggcccctcttccgggtatataaaggcccgggcgagatccacccaaggcttcgcccgaacccgccgtggaattcaaactcgaagggcaagcgacacctccggcaggagaagcgggcgccgtttcacctccgtcaagatgaccgcgtcaaaaaagggaccgggaaagggggtattttgaaaaaggacccttcccagcgaaggagacgggccccgagccctcctactgatcaggggggttcgaaggctggcccctcagaagggttcgacaaccgccccagagcatgcagagtcagggatgaccctgggtacgtccgttacatggccgaggctcgggctacgctcctgagggagctccacctcgcccgacctcaggcctcggcctcagcctcggcctcggaagaagatctccgcctcgcccgaccccaggcctcggcctcagcctcggcctcggaaggagtcacaacctcgcccgagcccagcctcagccttaggagaagtctccggctcgcccgacctgggcctcggaccgactgcgctagaggggatacatcattaccctactcctatctagctgcctcaggctacgaaggaacaagaccagtgtcccatctaaggttactccagcaacagggctcaaggcacttctccgacggccacgttagctcatgtatagggctcaaggcgcttctccgccagctacgatag

SEQ ID NO: 33493 - DNA, 1008 bp, Zea mays
  Peptide Sequence Number=SeqID_76868
atggacaccgcggcggagctggagctggggctggagttggagcagaagccggcggcggggtactggagcgtggtgggcgcgcgcccttgcgacgcgtgcgccgcggagccggcgcggctgcactgccgcgcggacggcgcgttcctgtgccccggctgcgacgcccgggcgcacggcgccgggtcgcgccacgcgcgcgtctggctgtgcgaggtctgcgagcatgcccccgccgccgtcacctgccgcgccgacgccgccgcgctgtgcgccgcctgcgacgccgacatccactcggccaacccgctcgcgcgccgccacgagcgcctccccgtcgcccctctcttcggcgcgctcgcggacgcgccgcagcccttcccgtccccggccttcgctgccgccgcgggggccgaggccccagctcagggggaagcggtggcggaagactacgggagcagcgaggccgaggcggcgtcgtggctgctccccgagcccgacaacagccacgaggacagcgccgccgacacgttcttcgcggagtcggacgcgtacctcggcgccgacctcgacttcgcccggtgcatggacggcgtcaaggccatcggcgtgccggtcgcgccgcccgagctggacatcggtgccggcagcttttgctaccccgaacactccatgaaccacattttgtcgtcatcctcggaggtggcggtggtaccggacgcgcaggcggccggcctgccggtggtggtggtggtgagcagaggggaggagcgggaggcgcggctgatgcggtaccgtgagaagcgcaagaaccgccggttcgacaagaccatccgctacgcgtcccgcaaggcgtacgccgagacgcggccgcgcatcaagggccgcttcgccaagcgccgctccgcggagggcgaggacgaggcgctggagcacgaggaaggggcgtgcttctcgcccacggggtcggcgcccgccgcgtcggacggcgtcgtcccgtccttctgttga

SEQ ID NO: 33494 - DNA, 522 bp, Zea mays
  Peptide Sequence Number=SeqID_76869
atggtggtgcggtttgcctgcaggcggcccgacggtggtggcgttagggaaaggaggtggaggcttgatgcttggtttgtttggccgtggtgtgacgacacgacctttcaactggcgagcatatatgacagcttgatgcttaggtcaggagtcctctgttcggcggatatcaatggctgcttcatgcatgagcatggaaagaaggtggaggcaaggctggtgttcttagatttggagaaacttatgggtgtagagctcgtgaaaacctttgatctggcctttgttggttgggtcatcgcaatagcgacgttcttgtatgttgtgttcttcctaaagatgttgcttatggagtccatcaatcttgactctagctttgtctggttagtggtcgtcgtgaagactgttgagcgtttagaggttcttgctggagccagactaaggatggcaatggggtggggtggggccggaggtcgtccccttcctgatcctcattggacatttctcgccctgtccctgaaatag

SEQ ID NO: 33495 - DNA, 411 bp, Zea mays
  Peptide Sequence Number=SeqID_76870
atggcgcctcctgttgacgtggctggcccgcgccctaggttgggcgatgtggaggctcctccgaagccgaggtcgagtctgtcttccgtggccgaggccgagtccgagccctgggtcgggcggagcggagttcgctgtcttctggggctgagtccgagtccgagccctgggtcgggcggagcggagttcgccatcttccgggacttagcccgagtccgagccctgggtcgggcggagcggagcggcgctgtccttctgtcaggctggtcagtggagcggcgaagtgacggcggtcacttcggctctaccggggggacgcgcgtcaggataaaggtgtcaggccacctttgcattaaatgctcctgcgatttggtcggtcggtgcggcgttttagtcagggttgcttcttag

SEQ ID NO: 33496 - DNA, 606 bp, Zea mays
  Peptide Sequence Number=SeqID_76871
atggtgacctccagctcctggatggggagaggcaagccaggctgtgatctcgatcccgccctcaacgtcgagggtgttcgtcatcctcgctggggcggggagcgaggcgagccggggctctacctcctgcgcggctggttcgcgtcccttgagcgggaacgcgaacgagagccctccagcggccgcgtccacccgggaccatggctactgctgcagaggtcgctggtgggtctcccgatgttcgtcgccccgcaggctcgagactcgcctgttggttgtctgaaccgcttcaccaagcgtgagtcgccctgtgtcaaggtgacgagtgagccgacgcctcgggtcgggctggcgccctcggtggaaggctggccgaggccccagggcgaccggccgagccgcccgctcgggccgggttcccggaggagaccctggcagcgatggcccggtcgtggcgatgacgtcgtccttcggagtggagatcttcggaccgcgtcgccgtccgaggctaggtcggacctcgccgatggtgtcgtcgatgccgagggtgctgctgcccccttccagcgtcaagatccgagcctgcaggatcagattgtcttgtag

SEQ ID NO: 33497 - DNA, 123 bp, Zea mays
  Peptide Sequence Number=SeqID_76872
atgacggggaggaagagcgtgaaggtgataaaggtgaagaagatgcccgtggcggtatatgagcgccttcaccgagggaaagctggtggcgctaagggtggttttaaaaatgaatataagtaa

SEQ ID NO: 33498 - DNA, 702 bp, Zea mays
  Peptide Sequence Number=SeqID_76873
atgggcgatgacaacatcgcagctgcttttcctctaaaccccgagttagatgattgcacaaacgtggatgctatggcaattcttcctgctccacagaagattaatcatctagaggttttggcaatgtctggaatacaatctgtgtgtgacaagtttgtgaaggggctcattcctgtgcatggttcaaatctgaaggagttagcatttgctggttgcttggaacttacctcagcttccatcaagactgttggggaatattgtcaagaattaacttcattggatctccgcaacttgaataggctgcgtgactcagcactgtggcatcttcgtggttgtaggctactaaggaaactaaggcttcaaagaaacgcattcagaactagaggatttagttgcgaatccggacagcacggggatgcagtcaagcaggtggtcgatgtccctagcgtggatgatggtagcgcagagtccaatctcctagaggcaggggaacatggcagcgcagccccgcgggagcgcggcggtgtctgggaagcgccagaagccaaggtagagggtgcggagggaggcaaggtggaggacgttgatgaggcaattgactccgtagcaacgcacgggcatacacctagtctaaacatattcatcatggtttttaaagcggcaagacgagccaaggcgttggaccaccgcctggacgcctag

SEQ ID NO: 33499 - DNA, 1470 bp, Zea mays
  Peptide Sequence Number=SeqID_76874
atggccgctcccgccgccgcgccgctcgacgagggcaaggcgaagaaagtccttcgccaggtcgagttctacttcagcgacagcaacctcccccgcgataagttcctgcgggagacggtcgagcagagcgatgacggattggtgagcttgcccttgatatgctccttctcgcggatgaagtcccacctggggctggacgcagatgtcaagcccgagactgtgccggaggagaccgtgcttgcggttgctgaggtgctccggccttctcctgccctccgcgtatcggaggatggaaagaagattggtagagctagtgaactcttgaagccagatgagatcatagaacaagtagactctaggactattgctgtatctccgctgccttgcaatgtaaagcaggaagacgtccaatcttttttcacaaattatgcaaaggtaaacagcgtgagacttccacgcaatattgccaacaaaaaacacttctgtgggactgctttggttgagttttctgaagaagaggaagcaaaaagaattatggagactgctttagtatttgcaggggcaaatctggaaataaggccaaagaaggagtttgatgctgagcaaaagtccaaaaaagaagcatatgaaaagacacaccttaaaaaggacaaccagtatgaaggctatcaaaaaggcctaattgtggccttcaaattggagaaggccacagctgatactgtagtgcagcaagataacatagataaagagaatgactctgctacgaaattagatgtttccagttccatggaaaaaccttcaggccaggggccagaggagtctatccttgagagcgatgttattaagcaagggatgtcctcagatgacatgaccaaagagaaagatctaaacactggggaagctacagaatctgagaagtgtattagtgatgtccccatagaaagtgataaacatggtgatagtgaaccattgagcagggaaggcaaaatcatttctggcaatgtgaatgtgaagaaccaaatatcgagggaggatctaaaagaagcattcaaaaaatttggagctgtccgggcttcaccgcagtgcccctacttgtcattctttcatcctgttctatccatgccttttggggtaggttccatggtctgcaacatcggagataattcaggataccttcgctttgaagattctaaggcagctgaaaaagcccgcatgtctgcagtacttgctgatggtggcttgataattaaggaccacattgttactttggagcctgtgactggtgaagctgagaaggattattgggacacaatccgcagtattcaaggaaagtacaaggatagtagaagctacaagggaagggcttcaaataaccagagaggaggaaagcgtttcaacgcgaagcgagatagaaacccagactcggagaagaattctaacaaggctcggaaggttgaagctatcgcatga

SEQ ID NO: 33500 - DNA, 432 bp, Zea mays
  Peptide Sequence Number=SeqID_76875
atgggcaagagtaagaaaggtagaagttcttcgcctcgctctggcgacaagcgcaaacgtgagccgactcctccctcggaagacttcggcgactcggagtactcggaggaggagttttcctccgagtccgagggatctccggctcccgtctctcccccggtgtcgtctgatgattcagacgactcccaggggattgccgcggaggtctggacctacatccgggccgtcgagcgctccgggctcgatggctcggatgagtcggagtactcctcggactcgtccaaggagggcagcggcggcgatgacgatgacgacggaggcgacgatgatggcggcggcgacaacgggaggggtgatgacggcggcagcaagggcggcaatggcagcggcagcaagggcagcagcaagggcagcaacaaggccagtggctag

SEQ ID NO: 33501 - DNA, 687 bp, Zea mays
  Peptide Sequence Number=SeqID_76876
atgcgccctatctccgtcgtgcctgcgcttcctcacccgcgcgatttggacgcgttcccccgcgacagtcgccgcgctcgcacgcgcacgcactccctccgcaatagttcacccgcggagctggaggtcagaatctcggccctcgaaaccgagaacgcaatacaggcggttgcgagacgagaatcaacgggcaatacaggaaaggaggaggacccaatctctcaccaattggcagaacacctatgcggaatcgagcactgggcggtagaaaagccgggctggggcgtgactcgccgcgacgcaattgaggtcagcgacgacgatgagggtgctgcggctgtcggtgctaacaagggggaaagcccggacgagggtgttggtgccgtcccggctcttcggaagcgggtggtggccagagagagcgtgggtgaagccgatgcggaggacgtggagggaggcggtggaaacaacggggagagcagcgtgggtctggaggatgactatgtttcggtcacgccgcgggggaagaagcgtggccgccggtcggccgtggcacaggtggtcaccagtgatagcgaggatgatggtggttatgagattcatggttctggttatgattatggtgctggcgaagacgaagctgtggaaggagacttccaggagttccaagattacgacgagttctag

SEQ ID NO: 33502 - DNA, 819 bp, Zea mays
  Peptide Sequence Number=SeqID_76877
atgcttgcgtactgcaaatctttggatgagctctctcagaatggagcaacaattgtccactggataaaaaaggttgtaagaggggatttcatcatctacttcaacaaaaaatttgatgctttatgcaagctttctgtagattccgatgctaatgtacaaagtgcagctcaccttcttgacaggcttgtcaaggatatcgtaaccgagagtgaccagttcagcatagaagaattcataccgcttttgagagagcgcatgaatgtgctgaatccttatgtaagacaatttttggtggggtggataacaatgttagacagtgttcctgatattgacatgcttggtttccttcctgattttctcgatggtttattcaatatgctgagtgattccagccatgagataaggcagcaagctgatgcagcactttttgagtttttgcaggagataaagaactcaccagtaaggctactctatatcgctcagtcttttatcagcttagacgtaaaagacattcagatttcagcgcgtgcgttctcaatttctttcgatctcagcgcgtgcacatttgattggtgtagggttgggatcgagatgcccacgatcaaggtgcggtcggcaatagtagcttccccaccgtcctcaattgcgtcgtcaacagtcaacacgcctgagctcaagactgtgactaaatttcaacggattaaggtggatagcgtcagatttgaagatgaaaagcttcaggatacctcgtattgggcgaacattaccattcccatggcaccgttaccattccatgtttctaatgcactgagggtctga

SEQ ID NO: 33503 - DNA, 648 bp, Zea mays
  Peptide Sequence Number=SeqID_76878
atggcccctaagcttgaagtgttggccgtatgtgatgccatgaaggcatatatctctgccccaaacctctccgtggtaagttgggacagtgacactggctacaaccctctgtgccaccactttgccaatgctgcccgtcacctccgcctgctacacttgggctcaaagtgtgtatccgcttccctgatgcgtcaattcgatgaagttgatgtgctgaagctgaagttgaacctcctcaattttaaggagctgcagcaatacaaggaggatttcgataaaggtcgattctggcatgacggaaataataagaaaactcactttttcccccacgctcccgccatggtgtccgaccaagagattgccagttgcgtcgagtctgtcctccgaggctctgccgatgggcccggggaggtctcgctcgccgtcatgctgcagcaggcggaggccacgctcggcgtcgacctctcccacaaggcgggctttatccgcgaccagctggacctcttcttcggcccgcgcctccaaccgctgaccacgccacaaccgatgcctcccccgcctcaggccgtcgttgcccccatagacgtcgtgcctcagcctcagcatcagcatcaggttctgccgcaggcaccgccttcggctcagtag

SEQ ID NO: 33504 - DNA, 174 bp, Zea mays
  Peptide Sequence Number=SeqID_76879
atggcgttctacctgccgccgccgccgctcgcctttcgctacaccatcgaccttgctggggccgccacgggtgggaccgtctccttccagcagtcggcccctggggctgggggcaccgcttcccccaccgctgcaccacaggtcaccggcgacaacaaggaaatgatgtggtaa

SEQ ID NO: 33505 - DNA, 192 bp, Zea mays
  Peptide Sequence Number=SeqID_76880
gctctctcctttgtctcgcatctccctgtcttagaagaggagggtgattcaagtatgggagaagggggtgaggatgatataatgcgtgatgatgaggatgttgacagtcaagatgaaggtcccataaagcctgaaaatggtgaagattccaccaccaattcaaacaatgaattgatggatgaatatgcctag

SEQ ID NO: 33506 - DNA, 681 bp, Zea mays
  Peptide Sequence Number=SeqID_76881
atggacggggggaccggcccgggcgccgaggtgctctctcccggcgaggccgagtggcccccagagctccgcctcccgccgctgccctccgtgccggagcccccagggccgcccccgcccgcccccgcctccgcttcgctgcgactgcgaagcgtcggggtcgcgccccatctgcacggggaggtctttgatgatgacccgcagttcctcggatcgatcatgggggccgcggccccgcccccgccccagcagcagcagcagcagcccgccgccgcggcaccggtgaagaggaagagaggcaggccgccgaagaacagggacggtgcggcgccggtgcctgcgccggtgaagccggggaacaagaaggacgaggaggaggtctgcttcatctgcttcgatgggggcagcctcgtggtttgcgaccggaggggttgcccgaaggtgtaccaccctgcgtgcatcaagcgagacgaatccttctttcggtgccagggcaagtgggattgtgatttatgtttaaacaccgagccaaaagctatttgtcagcgccccgccaagggcgtacccttggctgcaatcaagacacactcaaagatctcgactcaggaaagaccactgcacctagggattagtgccctcgggacctttcttagcctcatcagggaggggctagctcagtaa

SEQ ID NO: 33507 - DNA, 2169 bp, Zea mays
  Peptide Sequence Number=SeqID_76882
atggggtctcgcgttcgcatcgtcttcctcctcctcgccttcctcttcgcgcgcgccgccgagccgatcgccgccgccgcacccgccggcagcaggcaccttacgaaggacgagcggtggatgaaccagcgcctcgaccacttctcccccaccgaccaccggcaattcaagcagcgctacttcgagttcctcgactaccatcgggcccccggcggcccggtcttcctgcgcatctgcggcgagtccgcctgcgacggcatccccaacgattacctggccgtgctcgccaagaagttcggcgccgcggtggtgacgccggagcaccggtactacgggaagagttctccattcaagcagctgaccaccgagaacctgaggttcctgtcgtcgaagcaggccctgttcgacctggccgtcttccggcagtactatcaggaatcgctgaatgcccggtacaaccgatcaggtttcgacaacccctggttcgtcatcggggtctcctactccggcgctctcagcgcctggttcaggctcaagttcccccatttgacatgtgggagcctcgcgagctcaggggtggttcttgcagtgtacaactacaccgactttgacaagcaggttggagagtcagctggccctgagtgcaaagctgtccttcaggaaataactgaactcgttgacgaacagctccggctggagagtcactcggtgaaggctctatttggagcacagacgctgaaaaatgatggcgacttcctcttcttcctggcggatgcggcagcgacaaccttccaatacgggaacccagatgccttgtgccctccactaataaaggcgaagaagaacaggaaaaacttggtggaagcatatgctcaatttgtgaaagattattacattaaaaaaatggagacaccaccatcctcgtatgatcgagaatatctgaaggaaacaactccacatgattctagttacaattttcttttaggttctaggctctggtggttccaagtttgcagtgaggttgcctactttcaagtggcacccaaaaatgacagcgttcgttctgcaaggatcaatacgaggtaccatttggacctatgcagacatgtctttggggaaggcgtttatcccgatgtgttcatgacgaacttgtattatggaggcacaagaatcgctgcttctaaaatcgtgtttacaaatggctcccaagacccatgggcgccatgcctccaagcagaaatcatcgaaagacaatgtctcacaacacatgcagtgccgtcgtacataatgaaatgcagaaactgcggacatgggactgatctgaggggctgtccgcagtggcctttcaggatcgaaggggacgcttcgaactgctcgtctctcgctgtagtcaataccgcaagggagaggatcgccaagcacatcgacctgtggctgtcgcaatgcagcaaaccatcagtagggtatggtctctgcctctggctacgttctcgtggggagatttctgatcctgtgctgctcttttctattgacgcagagcctggtaaccgcggactagtggttcatccactcgggaagagtggaaagagtttaagcatccttttagctaacttccagtcaactatccgggtaacagcaaggccagttttcatatgggttagagtggagactagcctgacggtgacggctattagtttaccaaggagaccaaatacgcacacagacaatattagttgccggtgtgctggactgtcgggtccggactccggagggcagctggaaggtgggacctgggacgagtcgagcacacacacacagcaggcacagcacagcacccagaaccagcatgtgcagaaaattcaggctggggttggatacggtacgtcagcgaagcatgtcgtggctgcgatgcgcgcaggccggcaatggtcgcgcttcgcgagcaaggatggatcggagcttctgcggtctgcctgcccatcacgtgcacaaaccggagaacgggcgcgagaagtcgtcgagaacccacgaccactatgccacgcacggcaaaccgtgtactggacccgctgcggcccaataaaatgcagcgaccaaccacgccaccccgtcccgttcccgtcgtccacagactacaagcaaggcaacacacacgtcttggacctctag

SEQ ID NO: 33508 - DNA, 502 bp, Zea mays
  Peptide Sequence Number=SeqID_76883
atggccccggcggcgcgcggccccagccaggcaggcagcctcggccccggccccggcagcgcggtggctcagccaaggcgcacggcgcgcgcggctcggccatggcgcgggtgcggccgactcggcggccatggcgcgcggccccggtggctcgcagcgtggctccgcgacgacgcgcgcaggcggctcaggcttgcgggctcgcggccccaacctcggcacggcacgggcggccccggtgcggcgggcgcggccctcaatggcgcgcgggcgtgcgcgctaatggcggccaggcaggagcgcgggcccccggcgtgggcgggcacaatcctggcagcgctacggcggctcgccgcggcccggcggctcgcaggcgtgacccggcgtggcatggcgcgacggcctgtccctgcgtgtcactgctcggttgtgcatgcagcgcagcgcgctcccgacgcgagcacgcgcgagtccctgcgaggctctgtacggcgcggcactg

SEQ ID NO: 33509 - DNA, 477 bp, Zea mays
  Peptide Sequence Number=SeqID_76884
atggctgatataccagttttacactctgcagaggttgcgccctttacccacaagtcgtgtatcccgtctagccagggtttcaaggctcttagacacttccgaggtagagcaatagcaaaactacccaaaagttcagtggtaaacaagcccccgaggtcagggatagagctgaccagcgggccccctagtggtgacaccattcaacgagtgcggaccacgcagagaagtgggccccatgtggcagtggaggcagaggtatggctggaccctgggtccacgcgtcagcgcgatatggaggaagtttacacagaacttcctctcttggctaatctgtcccaagggcttgtggagcctaagaaaattctgaatcgaaggatggtgctggtcaaatggacaggtcttcctacagcgcacgcttggggacaagcttcttttgacgacaggggagatgtgatgacacaagggggcattgcttag

SEQ ID NO: 33510 - DNA, 291 bp, Zea mays
  Peptide Sequence Number=SeqID_76885
atggcgggcggaaatacgctcgccggagctaaaggaacggtgggctggccgatgaggagatatggagccaggaaatctggtctgtctccctgcccaaacccgaggcaaatcccaagttttgtcgtgtctagggctcgcgtcccaatgccatcttctggcacacgacagaggggaagtaatggctcttggtgtggctttttaagagaaaccctaggtgacactggggtgtcacagccttcccccttaaaggaatctcgtcccgagattcaggccagagtcctcccggggtga

SEQ ID NO: 33511 - DNA, 429 bp, Zea mays
  Peptide Sequence Number=SeqID_76886
atgtggggccaccgggcagccgagctctctttctgctctctgacctgcgggcccaaggaaactagcgaccgcgcccgcgcttgtgtgccgctgctcgcggcccaaacgacagcgtgccctcccgcgcgctgttctggcggatcgccgacacgtgagccagtgtggtcagccactgggtgcccttgtgccgttatcgtcaccgacccgtggactcgtgtggatagactctccgcctttctggtcaccatgatccgacggtccatctccaccgatacctcttcgccgagcccttttacaaatgggtccctgtgcttagtagaaatagaacccgccgtccaccgcgggttaaatctgagtctgggatatttttatacgttagcccccgagcttctctgtattgtgtgcatagtccacgaaacaggaaaataa

SEQ ID NO: 33512 - DNA, 168 bp, Zea mays
  Peptide Sequence Number=SeqID_76887
atggcgacgatcatggcgcgggatcactggcagcgatacactgaatctggcgatcttcgtcagctctacaagtttgctatgttgacaaagagcaaaattctcaagaattctgagatatggagttccaaagttgaccctagtcaactgaatttagacttagacatatga

SEQ ID NO: 33513 - DNA, 561 bp, Zea mays
  Peptide Sequence Number=SeqID_76888
atgtcttctcctattcatcagataattgagatcccaatagcactttctgctcagctatgtcttcacacaaaagcatgggctttggttgatctgccgaagcagccttttctcttttatgcttataccgctgatgggcttcggcttcatctatattatgaatggccttcgaatccgtccaacttccttcggctctcctggcagcttcttgactcccatgacattgtggaccagaaatcccttgatgacacaagatatgaccattgcatcattgtggggataatccttgagctgaagatcctcctgggagaaggtgattgttcagaacttgagccacccgtgattgggagcaccagcttcgtagccgaatgtgccatagcttggttgctttgtgaagccatcatcacagttgtggaaatgaaggtcatgaaggatataccttcatcatttcaacatataaatgtgaatgtaaataagcaagtaaaagaacataaaggaataaaggcacgggacaaagccaagataaaattacatccgtgccctcggacacttgtttataagtaa

SEQ ID NO: 33514 - DNA, 111 bp, Zea mays
  Peptide Sequence Number=SeqID_76889
atggccatgatgggttcaacatcgaacaagatgtacctttgtcaggaccgtaccgatgtgggcctgctgaccgaggaccctttaactggtcacatgcctcatcatgggtaa

SEQ ID NO: 33515 - DNA, 66 bp, Zea mays
  Peptide Sequence Number=SeqID_76890
atggcggccatcgtgactggtgccagcgccaccatcttgagagcaggcctattccagttcatgtaa

SEQ ID NO: 33516 - DNA, 1245 bp, Zea mays
  Peptide Sequence Number=SeqID_76891
atggcgcctcctgttgatgtggctggtctgcgccctaggttgggtgatgtggaagctcctccgaagccgaggtcgagtctgtcttccgtggccgaggtcgagtccgagcccctgggtcgggcgaggcggaggccgtcggctgaggccagggcggagtccgagccctggggtcgggcgaagcggatcaagtggcaccgcagtcggagcggcgcaggcggcgctgtccttctgtcaggccggtcagtggagcggcgaagtgacggcggtcacttcggctctgccggctggggagcgcgcgtcaggataaagctttatgctgatgggggttaccagctgagaattaggaaccttgaggacgtccacatctgtcatggtgcacggttctgccatcgtctccacacgcacgccgatatcctctccgtgacgcacgccgacctctccttcgccccaccctcctccccacgccatcggcgccgcaatcatcggatccaccccagccgcgccccattccatcctaccatgcccctgcccgcgtctgcctcatcatccccgcccacccccgaaccccgcgcccctcccgagctccgtcgcatcatcccctcatttccctcagaaccccgtcgatccgtatgcgaggaggaggacgacagccccgagcccgtcctcatctgcctgcttgagtccgtcggccaggtcgttgacgacctccgtgccgccaccgctgggctcctctcgcatgccaacaaggccctccgtatacaggctctactgagtgcaccaaatccagatgaccctctctccgataacactgcaaagcactggaaatccaatgaggtagaagctgttgaaacaggtaaattgaagacaccttctctaccagtgttgggttctcttgtccctattgttggtggagttgtattggcgtcgatgactgaagtttcattcaactgcgacgacagctcctaccgcgggtgcggcttcatgtcgcagtcgcagaagttctgcggaggctccggcaggatctgcgacgccctctgcgacgattcgccgccgccgcctactcccgcacccccttctccgccgtcgtcgtcgagtagacgcgtgtccaaggcctggatcgcgttctgcgtgcttatattccctttcgtagacctcgacatcaaatattttgacctcgggcttccacaccgtgatgctaccgacgacaaagtcacagtggaggctgcggaggccacactcaagtaa

SEQ ID NO: 33517 - DNA, 210 bp, Zea mays
  Peptide Sequence Number=SeqID_76892
atgtcgggagaagaatcccaagggaaggagatggacaaccataaggagaaggaagtggataagacgcaagatgaaaagcccatcgactcgcaccgcaagaaggatggcaaaaagaaaaggatgaagaaggtcgtctactacaagaccgactcatctacatctccatcaacatcaaatcaagaacaaggcaacacaattgttaatggttaa

SEQ ID NO: 33518 - DNA, 138 bp, Zea mays
  Peptide Sequence Number=SeqID_76893
atgaggataatccttgagctgaaggtcttcctgagagaagaacttgagccgcctatgattgggagcaccagcttcgtggctgaaggtgctacaacttggttgttgtgcgaagccatcgtcacaactgtggaagtataa

SEQ ID NO: 33519 - DNA, 375 bp, Zea mays
  Peptide Sequence Number=SeqID_76894
atggcacaccaagaaagtcgtctcccagtggtccgggtattccccacgactatgatggtagaccacacagcgatactcgatggaccaagtgtgtcggtcatgtgctcagtgcagcaaggtgtcaagtgcatcgtggaagtgacacccgtgagcggcgtcacgagtgatgggtcgggcgacccatccctccagctcctgctcctcggagaggggacgcctccagcgggggcacatgagagcaacacctcacaaattctacctcctgctgaggcaaggaggaagagccctgctgctccagctcctggtgccgacgctcctgctcctcgtgcaggcggtggtgcaacctctccaagtggctggactggcagtcactag

SEQ ID NO: 33520 - DNA, 633 bp, Zea mays
  Peptide Sequence Number=SeqID_76895
atgcaggatgccacatggcgtgcactttctcactactgctcagtgcttggtggggtggccgatggtcttgacctcaggtattacccacgccgtccattaggtagcactggaggcgtggttgtctcacatgttggtgaggacaatcctaggttgagcagcatagtcaacctagccgccgtgctaatcacaaagctggaccacactttcgatgagctggactctgacagccatgcaataggtgcagcaacagcagcccccatcccaacctcaactgcaagtgtagatgcctcagattccctacactatccactgatgaatcataccttccccgcctttcaacacctgattgacagagcaatcatgactaagaagaagcgcgaggagatggacgatcgaaagcgtagattggtggacctcagcctgggagcaacaatcgcccccatttctcatgtaatccacctcagcaattcaagcagagtcaccctcagggatatcagcagcagacccaacgtctgcatcagcagcagtaccgctagaacagtcagccagaagggagtgagttctagaggcagaataatcaggcacctcgtcttcctgtcccagcaaccaatcagggcagtcaagcagccttag

SEQ ID NO: 33521 - DNA, 546 bp, Zea mays
  Peptide Sequence Number=SeqID_76896
atgcacgagtacgcgacccgattccaggcaagaggtggaggtatggcgccgccgcggaatgaagatccgatggcgcagctgcttgccaagatcgaggagggcaacaaggagacacatcggcgcatggagacgatccagtcgtccatggcgagcgtggaggcaacagtgaaagggatgatgaaggaacaaggtgaatttcgcaagtggcgtccagaagtggaggcgaaggtggcggaggtggcagaggccttgaagacaattcaatctaaggtggatcaattcggtccacagccgctggagggcgatccttctggcgtgagcaaagcgaagggaactgcgtcgaccaccgcccaactgggggttccaccgatcgacgcgacgcaagggcaaaatcgccaccgcttcactgaaaatcaccggagatcgggtgttgggatggaaaccatccacacaccccctccggtcggaggaagacgtgctgttgcacgccgggcgccgggacaccagaagatcagagttcagttacccttctcgactgtcctctag

SEQ ID NO: 33522 - DNA, 393 bp, Zea mays
  Peptide Sequence Number=SeqID_76897
atggcgggcagaaatacgctcgccggagctaaggaacggtggctggccgatgagggtgagtgcggggcgaagagagggataaaccttcatggcaaggtcactcgtgtgtcacgggtgataaccaacgagcagttgtgtagttattgcgaggatccgttcgctcagagccttggatcatcaatgtcgagttctccacccaatcaagttatcctacctcatggaagatcgggccttgccttctatatagtggtatcaagaatcaggttgcccgtgagagaacgtcattatcaaggagttatttgtactggaattaaatctgattgggatcctaaaatttcggagcagtctgttttcggggtcattatctcccactttcgttatccaaacaggtga

SEQ ID NO: 33523 - DNA, 743 bp, Zea mays
  Peptide Sequence Number=SeqID_76898
atggcgaacgggccaaaaacggattttcggccacggccgcgaaaacgggcacgtggaagggcacgggaccctcccgtggtccccccgcgtgagacgtggaagttcgggacttcccccgaagttcctgggaggggggtctcctcggccgagccccgcaccccctcgcggcctagccgtggccggtcggcaccctaccgcgcccagctccggctggcgctgttggctgcctggccggccgtgcggctacgctggcgcatgagttgtcttggacccgtgactgcttggaggacccccgctgccgtgcggccgactcccggcgcccgtgtcccatcactcgtgcgggcatcctgtgcctgctgcgttgagaagtgcttgcgtgctgctacccgtcccacgggaagccgtgctcgatacacgttgccttcgtcgagctcaccccccggggtgcggctcgtcggctcgagagcgcccgcggcgtttgcctcgtgccgccgtcggcctatggccggcggcaccgaggacacctcgctggcgcttttggtctcggatgtggctcacgctgaaggccggagacgcgttggcgtcacgcgcccaagaatcggtccgcccgaacgaacgacgtccagcccggcacgacgcctccgcgcggaggccggcgctggcccgtctgcgaggacgtgctacctggttgatcctgccagtagtcatatgcttgtctcaaagattaagccatgcatgtgcaa

SEQ ID NO: 33524 - DNA, 591 bp, Zea mays
  Peptide Sequence Number=SeqID_76899
atgaagaacgtagcaaaatgcgatacctggtgtgaattgcagaatcccgcgaaccatcgagtttttgaacgcaagttgcgcccgaagccttctggcggagggcacgtctgcctgggcgtcacgccaaaagacactcccaacacccccccgcggggcgagggacgtggcgtctggccccccgcgccgcacggcgaggtgggccgaagcaggggctgccggcgaaccgcgccgggcgcagcacgtgaggcgtcctcagcgacggaccgggcccaagttctctggaaagggacgcctgggagggtgagagccccgtccggcccggaccctgtcgcaccacgaggcgccgtcaacgagtcgggttgtttgggaatgcagcccaaatcgggcgggttcgagttggagcacgcctgtcgggacccgaaagatggtgaactatgcctgagcggggcgaagccagaggaaactctggtggaggctcgaagcgatactgacgatagctggagcccacacgagttctatcgggtaaagccaatgattagaggcatcgggggcgcaacgccctcgacctattctcaaactttaaataggtag

SEQ ID NO: 33525 - DNA, 607 bp, Zea mays
  Peptide Sequence Number=SeqID_76900
ggccgttcggccttgcgcctgggctgaaaacaaggggttcgccatggcgcacgggccgaaaaccgagaactccccgaagtcctgggagggggtctcctcggccgagccccgcaccccctcgcggcctagccgtggccggtcggcaccctaccgcgcccagctccggctggcgctgttggctgcctggccggccgtgcggctacgctggcgcatgagttgtcttggacccgtgactgcttggaggacccccgctgccgtgcggccgactcccggcgcccgtgtcccatcgctcgtgcgggcatcccgtgcctgctgcgttgagaagtgcttgcgtgctgctacccgtcccacgggaagccgtgctcgatacacgttgccttcgtcgagctcaccccccggggtgcggctcgtcggctcgagagcgcccgcggcgtttgcctcgtgccgccgtcagcctatggccggcggcaccgaggacacctcgctggcgcttttggtctcggatgtggctcacgctgaaggccggagacgcgttggcgtcacgcgcccaagaatcggtccgcccgaacgaacgacggccagcccggcacgacgcctccgcgcgtag

SEQ ID NO: 33526 - DNA, 1179 bp, Zea mays
  Peptide Sequence Number=SeqID_76901
atggatgaaagggaggctcaaccaagacatttacatgagttgtctgatgtgagtagggtggcagagcgcttccagtctgctgattcacaattcttccatcgtctctcagtggaatgctctcagaaggagaggcagcggaaggtttcttggggtggcgcaatggagaggcagcattctccatcatccctagagattggaatggaaatcctggaaagcttcagagacccggaattctggtacgttgagcaaggtatcgctgcaccagactgcgacggctctgcctccttcaggatggctttccaccgccgtgatgagaagtggtggctcccggtgcctcgtgtgcctcccggtggccttcacaacaaaacaaggaagcagctccaacacaagcgtgattgtgcaaaccaaatcctgaaggctgccatggccatcaacagcaatactttagcagagatggaggtccctgaaccttatcttgactccctaccaaagaatggacggtcaaccttaggtgatatcatataccgctacataacctctgatcagttctcccctgagtgccttcttgattgcctggatttgtccatggagtaccaggccctggaagtcgcaaaccgtgttgaggcgtcaatgtatgtgtggcgccgaagggttgctgccaaaccacaaaggtttcctggattgacacagacaagcctggacatgagcaaaattcagtacaacaaggatgtgggcaaatcaatccttgagagctattcgagggtgttagaaagtttggcttcaaacatcgtcacccacatcgacaatctgctaaacatcgacgagctgaacggacacgctgaacatttcgcagcaacagagtttcggaatactaggctggagagatcagaggcactgaaaaatgatctggaatggttcaggcaacagggccacacaattccaaaaccatcggcccctggcaccacatacacttctctactggaagatctgtctgaggaggacccccaggcctttatctgccatttctataacgtgtactttgctcatactgctggaggccgaatgattggcaaaaaaggtttccgagaagattccaaagacctggagttctacaagtgggagggcaatctctcccagctgctgcagaacgtccgcaacaagcttaaccaagtcgcttcg

SEQ ID NO: 33527 - DNA, 822 bp, Zea mays
  Peptide Sequence Number=SeqID_76902
atgcaggcggcatgcagccgcaccaagggggcgcaccctttcgacttcaacgcgtccagcaaggaggcccaggcccacacgtcatgcgggcggaagcagcagtcaagtcgtcagcaagctcacgtcccctcctgggacagcgagagagccctctcccacggcgtgaagacgacgcgcccgtgttccgttccccgaacggctcgcgcacgcacaacggctgccccgcgaaccactcgtgccgtcgcattaactctgcggcaggacaggcggcacatttggcagtcgaagcaggcgatgcttcacctccaccatgatgaccgcgtcaaaaaagggaccgggaaaggggatactccgaaagggatccttctccccgaaggaagcgggccccgagcccccctactgatcagaggttcgaaggctggcccctcggaagggttcaacagccgcctcagagcactcgggctccgcgcccactactggtcagaggttcaaaggcgtgcccctcggaagggttcaacggccgcctcaggccacccgggctccgcacccactactgatcaggggttcgtagggtggcccccgaagggttctgacatcctcctcagagcactcagagcgagggatgaccctgggtacgttcgatacataaccaaggctcgggctacgctcccgagggctgctctcgcaaacccggctccggccaaaccgttgacagcttcaacataccagcccgagaacttgggtctcgactatgcacccaggctacgaccagttcgcatgagggaacaaccagaccggccgaagcatcacgaaacatgctaa

SEQ ID NO: 33528 - DNA, 960 bp, Zea mays
  Peptide Sequence Number=SeqID_76903
atggctaccgcccgggggatcaatccctttttaaaggcggctctccctcaagcgtcgggggcaaagtcttcaccaacatgctccagggtcctccccctacgacgcgggggctgggtcccacacgtcatgcaagctggcccgggatggaagaagccgaaaccaccgcacgcggagcgtgtaaccgccccgcggttacaagcactcctccatcctcgccgaaaccagcggttgaaagggcggaccgacatgcaggtggcgtgcaaccgcaccgcgggggcgcaccccttcgacttcggcgcatccagcatggaggcccaggcccacacgtcatgcaaccggcgcgctgggaccgggaaaggggatatttcgaaagggatccttctccgcgaaggaagcgggccccgagccctcctactgatcaggggttcgaaggctggcccctcggaagggctggcccctcaaaagggttcgacaaccgcctcagagtactcgggctccgtgcccactactgatcaggggttcgaaggttggcccctcaaagggttcgatagccgccccagagcacgcagagcgagggatgactctgggtacgtccgatacatggccaaggctcgggctacgctcccgagcctcaggcgcaacaggaagctctgcctcgcccgaccttgggcctcgacctcaggaggaggtctccgcctcgcccgatcccagggctcagccccggcctcggcctcggaaggtggtctccgcctcgcccgaccccagggctcggcctcaacctcagcctcggaggatggtctccgcctcgcccgaccccagggctcggcctcaacctcgacctctgaaggaatcacgtccttacccaaccccggcctcggcctcaggaggagtctccgcctcgcccaaccttgggctcggaccgaccacgacacagggggtacatcattgccctacccctag

SEQ ID NO: 33529 - DNA, 1305 bp, Zea mays
  Peptide Sequence Number=SeqID_76904
atggggagcgcccgcgttgccttcgtcttgttgttggagaagcgcaacctcgcggaggtcggcgcccttcagccatcgctcggcttcaaggattttcatcagggcaggggtcgagctgagccggagttctacctcccgcatgggccggcgggccacctcttccttcagcattcaggggagagggcgctcaccggcctagcggaggggcggactttgacaacgcggggccggtcggccgcaagcgtcgtcagctccagcatgcctggctcgctggctcagctggctctggcgctgcttccggtgccacctcccaccgctggggcagagcgtggctgcccgcccaccgtacgtgcggctgttgcgctgtgcgcaccgggggaccgtccaagacgtcgcacgccgctagggcggcgctcgtgttctaggattgtcttgtccttgctccggcacgatgcctccgcgcggaggtcggtgcctgcccgtccgcgaggacttgagtggggatctgccggtgcaggctggggggtcactcgcgaacagacctccggctctttggctttgacggcttgtcatcgcccctcgtgtggggacgtgggcgagggccttcccacaacagcatttgccctgaggtcatcgctgctgctgttcagccgcctgaggcggaggtcgttgtcgctgctgctgcagaggtcgccggcgagccacccggagtttgtcgtcccgcaggccctccaatgtggaggttgttcatacccgcgggagtggaaccggagttccgtttgtaatggcaccttgggtgccggttcggccttgccactcaaggcttctcttgctcagttacggaacccttggctgctctgcgatgagccagagccggaggcagcggtgtcagcatggacagaggcggagtcggctcgaaaaggtgcttcatcgaccaaggagcaggtggcttcccaggccgaggaggtgcagcagcggcggctggagcctggccaggtcatccgtgagcgggaccaactttggagtcacgcttccgaggccgtgagcggggctgatgtcctcgggggacagctggctgaggctacagagcggccagctgaggcgtctgctcgggccgggaccctggaggagaccctggctgcgatggcccaagcgcgaatcacttacccgagcgagagttacttatcgctgaaggtgatgagtgaggaccccgctatcgaagcaatcgaaaagcgcgaaagatgttctggcagaaagactttttccgaggaaaattttgacgcagagggggttccccccttctag

SEQ ID NO: 33530 - DNA, 504 bp, Zea mays
  Peptide Sequence Number=SeqID_76905
atggggagaggcaagccgggctgtgatcttggtcccgccctcagcctcgagggtgttcgtcatcctcgctggggcggggagcgaggcgagccggggctctacctcccgcgcgggccggcgggccacctcttcttccagcttctggtggtggcaaacatcctccagctctgcggaggagacgtcctccagccatgccggggaaggcgaactattgctgcccagctaggatgcaacattccgccctcttcctcgctttcgcggcaaggacggcagcgaggacctactggtgcgctttggagcagcccgctctttggctttaatagctggttcgcgtcccttgagcgggaacgtgaacgagagccctccggcggccgcgtccatcctgggaccatggctgctgctgcagaggtcgctggcgggtcccccggcgttcgtcgccccgcaggctcccctgtgtggaggttgttcatacccgcgaggacggaaccagagttccgtctgtaa

SEQ ID NO: 33531 - DNA, 801 bp, Zea mays
  Peptide Sequence Number=SeqID_76906
atgagctcgccctcgggtgctgtctccgcctcgcccgagctcggccttggctgcctgctccaccgcgaatctcgcagggacgctgacgcatcccgtaagcaggctttttacccataccgaagccctgttacaacaactacggcatggacatcccctcccctgggggctcgggcgtacagcccacccctcggcctcggctctcagcaggaaaacaacaagctcaagtcaacaacgcagcgcaaggtcatgtcacccacaggacgccaagacatctcccctgggaatgcgacgcccctcatctcaaacaacgctgacggaaggtatgctcaactgtcagtaatctacccctgtttcttggcatcaaggatgcttggaagtgctggttttccatggttttacggagccatagcccccttccggaacgaggacagcttgacaatagcttacgttggtgctggactcgctttgtcgattgtggcttatgattaccaggagattgcaccactggtgatagtgttctgcatcttccatgcctgtgtgggcttcattttgccgtcactggccagattgcgaacaatgtacctgccaaatgagctgcgagggggcatgatgagcttttcaatgtcactggcaaatgccgccaccttcgttttcttgatacagggcagcgcccaccatcgacacgttgcaaactcaaccatcctgagccttgcgtcctatggcctgttaggagctgggggctgcgtccatatgttgaggaggtggaggaagcacactcggctgaatgcccgtagtctgtag

SEQ ID NO: 33532 - DNA, 1677 bp, Zea mays
  Peptide Sequence Number=SeqID_76907
atgggcaagaaggcgtggctcaccgccgtcaagcgcgccttccgctcgccctctaaggacgacagcagcagccccgccaggaaggcgtcgcgcctccgcgaggacgccgacggcgaagacgacaaggggaagcgggagcggcggagatggctgttccggaggtcctcgtccccgtcgccggccccggcaccacccgcgccggcccccgcggccgtgacggaggagcagcggcacgccatcgcgctggccgtggcgaccgcggccacggccgaggcggcggtggccacggcgcaggcggcagccgaggtggtccgcctcacgcgccccggcggccacgccgccgcccccagcttcgcgcgccgcgaccaccacgccgccgtcgccatccagaccgccttccgcggctacctcgcccgccgcgcgctgcgcgcgctcaggggcctcgtcaagctgcaggcgctggtgcgcggccacaacgtccgcaagcaagccaacatgacgctgcgctgcatgcaggcgctggtgcgcgtgcaggcccgtgtccgcgaccggcgcatgcgcctctcccaggaatccgtgctctccatgtccggcggcggcggcggcgccggcgccgcgccgtgcggcagcagtaagtcgtcgtacagcgtcgacacgtccgccttttgggaccccaagtacgcccacgactacgccgaccgtcgctccgttgagcggtcgcgcgacggcagcagcttcgccgccgacgactgggacgaccggccgcggacgatagaggagatccaggctatgctgcagacgagaaaagacgcggcgctcaagcgtgagagggcgctctcctacgccttctcacaccagttcatcacccatcgttcgtttatggttgcaaacaaaacaaagattcggaggaacccagcggcgccgtcggcggacatggacgtggacgtggacgtggacgggcagccgcggtgggcggagcggtggatggcgtcgcgcgcgtcgttcgacaccagccgcagcagcgtacgcggggccgcggcggcggcgcccgggcgcgcgtccatggagcagcaccgcgagccggtgaagacgctggagatggacacggcgaggcccttctcgtactcgacgccgcggcgtcacgcgggggcgtcgtcgccgatgcaccgcgcgcagcagaaccagcatcatccggcggtggccacgccgtcgcctgtgaaggcgcggccgccgatccaggtgcggtcggcgagcccgcgcgtggaccaccaccaccgcgggactggcggcggtggcgggagctacacgccgagcctgctgcactcgcagcggcacgcggcggcggtgcccaactacatggcggcgacggagtcggccaaggcgcgcgtgcggtcgcagagcgcgccgcggcagcgccccgcgacgccggagcgggagcgcgaccgcggcgccaagaagcggctgtcgttcccggcgcagctgcagcaccaggtgctggcggcggagtacgcgcagagcctgcgcagcccgagcttcaagagcgcggcggggcggttctcgtcagagcagcggtccaccgtgtcgtcgtcgtgcgcggacagcctcggcggcggctgcggcggggacgtggggtcgccgtcgtcgtccgccgcggacctccggcgctggctccgctga

SEQ ID NO: 33533 - DNA, 537 bp, Zea mays
  Peptide Sequence Number=SeqID_76908
atggggaggctagaaccccgggcagaatgggaatcatggcttgtgggtaaaatggctcgtatcaggtgcactgcacgtaagtctgtgatcccctttttgccttctcgactggcagagcttcccctgcatcgcacggtgtcaggtcagtccagtcacctggagagactgcatcgtcgcctgcacgaggagcaggagcgccgacgccaggagcaggagcagcaggactcttccccctcgcctcaatgggaggtggagtctgagaggccgccttcccctgcacctcagccagtgatgccccctgcaccacctcagggcatcctggttgctggaggagaccctgacgaagacagagacgacgacggtccagaggccttctcagagcactattctatcactaagagggacactgccgaggcagccatgaaggatgcagcacgacagtcactttctcagtattgctcgttgttcagtggggtagctgatggccttgacctagagtactaccctcgcgttcgaccgacagtgctggaggtgtga

SEQ ID NO: 33534 - DNA, 531 bp, Zea mays
  Peptide Sequence Number=SeqID_76909
atgggcgcgattaaggtcaaggctcagtccactcaagggacacgatctcgcctcgcccgaacccagcctcgggcaaaggcagccgacccaggaggattcacgtctcgcccgaggatcccctcaagcaacggacgcaccttcgactcgcccgaggcccagctcgggcaggcttcgcggagaagcaaccttggccagatcgccacaccaaccgaccctaagtccagcctcgggcgccataggaagctccgcctcgcccgaccccagggctcggactcaacctcgacctcagacgacggactccgcctcgcccgaccccagggctcaaactcaacctcgacctcggaagacgggactccgcctcgcccgaccccagggctcggactcaccctcgacctcggacgacggtctccgcctcgcccgacccccgggcccggactcagcctcgacctcggaggagcctccacctcgcccgacctcgggctcggaccgaccacgtcacaggggggccatcattaccctacccctagctag

SEQ ID NO: 33535 - DNA, 1335 bp, Zea mays
  Peptide Sequence Number=SeqID_76910
atgtcggatcggcagccgtcggaggagccggaggagcaggtggacctggagggggacgacgacggcatggacgacgacgacgccgggtaccgtcgccgcggaagccgggacgactcggaggagcccgaggaggatgacgacaatgacgagcgccacggcgacgccgacgacgacgccgggatggagccggagccggccggaagtaaaggcggggatgacacgggcaaggggcccgacgtcgccggtggcgggcccgaggacgaggaggagaggagcaagtgggatgacatgctcgccctgccgccccatggctctgaggtcttcattggtggcctgccccgcgacatcacggaggaggacctccgtgagctgtgcgagccgttgggagaaatatatgaggtgaggttgaccaaggataaggacacaaaggagaacaaggggttcgcctttgtcaccttcatggacaaggaggctgcgcagcgcgccatcgaggatgtgcaagacagggagttcaaggggaggactttgcggtgctctctgtcgcaggcaaagcacaggctgtttgttgggaatgtgcccaaggggctgagcgaggaggagcttaccaacactatcaaggggaagggtccaggtgttatcaacattgagatgtttaaggatcagcatgacccaaaccgtaaccgtggcttcctctttgttgagtattacaaccatgcctgcgcagactatgccaggcagaaactttcatctccaaacttcaaggttgatgggagccagttgactgttagttgggctgaacctaagggttcaacagatgcttcatctgcagctgctcaggtgaagactatatatgtgaagaacctacctgaaaatgtttctaaagagaagataaaggacctgtttgacaaacatggagagaaagatcaaagtgcattgaaggcagttaaaggaagtgaaaaatatgaaatcgatggtcaagtactggaagtgtccatggccaaaccattggcagataagaaacctgatcattcacacaggcctggaggaggccctaattatccccttcctccctatggtggtggtggctacatgggagatccatatggtgcttatggtggcggcggtcctgcatacaaccagccaatgatatatggcagaggaccagcaccggcaggaatgaggatggtgccgatggtgcttcctgatggccgccttggctatgtcctgcaacaacctggtggaatgccgcctccgcccccaccgcggaggggtagtgaccgaagagacagtggcagaggtggcgaagggcacagccggcgatatcgcccttactag

SEQ ID NO: 33536 - DNA, 1782 bp, Zea mays
  Peptide Sequence Number=SeqID_76911
atggcagtcatgcaagggcaagcaggagcaacgcgtgtcgccgtctccctcgtcttgctcctcctggcaagcctcaccggcgggagccccccgccggaaccggtgtcgtgcgcgcggggcacgtccgactgcacggtgacgagcacgtacgggtcgttcccggaccgcgccgtgtgccgcgcggcgaacgcgacgttcccgcgcacggagaaggagctggtggcggcggtggcggcggccgcggcgtcgcggcgcaaggtcaaggtggccaccagccactcgcacagcttcccgaagctggcgtgcccgggcggccgcgacggcaccatcatcagcacggagcggctgaaccggacggtgcgcgtggacgcggcgcgccggctgctgacggtggagagcggcatgctgctgcgggacctcgtcagggccgccgccgacgccgggctggcgctgccgcactcgccctactggtacggtctcaccgtcggcggcttgctggccacgggcgcccacgggagctcgctgtggggcaagggcagcgccgtgcacgagtacgtggtcgcgctcaggatcgtcacgcccgcgccggcctcccagggcttcgccgtcgtcagggagctcgtggccggcgaccccgacctggacgccgccaaggtctcgctcggcgtcctcggcgtcatatctcaggtcacttttgagctgcagccgcagttcaagcggtcggtgacgttcgtgacgcgggacgacaaggacatggcggagaagctgtccgtgtggggcggcctccacgagttcggcgacgtgtcgtggctgccgcggcaggggaaggccatctaccgcgaggacgaccgcgtggacgtctcgacgccgggcaacgggctgaacaactacatcggcttccgcgcgcagccgacgcttggcctgctgaccgccaggaaagccgaggagcggctggaggagaacggcaccgacgtggcgcggtgcctggcggcgcggctccccgcggcgacgttcgagctgcaggcgtacgggttcaccaacgacggcttcttcttcacggggtaccccgtggtggggttccagcaccggatccaggcgtccggtacgtgcatcaacggcgccgacgacgggctgctgtccgcctgcacgtgggactcccgtgtccgcgggcccttcttctaccagtcgggcttcagcgtggccatgcccaaggtgcccgcgttcgtggccgacatgcagcggctgcgcgacctcaacccgcgcgccttctgcgggatggacgccaagatgggcgtgctgatgcgctacgtgcgggcgtcgtcggcgtacctgggcaaggcggaggactcgctcgacttcgacgtcacctactaccggagctacgacgaaggcacaccccgcaagcacgccgacgtcttcgacgagctggagcagatggcgctgcgcaagtacggcgcgctcccgcactggggcaagaaccgcaacttcgccttcgacggcgtcatcgccaggtaccccgcggcggcgcggttcctggaggtgaaggacaggtacgacccggacggcatcttctccagcgagtggagcgaccaggtgctcggcatccggggcagccccaacgtggtcggcccggggtgcgccatcgaggggctctgcgtctgctccgacgacctccactgcgcgccggagcaggggtacttctgccgccccgggaaggtgtacacggacgccagggtatgcgccttggagcgacgacgcacacgcctcgtcgacgagctgtga

SEQ ID NO: 33537 - DNA, 882 bp, Zea mays
  Peptide Sequence Number=SeqID_76912
atggagaagatctccgtcgccgtccactttcgccctcccaacctggtggccgctaacacctccccagccagttccggcggaggcagcgaccgcgagtggcgtatcgatgacacccacgtttccctcctccgccgcgccgccggccctgtccccggtgcctccttcaccttcgaccacgtcttcgacgatgcgacgaacaacgagcagatctatggcacggtcgtccaggaactcattggcgccgttgtcggcggattcaacggcaccgccttcgcctacgaccagaccagcagtgggaagacattcaccatgaacggctccgatgctgacccgggcatcattcctcgcgcggtccgcgacgtcttcgacactgtgctccaggctgacgaacgcgagttcctcatccgggtgtcctacatggagatctacaacgaggaaattaacgacctcttgacacttgaaggccagaagctgaagattcgggagagcttagatgtaattgagagcagtggtaaggaccagacagacgatggagatgctatccgcgtatctgttttgaatttggtggatcttgctgggtcagaaagaatcatcaagatagggacagaaggggtacgtttgaatgaggggaagtatattaacaagagcttaatgattcttgggaatgtcatcaataagttgagcgagaacggaaaacaaagtacaagtgggatctttcagaagggcaagattgatgcagtggtgagagatgtctcacgaagtcaccaggttgcggattcgaaacaacctctctttatttgcgagaaaggcttgcctcgatttatcccttccccagactctattcatgttgaagccttcggcattgggtcgacccttttttag

SEQ ID NO: 33538 - DNA, 114 bp, Zea mays
  Peptide Sequence Number=SeqID_76913
atggcggtcccgcaaccaatgcatgtgcctataaacaagaagagcaatacaggtcaaaatagattgccaggtcctaagatgtatgacatgaacatggatggcatagcggcatga

SEQ ID NO: 33539 - DNA, 249 bp, Zea mays
  Peptide Sequence Number=SeqID_76914
atggcgctgcccggcaaggaggctgggtatttgggggagtatcgacgaagcatcatggctcctaacgaagcaggggctgcgaccagcgcactggacgttgctggggggtcgcctgatgctggcgacggctgctgcctgggggcagcggcagagctcatgatcgtcgaaacctttgataccatattggtgggagctgcgttctctatgctgacgatatgtttccgttgcaacgcacgggcacccacctag

SEQ ID NO: 33540 - DNA, 366 bp, Zea mays
  Peptide Sequence Number=SeqID_76915
atgacaactgtccccatcgattccccgttcgcgtccaggcctcaccaccttggcatacaatgctccactgacctgggctgccgccgtgcagtgaccgcacttgtacccaccatagctagcatgggagacccagtctcaggtcgcatgagggataaagtccgcgcccggcttcactcagaaattacaactttggaggtgtatgatcttcttgagttaaaccaagttaactttacttatgtaagacccttgggtggtatacttggtaaattgggtcaaactttatctaagggcagaaggggtgctttgaactacaactattatttaacagtgggtaattctctaaaacttatttttgctggcttttag

SEQ ID NO: 33541 - DNA, 468 bp, Zea mays
  Peptide Sequence Number=SeqID_76916
atgaagccatgggcaaggacaagaagggtcagggttcaccgcgtcgctccggcgacaaacggaagcgtgaaccgagtccttcgtcggaggacttcggtgactccgagtactcagaagagaattctcctccgagtccgaggggtctccggtctacgctttcccccggcgtcgtccgatgactcggatgattcccaagggattgccgccgaggtgtggacgtacatccggtcggtcgagcacgtcgggctcgaaggttcggatgagttggaggtctccttgaacgaggagaactcttccgactcgtccgaggaagggagcggcggcgacggcaacgacaagtgcgacgacggcaatggcggtgacgacggcgatgacggcgacgacggcggcaagggtggtcaaggcgacggcggcggcaagggcggcagtggcagcagcaaggccagtggcaaagcgccactggcttaa

SEQ ID NO: 33542 - DNA, 147 bp, Zea mays
  Peptide Sequence Number=SeqID_76917
atgggcgccgaacatggtgtctccggtgagctacaggcgggttctctggaggacatggttgctggagtgacttggtcgtccatcttgccaccgggttggactgtcgagtgggaccccgcctcggcagaggaggagcatgaggagtga

SEQ ID NO: 33543 - DNA, 522 bp, Zea mays
  Peptide Sequence Number=SeqID_76918
atggcccaagggcacatttccctttcaggcttcaaggattttcatcagccagtccagctgtaccccccgccggcggtcacccaagatgcttcaaggatgttcatcatcctcgctggggtggaggccgggctgagccggagctctacctcccgcgcgggttcgtgggtcaccctctcctgcggcgttcgagggagaggggcgctcgctggccttgcaggcgggtcggacttcgacaacgcggggctggtcgacggcgggcgtcgtcagccccagcgtgtcgagctcgtcggcttggctcccgatgctccctcctgccggaaggcggctgtcgcgccaggtcggtgccccattcgtccgggaggatctgagtggggatctgccggagggctgacggcccctgtcgttggtgccgaggtggatgcggctcgagaagtccccgtcgccgacgggatcaccgccaccatcagcgcttcgggcctccggctctttgtacttgtcctcgcccctcgagcgtcggcatag

SEQ ID NO: 33544 - DNA, 234 bp, Zea mays
  Peptide Sequence Number=SeqID_76919
atgggcaaaaacaacaagcacaagcgcgagccgactcctccgtcagaggactttggcgactcggaatactcagaggaggagttctcctctgagtccgaagggggcggcagcaggggtggcaacggcggcagcagcaggggcggcgacggcagcagcaggagcggcaacggcggcagcagcagaggcagcggcggcggtggcagcagcaagggtagcaacaaggccagtggctaa

SEQ ID NO: 33545 - DNA, 117 bp, Zea mays
  Peptide Sequence Number=SeqID_76920
atgcaggcggcatgcaaccgcgccaagtgggcgcgcttctccgactcccaacacgcccagcatggaggcccagggatcgggaaagggggaaaccctgaaaagggtccttccccatga

SEQ ID NO: 33546 - DNA, 162 bp, Zea mays
  Peptide Sequence Number=SeqID_76921
atgtcgcgtgcgttcgacgactactatatcgaggattgtggcgtcatcttggcgtcggaggtgacacagaggaggatcgacaacagtgaccagttcgtcatcctcgccaccgtcaggggctactacacatcattcatcatggccataggaggtggagcatag

SEQ ID NO: 33547 - DNA, 1458 bp, Zea mays
  Peptide Sequence Number=SeqID_76922
atgactctcgacgtcaagctcatcctcgacgagttcaacaggaggttcgacgagtgggagactcgctgggaccgacgcttctcgtctgccgcgtacatcgaccaaccgcccagtgtcaaccacccctccgatgcagctgcccgcacgccgcccacccgggctgcagccgttggggtcgtcgtcatcgccgacaactggggcggatgcttcgatgacggcgagcggtactgcgcagcgccatccgtcatcgccgacgactggggaggattatttgatggcgaggtcgcgactgtcaacaccgagttcgccgaccactggtacggcccaacctccaccgaccccgacgcaccgcacgatgcggacgccaacagcttcttcatcaacaccggcgaagggcccgtagagccagtttttggcgatacggccgtaggcgcactcggtgacgtgggcgctgtcccagatctagtggcggaggaggaggtacctgtcgacacgcccaccaagtgtttgatgagagtcctcaatcgcggcgactactacggcccagacgcttcctccgccgtcgacgcggcggtggtgctgctcgctgaagcgggctgcacgctcctcatcccgccgcaccacccctcggtccccgccccgtgcctcctcgagggcctcgctgccttcgcggcctccttgcctgcgcggctccaccagatgcttctcccgacggccctgcacatgccgcgcctcgctcgtgcactcctctcctttcccgcgctccactgctcactcgagcactcacagagaagtagtgcttggattgatgtacaacaaaaatctccatggccaccacctacactaggctttatgcacagtgatgttgttcaattaaggccaacgccatggcctcccttcagactgcatggtggggttgattggattacttcttatggtggatatatgcatgccaatggtgacaacattctacatcaagaattgggggtggttaatcaatgctcctataattgggctgttgggaaatttctggagttactggattctacaaacaacataacgaagcagaaaccattcacatcccttcagcaaattgaggagggcattctggttggagcatcaattaacaatgagggaagaaaaatagagataaatgtacactatggtcttctaggggcagatggcgcaagaagtacagtgcatgaattggcaggtatatctttggaaggtgaaagagacttgctgaaactggttctcgtttatcctcctcaacggatgtttgaagaattcagtgctaagttatcattgaacaaagatggaggtgcaggaaagaatttgtatattattacgacagttttattccagctagaagtgcttctacatataacagttttttgtgaggtttccgcggtcagcaataagttcatcaccttcccttggaatcctggtgtttcaaag

SEQ ID NO: 33548 - DNA, 117 bp, Zea mays
  Peptide Sequence Number=SeqID_76923
atgggagaggagcagctcaagggaggcacatacaaggatgctgagccccgacatgtgggtccaggagcaaaatggaaggaatacattataggagtaactaatgcaagtaacgcctaa

SEQ ID NO: 33549 - DNA, 396 bp, Zea mays
  Peptide Sequence Number=SeqID_76924
atggcgaggctacgcctggcggtggtcgccgtcgccctggccttgtgctgctgcctcatgatccacgcgccgacgacaggtgccgctgctgccgccgacgacgcctcgtttcctcctggactggaggtggcggcgcagcagcaggatacccgagtggcggctccgccgccgtcgtcgtcgccgggcgcacaacaccatcagttaaatacactctactggatcggagtgacaacttcatcgttctcgtacgtcattcaggaggccgccggcggcgccgtagctgcggaggcggcgcccgtcgggaggaagaggacggagctggagctggtggaggactaccctggctccggcgccaacgaccgccactcgccgtgggcacagaagcggaggaactga

SEQ ID NO: 33550 - DNA, 684 bp, Zea mays
  Peptide Sequence Number=SeqID_76925
atgccgtcgtccaggcgctcgagcgctggcaccatctctttggtgcgcactaccgccaactccgcctggccgttgagtacctcaaggagtccgcgcgcgtccagttctctggtctgcgggccaccgttgatgcttgtgcagctcgcggagatggatagttcctgggatcccgcgacagagagcatgggcatgagctcgggagcgggcgatgatggtggggcggcgatggatggttcctgggattgcgcgaccaagagcggggcaagggggagggacatcatcatgcccaacttgaagtcgtctgtgaccacaacagcgagcgcggtggagtacacagatgaagtcgacagccttgaggaggcagctaaagctaaagaagccggtgtagatgggatcattgatcagggatgtgaggcagggggtcatgtaattggtcagatcatcgattacgtcgacgtcaaggtgaacagcaccgtccacaaggggatgccacacatgttctaccatggccacaccagtcgcgtcaggaacaccaaatgtgacatcgacgtcgagataaacaagcagtcgaatttctacttgaaaaataacagtgtaatagctatgtttgtggttgtcgtggaggttactgttgcgggagtcttcaacaggtcacttgtgcctttcagcaggttggtcagttag

SEQ ID NO: 33551 - DNA, 431 bp, Zea mays
  Peptide Sequence Number=SeqID_76926
ccgtcgcaaaacctcctgtctttccccagatcgagatcgcaggcgtgaaggacagcggttaccagcagcagctcgtgcacattccccatgcactctgcccctgcgtttccgttggctggtgctgcccatggccggcacggtggctgggcctttcctgcgcatccctagtcatgtctccagccaagtcccactggtggccagtgcccgcgcaggtagttcgcgagcgagctccttggcacggcggccagcaaggcagcaacccggcgcggccagcggctcgcgaccagcgcagccagcagtcccttgcgcgcgcccagcctctcggtcggctccccagcgagctgcctgtgcccggcgcccagaccacgggcgtggccccggcgtgtaggctctgcgtgcccttgctctgctcgcacgagccccgtccctag

SEQ ID NO: 33552 - DNA, 294 bp, Zea mays
  Peptide Sequence Number=SeqID_76927
atggctggtgacgaccatgtggtggttgacgtgaacggcttagcaaaatccaaggatgacgggggttccaagaagctgtctgaggatgcaaatggttcggctccggctgctgcatctttgtcagcagctgttgacttggtccaggaggaggaggaggaggagggtgatggggaggaggagccgctaatccaggccgcggagtgccgcatatgccaggaggaagatagcgtgaagaacctcgagaaaccgtgtgcttgcagcggcagtctcaaggtttacaccctacttaattaa

SEQ ID NO: 33553 - DNA, 249 bp, Zea mays
  Peptide Sequence Number=SeqID_76928
atggaccagacatcccttaatgactctttatatgaccatacaatcattatgagggtcatctctgagctgaaggtcctcctgggagaagccggctctgagcatgagccgctggttatcgaaaacaccagcttcgtagccgaagatgcttcggcttggatgctgaacgaagccattagctcaaaagtggaagtgagttcaccagatgtgggcaccaatgttggagacttgttctcaaatgctatgaattaa

SEQ ID NO: 33554 - DNA, 345 bp, Zea mays
  Peptide Sequence Number=SeqID_76929
atggtgaacagcatccgagatcgaaccaaggtgcaggacatggagaggacgacgtgcagcctgatcagcgaacaggtgaagctcgaccaaagagagggagtggaagtggaggtccaacgttgcggcacgaccgcacgactgatgcgctttgctggaactgctgctgtatgggttgcgcacgcctggctgatggcaggagacggctgctggaggtttgaggaaaaccatatcaccgacttgaaatttgcgttcggtcctaagacgatcggccttcagcttcatgcggttctgggctgccgcaagctgctccctcaacatcaaggtaaactgagccctttccgctaa

SEQ ID NO: 33555 - DNA, 414 bp, Zea mays
  Peptide Sequence Number=SeqID_76930
atgtcggacgaccttgttgttcctgtccactttgaagttagccaagaactttgctttcgcctcctggatcattcgctccttgtgctcctcgaactggagctgctcgtcagccggcaaggtttcccaagtcggctctatgatgtgcttggagaaatatcagagctatcccttgaactggccattgggggccgatttgataagcttagatatgttttccccagcggagtcgccaaaaagtatgttgacgccttttcggagcgccaaatactcaagaagaacgggcggcggtgctctctgcacaggggcggacgctacgcgtcggctggtgtctgccttgcctctatcatgacgatgggtgccatgatggagaatgtagagagcaagggagtggaaccagaggaagctgaagtctga

SEQ ID NO: 33556 - DNA, 438 bp, Zea mays
  Peptide Sequence Number=SeqID_76931
atggcacccaagaaagctaactcgaaggctgacgaggctgcgaaggcagcactacttgccgcaagaaagggcaaggccctcgccctcacccaatccacccaccaagaggccactgaagacgacgttctccgcacctgcgaagacgacactctccgcacctgtggccctgaaggacaatcgcaaccacccccaggcttcgccccactggagggcgcggacctcaccgaggacggtgaagtcctcggcgtcttagcggaaagaacagctacagctaggcagaaagagatactggaggccaagcgccagcgcgtgtccgcactagccaaggtgcggcaaatgatacacgacgaagagcagaaggcccaggacctcgagcgggagatcgcgctgatgcagcgcgaaggccatcttggcctgcagcacgggccacccctgtag

SEQ ID NO: 33557 - DNA, 219 bp, Zea mays
  Peptide Sequence Number=SeqID_76932
atggcggtcctgcaagggattcctgcattggagcttcctataactgtagcgggttttctgaagctagtggaactttgtaaaggcctcgtagtgttaccctgcctcgcctcctcggtagagcaatgctcagctctaaccatcctctttggtaagccttacacttcacgtgagcttccacctttggcgagttcatgcacaatattccccacaacttgttga

SEQ ID NO: 33558 - DNA, 954 bp, Zea mays
  Peptide Sequence Number=SeqID_76933
atgcctgcctcgcctcctcctccgtcagcggggaaggtgacgggacagacccggatgttgctcttctgccacgaggggaagacgtcgtcgattccgccgccggcgggcgggctgatggccaccattgtcgttgtcgcgcggcgtaggaaggagtatcatgtcgtagctgccgtcgagggacatgaactccagactcccgaaacgaagcatcgtcccgggttgaagaggttgctggagactacccatctggagcttgacgggaagctgttcgtcaacaagcagcaggcccctacctggcgcgccaactgtcggcgtttcgaccctggggggtccctggaccgacgagtcggaggctcctccgaggtcgaggtcgagtctgggcccgagggtcgggcgaggcggagaccgtcgtccgtggtcgaggctgagtccgagccctggggttgggtgaggtggagaccgtcgtccgaggtcaaggctgagtccgagccctggggtcgggcgaggcggagtccgtcttccgaggtcgaggctgagtccgagccctggggtcgggtgaggcggagtccgtcttccgaggtcgaggctgagtccgagccctgtggtcgggcgaggcggagtccgtcttccgaggtcgaggctgagtccgagccctggggtcgggcgaggcggagtccgtcttctgaggtcgaggctgagtccgagccctggggtcgggcgaggcggagtctgtcgtccggcgtcgagtttgagctcgagccctggggtcgggcgaggcggagcttcctatggcgcccgaggctggacttagctgctgtcagcctcactctgtcgagtggcacagcagtcggagcggcgcaggcggcgctgttttcctgtcaggtcggtcagtggagcggcgaagtgactgcggtcacttcggctctatcgattgaagatcgcgcgtcaggataa

SEQ ID NO: 33559 - DNA, 201 bp, Zea mays
  Peptide Sequence Number=SeqID_76934
atggggacggttgacgtgtgtggggacggagtgcccctacatgtcgtgtgtttaggtttacctggcaaggtattcttagaaggagtaaacttaggtacgcttcaggatatggttgatggtgtgacttggcctaccaccctgccaccgggttggacggtcgagtgggatgctgctccagcaggagaggagcaagaggagtaa

SEQ ID NO: 33560 - DNA, 615 bp, Zea mays
  Peptide Sequence Number=SeqID_76935
atggagcacgcagggcgccatcattactcgtttatcggggcgagccagatggcacgccagtcttgttccccgtatcctgagctagctaggggtaggcccgaggtcgggcgagacggaggctcctctgaggtcgaggtcgagtctgggcccgagggtcgggcaaggcggagaccgtcgtccgtggtcgaggctgagtccgagccctggggtcgggcgaggcggagaccatcgtccaaggtcgaggctgagtccgagccctggggtcgggcgaggcagagtccgtcttccgaggtcgaggctgagtccgagccctggggtcgggcgaggcggagtccgtctttcgaggtcgaggctgagtccgagccctggggtcgggcgaggcggagtccatcgtccggcgtcgagtttgagcccgagccctggggtcgggcgaggcgggagcttcctatggcgcccaaggctggacttagctgctgtcagcctcactctgtcgagtggcacaacagtcggagcggtgcaggcggcgctgttttcctgtcaggtcggtcaaatggaggggcgaaagtgactgcggtcacttcggctctgtcgactgaagagcgcgcgtcaggataa

SEQ ID NO: 33561 - DNA, 750 bp, Zea mays
  Peptide Sequence Number=SeqID_76936
atgcagattattgaaagaaagtgcgaggctcaaaagggtgctgggataagatctaacctgaatttttatgtggttttgtggactgtaggaaaaaaaacgctcgataaactcaccgatcaacctggaaatctgataccaattgatgaagctgaggtgcccgatctttcggcgagtagagataattccgatttggcggaagatgacccttgcgatccgactacgacgagcaagcccgaggcgccaatgcaatcgctgaaccaactccctgtgttcaattctcttgcacgggcccgagtcactggcccaggtggaaggggtggcgcctgggctggagaaggtgctgctggtgtagatgtgctcgtgttggtgttgatgtccgcatcagcgtcgactccacctttggcggaatccgacccggcctcgaacggcaacacggtcggaggatctccacctcgaaggaacctgttggcaccacgcctgggccatcgtcgtcggggtctccttcgggaacccagcccgagcagacgggtcggccggccgctccgtagcctcagccagctgtcccctgaggacatcagcccggctcgtggcctcggcaacccgactccgggttcggtcccgccagtggacggcccagccaggctccggccgacgaagcttctttttgagccaactctgcctctgtccgtgctggcaccgctgcctccggctttggctcatcgtagagcggccaaaggttcctttaactaa

SEQ ID NO: 33562 - DNA, 345 bp, Zea mays
  Peptide Sequence Number=SeqID_76937
atgtcctcaggggacagctggctgaggctacggagcggccggccgacccgtctgctcgggctgggttcccgaaggagaccccgacgacgatggcccaggcgtggtgccaacaggttccttcgaggtggagatcctccgaccgtgttgccgttcgaggccgggtcggattccgccaaaggtggagtcgacgctgatgcggacatcaacaccaacacgagcacatctacaccagcagcaccttctccagcccaggcgccaccccttccacctgggccagtgactcgggcccgtgcaagagaattgaactacatcatgttgttaaagaacgaaggcccggaagaatag

SEQ ID NO: 33563 - DNA, 603 bp, Zea mays
  Peptide Sequence Number=SeqID_76938
atgcaggcgacatgcaaccgtaccaagggggcgcaccctttcgactccgacgcgtccagcatgggggcccaggcccacacgtcatgtaaccagcacgccggttactacgtgcgggaaactgcaccgccacttgcgctaataccgcaccttctcgactgcggaaccagtgccgcgactcgaggcgaccctgcgcatgacccaatagtgccaaccgagcacatcgatcacgggacaagtggcacctttggcaggcgaagcaggcgacgcttcacctccgccgtaatgaccgcgtcgaaaaagggaccaggaaaggggatactccgaaagggatccttcttcgtgaaagaagcgggccccgagccccctactgatcagaggttcgacggctggcccctcggaagggttcgacagccgcctcagagcactcgggctacgagccctcctactgatcagaggttcgaaggctggcccctcggaatggttcgacagccgcctcagagcactcgggctccgcgcccaccactggtcagaggttcgaaggctggcccctcggatgggttcaacaaccgcctcaggccactcgggctccgcgcccactactga

SEQ ID NO: 33564 - DNA, 96 bp, Zea mays
  Peptide Sequence Number=SeqID_76939
atggtgaacagcagccgagaccggaccaaggtgcaggacatggagaggacgacgtgcagcctgatcggcgaacaggagacggctgttggacggtaa

SEQ ID NO: 33565 - DNA, 804 bp, Zea mays
  Peptide Sequence Number=SeqID_76940
atggcggcagccgaggtcactggagcattgtatgccaaggcagtacacttcaggatatggttgacgtaccgaatccttataccctacgaatacctaatcgaccaagaacaacaaccaacctccattctgttggcaaagtttgatatcaacacaaatgatgcaccagtccaaaaggcttgttcccaaatgatgaaaaatgctataaggcaacaacgatacagactaaagaaaaaattctttgatccttttccactacatttggtgacaaaaacatcaccaatcagatcgatgagtaatgaagagtggaatgatcgtgtggaatattggaagagccaaaaaaagatggagacatcacaaaagaacaaagacaaccgatccaaagttaaatttcatcaaacaacgggatctcatagctatatggttcatgatggaaatttgactcaaatggataataagcggtctgcaactacagaatgtgaaaaatcaatgtctgcaactgaagtttttgctaatgtgcttgctgaaaatacaaagaagaatttgttccttcaaaatgtggggatacaaaatgttggttctaggtctagtctgagaaatattgaagcacggttggaagtggagaagagggcaaacagtgaccttaaatctattgttgatgctcaacatgaacaattggatgcgttgctaaagcaaatgcaagaaactaaagaaaatgggatcaaggagcaagtggaagtgaagaagaagcaagctgagatggaaacaaagatgcaacttgtgctgagtcagattcattcaagttag

SEQ ID NO: 33566 - DNA, 693 bp, Zea mays
  Peptide Sequence Number=SeqID_76941
atgggcgcgattaaggtcaaggctcaaaccactcaagggacacgatctcgcctcgcccgagcccagcctcgagcaaaggcagccgactccggaggattcacatctcgcccgagggccccctcaagcgacggacacaccttcggctcgccagaggcccagtcttcatggagaagcaaccttggccagatcaccatgccaaccaaccgtatcgcaggagcatttaatgcaaggatcgactcacaccttatcctgacgcgcgctcttcagtcgacagagccgaacctcgagcgccataggaaagctccgcctcgcccgacctcagggcttgggctcaaaatcgacgccggacgacggactccgcctcacccgaccctagggctcgggctcagcctcgacctcggaagacggactccgcctcgcccgaccacagggctcggactcagcctcgacctcggaagacgaactccgcctcgcccgaccccagggctcggactcagcctcgacctcggacgacggtctccgcctcgcccgaccctagggctcgaactcagcctcgaccacggacgacggtctccacctcgcccgaccctcgggcccagactcgacctcgacctcggaggagcctccgcctcgcccgaccttgggctcagaccgaccacgtcacagggggggccatcattaccctacccctag

SEQ ID NO: 33567 - DNA, 579 bp, Zea mays
  Peptide Sequence Number=SeqID_76942
atggcccaacagtgccaactgagcacatcgatcacgggtcagtcagctgcgggagaaggcgcgacggtcaatatggccaaaagtgggccggtagtaatggcagcgacaagagggcggaagcagcggtcaagtcgtctgcaggctcacgtcccctcctgggacatcgagagagccctcacccacggagtgaagatgacgcgtccgtgttccattcctcgaacggctcgcgcatgcacaacggctgcccctcgaaccacacgtcctgtcgcattaactctgcggcaaggcaggcaacacctttggcaggcgaagcaggcgacgcttcacctccgccataatgaccgcgtcaaaaaagggaccgggaaaggggatactctgaaagggatccttctccgcgaaggaagcgggccccgagcccctactaatcagaagttcgaaggctggaccctcggaagggttcgacaaccgcctcagagcactcgggctccgcgcccaccactggttagaggttcgaaggctggccccttggatgggttcgacagctgcctcaagccactcgggctccgcacccactactga

SEQ ID NO: 33568 - DNA, 357 bp, Zea mays
  Peptide Sequence Number=SeqID_76943
atggtcaataccaggaagggaggcagtatccatctacctgctaacaaccgtcgcaggaggattgttaaccaaccacaaccagaaaggaatcctccgccaaaccctccacagggtggaacagatcccgttgctaccgctcagatgcagctactgcagcaaatggcaaacaccatgatggaaatgcaagcgcaaatgcgacaagaacgtcaggagatgcaccaggagcggcaagaaatacgacaggaaatgaggcaagaacgccaggatatgcaccaagaacggcaagaacgacaacaactaccacctccaccaccaccagctccgcccagggacaagcaccgggagttttatgagtga

SEQ ID NO: 33569 - DNA, 144 bp, Zea mays
  Peptide Sequence Number=SeqID_76944
atgcaaccaaacaaaggtataaacgtgcggaggaagattaatgggcccgtaaggtatgcacaaactgtaatttttagttttgagataaaaatctcaataaaggggaggctatccagtgaagctccatgggctcaggagcggtag

SEQ ID NO: 33570 - DNA, 942 bp, Zea mays
  Peptide Sequence Number=SeqID_76945
catctggcgcgccggttgcgtgacgcgtgggcctgggcctccatgctggcatgttgggagtcggagaagcgcgtccacctggcgcgattgcatgccgcctgcatggctgcccgccccttccgcccgttggtctgggcaaaagtgggggttgcttgtaactgctgggcggttggagagttgcctttaaaaggagggcgacccctttcggaaggcgaccatgtcttctcgctcccttatgcgtcgcgtctttccaccttccaagcccccggatgggggcccggctgcacccctccaccggcggtcacccaagatggtgacctccagcttaatggtgggggaaagcgagccgggctgcggcctctgcccctccctcagcctcaaggattttcatcaccagggctggggaggggagtgtgccgagttgaggtcggcccccgcgtgggcggcggcccgctccttcactcagtgatcggagggaagggcggtcgtcgtccgtggcgctggcagctgcaccgtgcctggctctcggacgcgagtggcttcggagccttcggaaccgctcgcggcgccggcgtccgccacggcagcttgaagaggggcctcctagcagcagcgcccgccctgaggtcagtgctgccgctgttcggccccccggagcagaagtcgtcgtcgtcgccgctgctggagcagccgggttgtccgtcagcgggaccgatgccggagttgatcagccgaggcctcggaccgggctggcgccctcggaggatggttggccgaggcccctggggtaaccggacgagccgcctgctcgggccggattcctggagaagtccctggaccacgtcgccgtccgaggccgggtcggacctcactgaaggtgtcgtcgatgccgagggtgctacagcccccttccagcgtgaagacccgagcctgcgggattag

SEQ ID NO: 33571 - DNA, 336 bp, Zea mays
  Peptide Sequence Number=SeqID_76946
atggagcaccgtcccgggccggagaggtcgctggagactgcccatctggagcttgacgggaagatgtttgtcagcacgcagcaggcccctacctggcgcgccaactgtcggagtgtggagaccgggggggtgatgatggcgcttcctgttgacgtggcgggcctgtgccctaggtcgggcgacgtggaggttcctccgaagccgaggtcgagtctgtcttccatggccgaggccgagcccgagcccctaggtcgggcgaggcagaggtcgttcgacagaggccagggcggagtccgagccctggggtcgggcggagcggagttcgccgtcttctag

SEQ ID NO: 33572 - DNA, 279 bp, Zea mays
  Peptide Sequence Number=SeqID_76947
atggcccttagtgatgatgcggtgggcggcgacggctctgcttctgaggtatcacactccgtcgatgatctcgctattgaggtaaaagagctaacggttcctctgtctagtcaggacaaaatgcttaggcttgctgctcgtgagaggaaagattttaaattcaagtatgagagcatgcttaaggagcttaagtctgctagagcttcggttgtggtgtctggcgagactgaatgtgacgagcacgatgagttaagatctaggcctagcttgttagactga

SEQ ID NO: 33573 - DNA, 822 bp, Zea mays
  Peptide Sequence Number=SeqID_76948
atgacttctcacggatcctcggacgaagggaatgcacagtcccacacggacggacttgcacgagagggtttcccccgtatcttgtgggagctgttcgagaagcaccgagtgcctcgctgtagggtgaggatgaccctagagcctcatcccctgcagccaggctggcgttcgttggattccgagtcttttggatacagggctgaggacactatggaggcaattgcccttcacggactgaccaccttctgcggattccaccccttggagctgtccacttaccccattggcttgttccccacggagaaggaggacgacccaatgtggaaggaccgagtggagcatgccaaggatatatgggctatctacccaggtcagactgctcacttgacggtgcggtgcatgaatgccctgtatcgtctgcaagtgatgcgaggagaggcaatgtctcatctgatggcactgttggaggctaccaagatcaccttggataacagagaggaacttgtggtagatttgtccactgagatggtggaaaaagacttgcaagtggaacaattgtcaaatgagatccaagagcttgaggagctgatgggaaccagggaaaacaccatcgaggttctcgaggatcagctaatcaacactcaacagcagcttgcggaggctaatcagcacctggatatgcaccaccaggagatccaggacatggaggccaatgaggatgtcgacatcgagggaggagaggagcctgcctctagcttagacactgctggctcagggagaccaccttcccccgagtcgagcgttgcctcgtttgctcactag

SEQ ID NO: 33574 - DNA, 495 bp, Zea mays
  Peptide Sequence Number=SeqID_76949
atggctagtaacaacaatgtgcacattgggaatgtggcggaactgcccgaattattccaacttaagtgcctaagtcccgccttagaggctagaccacacttaattaggaataacacgtcaatccctcggatcgagtccgacgaggccactaacaggatcaagtaccacatactcactcgatgcagcatggatcaagcagtctcattagctgcgagaagcagacgattcgaattgagtttttatccttacaagatcagggctcaccgccttggcgtacaatgcctcactgaccccgactgccgtcgtgcagtgaccgcacttgtacccaccataaccggaatgggagaccacgtctcaggtcgcgtgaggggatatgtctgctggcaggttcaatcagaccaccatcattacgatatcaaaaatggatacaaccaatttcctgaccttgtgcgagtgctagaaaaatcactcgacttctacgagatccctaattaa

SEQ ID NO: 33575 - DNA, 717 bp, Zea mays
  Peptide Sequence Number=SeqID_76950
atggtacagtgtcctgagatggatcagaccgccagcgcggctgtcctcaccgccgacgatcccctcgccacgatttgtgccgccgccggtccaactcgtactcggggtaagtcgataacgttgcggggtcaaaagatcttcgccgccgttgagctagatgtcacctgggctagccgtggtacccctccccttgctcaccgcccgtggataatggggctcaccgcgtcgtgccatctccatgtccgccgcgtgtctctgtccatctaccgcgtcacagtgactccctaccgccgtcccatcgtcgacgaaaacgaagaagagattgaagtgaccgaagagaagacaccaccaccttcggattatcaggccggcaattgtttctacttcgatatctgcgggtccgagcctgactcacctactaacgaaggcaagccccggatccactttagtaagcatttctgcaaaatagagtctttgaatattgaaaagccttaccttgactcccttaaccagcatacccttgagagtcttttctttagtcgggtgaggaagcgacaaatttttgttgcttttgctccaaggtggttcccaaggaagaaaaacaagagtgaagctgcgggaggacttggtcctccatatagaacttttatgaaagaacttctcgggaggagtttttacctcccttggtattgtaataatattactctgcactcctag

SEQ ID NO: 33576 - DNA, 369 bp, Zea mays
  Peptide Sequence Number=SeqID_76951
atggtgcggcaatctgaggtcctcctcatctccatggaatgggttatcgcccaagtggacaagaaatcactcaatacctcgtttccactaatgtcactttcccgctccggcgaggtcatggaattaccactagacgcgcagagcagcggaagacgtcttgatgtagacgaacgcgtcgagcagtgccgtgcagtcgccggcgtccttcacgtcctcgcacggttcgtccaagtgctccagatgcagcacctccgaggtatccacgcgtacagggaggaagcgccgcgtaccgaactgctaggttcgcgacggcggcttggcgagggcgagaggtgggcggcggctgttagttcgctggtggcgaattag

SEQ ID NO: 33577 - DNA, 414 bp, Zea mays
  Peptide Sequence Number=SeqID_76952
atggcggacgttgcggactccgttgtaggcacacgcggaccaatctcgagcggccataagaagggagtggccaggtccttaccctcccctccacttcgaccacgcgcgaacatccgcaaccaagcagacctccactaccgccgtgtgaaccgtgagggccgagatccgccgccggggatagccgtcgctggggggggtctccgctctcggagtcggctcgtagagtatcgtcttcgcctggggaagccatctgtgtcaagtaattgggtggtgaggctgcggtgcgacgccaatcgctcgccgttgatgtcgctccaccgtgaatccgcccctcgtcgagtaccggtctactgggtcttcatcctcggtaaattaccccctactaatcccgccttgtgcttcgcatcgcattag

SEQ ID NO: 33578 - DNA, 969 bp, Zea mays
  Peptide Sequence Number=SeqID_76953
atggccttaatggtggcaggcttcgtcgagaagcaaccttggccaaatcgcctctccaaccgaccgtatcgcaggcgcattcaatgcgaggatcgcctgacaccttatcctgacacgcgtgcctcagtcgtcaaggtcgaacctcaggcgcaacaggaggctccgcctcgcccgaccttaggcctcggcctcggaaggaggtctccgcctcgcccgaccccagggctcagcctcaacctcggccttgggaggtggtctccgcctcgcccgacctcagggctcggcctcaacctcggcctcgggaggaatcgctacggggaacaagactggcgtcccatctggctcgccccggtaacgagtaatgatggctccccgcggctcaggcgctcctccgacggccacgttatcgcctacgcagggctcaagcacttctccgacagccatgttggcataggcaccctggtctggcgcaccggactgtccggtatgccaccggacagtgtccggtgcaccagggaactcgacgctgaactcttcaccttcgggaaaatgggaggtcgctccgctataattcaccggactgtccggtgtgccagcggagcaacggctacttcgcatgcaatggtcgactgtaacgtatttaatgcgcgcctgtgcgcgcagaggacagagcacgcgcggaaggcgcaccggacagtctacaggacctgtccggtgcaccaccgaacagcccagaggccccaccagtcagagctccaacggtcagaacccaacgaccggctgacgtggctggcgcaccggacactgtccggtggcacaccggactgtccggtgcgccatgcgacagacagcctcccaacggccacttttggtggttggggctataaataccccaaccaccccacattcaattgtatccaagttttccaacttcctacaccttacaagagctatagcattcaattctaa

SEQ ID NO: 33579 - DNA, 973 bp, Zea mays
  Peptide Sequence Number=SeqID_76954
atggcgcttcctgttgacgtggcgggcctgtgccctaggtcgggcgacgtggaggttcctccgaagccgaggtcgagtctgtcttccatggccgaggccgagcccgagcccctgggtcgggcgaggcggaggtcgttcggcagaggccagggcggagtccgagccctggggtcgggcggagcggagttcgccgtcttccggggcctagcccgagtccgagccctgggtcgggtggagcggatcgaagtggcgcaggcggcgctgtccttctgtcagaccggtcagtggagcggcgaagtgacggcggtcacttcggctctgccggggggcgcgcgtcaggataaagggttgcttcttagcgaaggcaaggcctcgggcgagccggagatgtgtccgccgttaaaggggggcctcgggcgagacggaaatccctcggggcctctgcagctttatgctgatgggggttaccagctgagaattaggcgtcttgagggtgtaaaaggttcacacacagccaataaaaagatcaagttttggattcaacaaaggagcaaaggggtcaaccgaaggcacctctggtctggcgcaccggactgtccggtgtgccaccggacagtgtccggtgcaccaccggacatgtccggtgtaccagaggactccaacgcaaactcgccaccttcgggaatttccagaggcactcgcgctataattcaccggactgtccggtgtacaccggacagtgtccggtgcgccaaggaggagcggcctcaggaactcgccagcttcgggaatctccaacggctagtccactataattcaccggacatgtccggcgtgcccatactggcgcaccggacaatgaacagtgcatgtccggtgcgccaccggacatcgaggcgggcccagaagtcagaactccaacggtcagaatccaacggcagtgatgacgtggcgggggcaccggacatgtccg

SEQ ID NO: 33580 - DNA, 2259 bp, Zea mays
  Peptide Sequence Number=SeqID_76955
atggcgccgcacaccaccgctggaggcgggggcggagccgaggatgaggtgtccgaggcggcggctgcatcccccgccctgcggcaccgccacgcgggcaagggcgaggggctgggcggcaatggcggcgctggggccgacggccaggcgtccgtggagcgggtgttcgcggacaaggcggtgccgtcgtggcgggagcagctcacgctgcgggcattcgtcgtcagcgcgctgctggccgtcatgttcagcgtcatagtcatgaagctcaacctcaccacggggatcatcccctccctcaatgtctccgcggggctgctcggcttcttcttcgtccgcatgtggaccgccgccgccgagaggatgggcttcctccgccagcccttcaccaggcaggagaacaccgtcatccagacctgcgttgtctctgcctacggcatcgccttcagcggtggctttggcagttatctatttggaatgagtgacaaaatagctaaacaagcaacagaggctaaagatgctaataacataaaggatcctcaccttggatggatgatagggttcctattccttgtcagttttattggtctctttgcacttgtacccctaagaaagattatgattgttgactacaagttgacctatccaagtggcacagccactgcatatctcatcaacggttttcacacacctgagggagccaagcttgcaaagaagcaagtaaagacgttgggcaagtactttgtgtttagctttttctggggcttttttcagtggttctacactgcaggggatgagtgtggattcaaaaattttccaacattgggccttgaagcttataacaatagctgggccgtgggcgtgggggagaagagcgtggaaggacatttccgattggctaatcgccaatttagaggtattgtctccaatgctaaacatggcttattgtctttcaggttcttctttgacttctctcctacatacgttggagttggcatgatctgcccatacatcgtgaatgtgtctgttctgctgggtggtatcctctcatggggtttaatgtggcctctcattgccaagaagaaggggagttggtacccagctaacctggaagactcaagtttacatgggttgcaggcttacagggttttcatttccatcgctttgatccttggggacggtttatacaacttcattaaggtgctgatccgcacaattgcgggtttcatatcaatggtgcagcaaaattcaaaaagcatgcttcctgtttcggacaatggcagttccatgtccagtatggaggctgtatcctttgacgatgaacgtcgcattgagaattttctgaaagatcagattcccaagtcagttgcatacgggggctatgttgcagttgctgctatatctattggcacccttcctcagatcttcccgcagctcaagtggtactacattttagtagcctacgtcgtggcacctgtgctggccttctgcaatgcttatggaagtggcctcactgactggtctctcgcctccacctacggcaagctcgctatcttcgtgttcggtgcatgggctggcctctcacacggtggcgtgctcgttgggctcgcagcttgtggtgtcatgatgagcatcgtgtcgaccgcctcagacctgatgcaagacttcaagaccgggtacctgacgctggcgtcaccgaggtctatgttcatcagccaggtgattggcaccggaatggggtgtgtcatcgggccctgcatcttctggctcttctacaaggcgttcggtgacattggcgagagcggcaccgagtacccggcgccctatgccatcgtgtaccgcaacatggccatcctcggcgtggatggcttcggctcgctcccgaaaaactgcctcaccctctgctacattttctttgcggcagcgatcactatcaaccttgtcagggacctgaccccctacaaggtgtcgaggttcatcccgctgccaatggcaatggcgattccgttctacatcgggtcctacttcgccattgacatgtttctgggcagcgcgatcctcttcgtgtgggagcggctgaacaaggcgaaagcggacgcattcggacctgcggtcgcgtcggggctgatctgcggagacggcatctggaccctgccgcagtccattctggccctcgccaaggtgcagccccccatttgcatgaagtttttgtccagatcgaccaatgccaaggtggacagcttcctcggcttgtcatga

SEQ ID NO: 33581 - DNA, 453 bp, Zea mays
  Peptide Sequence Number=SeqID_76956
atgacttctcacggattctcggacgaagggaatgcacagtcccacacggacggacttgcacgagagggtttcccccgtatcttgtgggaggtacttcagggagctggttacacgacgcctccccaggctgaggacactatggaggcaattgcccttcacggactgaccaccttctgcggattccaccccttggagctgtccacttaccccattggcttgttccccgcggagaaggaggacgacccaatgcgaaaggaccgagtggagcatgccaaggatatatgggctatctacctaggtcagactgctcacttgacggtgcggtccatgaatgccctgtatcgtctgcaagtgatgcgaggagaggcaatgtctcatctgatggcactgttggaggctaccaagatcaccttggataacagagaggaacttgtgggagatttgtccacttag

SEQ ID NO: 33582 - DNA, 369 bp, Zea mays
  Peptide Sequence Number=SeqID_76957
atggcggtggccccctgggtgaggtaccttagccaagaatacgaccccatgttaacgtgggctgccagcacctaccgctccccctcttgcccatatttcagggcgcaggaagctcggtcgctcggcatcgggcgcggcaaggagcgcggctgctcggcttctaggcagcgaggtcggggtgcagaggggccgtcggggctcgcgcggggtctagtcttggcgcggatgcagctcgaccacggccgggctgggcggctcggccagccggggtcgcgcgggggcgcgcggtgcagaggcgcctgggccgggcggcttggccgcggagaagctcctaggggcgcgatggctccctgggctgctggtggctag

SEQ ID NO: 33583 - DNA, 444 bp, Zea mays
  Peptide Sequence Number=SeqID_76958
atgggagacaagggcctcggctgggaggtgctcggcgcagtggagcaggggcggtcggctgagaggagcaggtggatgccagggtgcgcgcgatggaagctggaaggaagaaactacggggaggagagagatccggctggcaggagggagaagcaggggcgccgcgacatggcgagtgcgccaggaaactccggccgcgagcagagcaaagggatgcgcgagggagcagagagcttcggcgagctggaggagcgccgcgtgcccgagcaggaagatgaagctgcgcgcgcgtgggcacagagaagcaagcgcgcggcgaggataaggaaggaggagcgctcggcggaggagaaaggctggcggcaagatttttattgcaggctaaagcggcgacttgaaaaatctcagggcgcggcaagaagattttctcccccattcggctga

SEQ ID NO: 33584 - DNA, 288 bp, Zea mays
  Peptide Sequence Number=SeqID_76959
atggcaccatgtagctatctcgacatcactacatcttcgaaatccttgagcgtgctggtgttgctaagtgttgaacatgtgcttaatgcaaagcttatagagttcaacacaagagatcagacaactgatcaagccaaggatggaggcaataagaactttgatgtatcgagtgcatgggagaaagtcaaggagaccgaggtacctaaagctaggggtgaggaaaatacttgcaaagtcaaggttgatcaagttgagaagagctatggtgcatcgaggatcactacctaa

SEQ ID NO: 33585 - DNA, 660 bp, Zea mays
  Peptide Sequence Number=SeqID_76960
atggccgacatgagctataagagggcgccaacgtctggtggcaggctgttacaggtgcggccacgccgagctgtgaatgagagcagggcgctgggtgctggagatgcggcatcgaccgacgaaattgaagacggctttggattcgtggacgcaggatgcgaaggcatggctggttgcgctgatggagacaaggagagcaggggcagggccgacgtaggtccgacctggggcgagcccacgacagcgtcggggactggaggtagcaggggcgtcgagcagctgcagaggagctcgcgcacacgaccagtgaggtggctgttactgtcgtgccctcgctccgttacatcccttgccgccgtcgccatgtttgcaaaattctcgagctccggcggtgagctggctgacgtggtcatccggcagctggaggagctcgccaagtcggaggtggcggccatggcggcgtcttacgcggagctgctggagcgaggtgacggcgagcagctgcctccatgggcgtcgccggatctcgacaatggagccgtcgcagactttggggctctcgacgctgacgttgacgccgccaggcatgatgcagcgaccatcgcattcgcagcagtgccttcccacgaggtttgctgcacacactacagcatctactag

SEQ ID NO: 33586 - DNA, 162 bp, Zea mays
  Peptide Sequence Number=SeqID_76961
atggatcctaagggaaaggggatcgtgatcaacgacaaggaaaaggagaaggagaccctctatgttgatgagccaaaagaaatcagcattctgtcttttggggttgacgattcattgggtgcaccagaggtgtacccaatgggtgtagcccccgagctttga

SEQ ID NO: 33587 - DNA, 282 bp, Zea mays
  Peptide Sequence Number=SeqID_76962
atgtcgtctgatgactcagacaattcccaggggctcgtcgcagaggtgtggacatacatctgggtcatcgagcgtgccgggctcgagggctcggatgagtgggaggtctccttggacgaggagaactcctcggactcatccgaggaggggggcggcagtgatggcgatgacgagggcgacgacaacggcagaggcgacggcgatggcgacggcgacggtggcaaaggcgacggcaagggcgacgacaagggcggcagtggcagcagcaaggccagtggctag

SEQ ID NO: 33588 - DNA, 978 bp, Zea mays
  Peptide Sequence Number=SeqID_76963
atgaaggggcgcttaaccgtggggcggttgcatgccccttgcacggcggttcgccttcgtgaccgttggttaccccaaaagcgaagggacagctgcacgctccttaaccgtggggcagctgcacgctccttcttagggatgttcatcatccatgctagggaggagggcgagccgagtgggagcttcgccttccgcgtgggctggcggtccgcttcttcctccagcattcgggggagaagggcgttcgccggctttgtggaggaggcgaactccgggcgctgcctcctgccgctggggtggagcatggctgcctgtccaccgcatgggcaacagttgcaccttgcgcgggttggccacatccatggcttctcccgcgccaccggtcgcaccgggaggtcgtacaagacgtcgtacgccgcgggggtggcggcggtgttcttggatggtcttgacctcactcccgtagtgaggacaggagcaaagacctcttcgtgcgcgctggtgcagaggtggtcgctgcctctggtggggctgatgtggtcgcctccgctggtgaggctgcccactgtagaggtggttgcctccgctggcgagtccatcagtgccacctgccaccggaccttcggctctttggttttaatggcctcgctgtcaccccccgtaggaggacgggggcgaggacctattcgcagtagcactcaccctgaggtgactgctgctgctggcgagccgctcggagcagaggtcgttgtcgctgctggtgtagaggtggacgccgtcgttagtgaggctgtccggaaccagcttccagcgctcacggtacgggaccaggctaagcggccacatggtttccggaccccccaggagacaagtgcccgttcttcagatccagacctccagggcggtggagcgtgcaggcccacggtacgggaccaggctgagcggctgcacgggctccggaccaccccaggagactaa

SEQ ID NO: 33589 - DNA, 513 bp, Zea mays
  Peptide Sequence Number=SeqID_76964
atggtgagagaacgaagaacacaaacaaacacaatgagcaagaacacaagagacacaagatttatcccgaggttcggtcacaccaccaaggtgccctacttcctcggtgaggcgcccacaaagagccgggtctctttcaaccctaatcctccctttgccgaccacaaaggtgccaaaggttcacaaaaagccaataaaaagaccaagaaaagggttcaacaaaaagagcaagggacaaccgaagtgtgccctggtctggcgcaccggacagtgtccggtgcaccaccggacaatgttcggtgcaccaggggactccgagctaaacttcacaccttcgggaattctcagaggcgcttcgctataattcaccggacagtgaccgctgctccagaggaaagcgactctgaactcgccagcttcgggaatccgctccgctataattcaccggacatgtccggtgagccagcggagcaacggctacttcacgccaacggtcgactgcaggcgcattga

SEQ ID NO: 33590 - DNA, 390 bp, Zea mays
  Peptide Sequence Number=SeqID_76965
atggcccggacacgtgtaagcaccggacccctgctcataccagggtcctcctcgttccgggaccctgctggggttcggacctacccgggggctccggacttactgggatgtgttgtctctccttgccacgtggcgccctttggcctccccatgcggtggggtcaggcgccgtcccccgtgtggctaggagacgtcgcatgggtgcggcgtcttcatgctgtagaagagggtacccctgatttagggtatgaccttcgtgacatcctgctcgtggccttcgtccaaagttcattaaatccttcgggagataatgcttcagcgggcgaagcattggagaacaagtacccaacattggcgcccacctccggtgaactcacttccactctctga

SEQ ID NO: 33591 - DNA, 189 bp, Zea mays
  Peptide Sequence Number=SeqID_76966
atgaaactaccaatatcccggttacagcttgacctaacagactcgactgttttgagaaacctgggtatgggattaggtcattctctattggcttacaaagctaccatgcgtggaatcagcaaggttcagggcgcacgaagtgcgcctcctgatcttgcaatctctatgtttgtagcatcttgcatctga

SEQ ID NO: 33592 - DNA, 2609 bp, Zea mays
  Peptide Sequence Number=SeqID_76967
gtgccacgagcttcgttgatataaggaccttccaaaatactgtgtacgaaacattcagagaggcgtgcgaagcccgtggtttgctcgaaggtgacaatgagtggaaccttctatttgatgaggcaatagtctctgcctcagcgtttcaacttcgacaaatgttcgttaccattgtcgttcattgtcctgtttgcaatgttcgtgctttgtttgacaaatattggatctacttccccgatgacatacaacgtggtcttagagaagcccttggcaacccgcactacacagctccacatgaacaacttcttacgttgcttttgaggaagctagcagacactgtttggcaaccggctgataaacgacgaactgagcctgaaccattgctattgcgtgaacatgctgccgctgctatctcgcagttgaatgctgaccaacggctcattttcgaaaagctgactaaatctgcgctctcctgcttgccgggcgtatttttcgtatgtggacatggtgggacaggtaaaactttcctgtggaatgctatactcatgcatttgaggtcccaacaaaaaattgtgctggctgtagcgtcctccggcgtggcttcattactattaccaaaaggccgtactgctcattcgcgtttcaaaatacccttcgatcttgatgaaggtggtgtttgtggtgtcaagagaggtaccatgctgtctgaacttatacagcgaacttttcttatcatatgggacgaggcgccgatgacccatagacattgctttgaggccctagacaggactatgcgtgatattctttccgaacatagagcggaaaatgcgaacatcccatttggtggcaaacctattgtgcttggaggagactttcgccagattttacctgtggtgcgcagaggttcacgatctgcaatagtgaacgcatcaattactagctcaccgttgtggcagcacgctactgttttgaaaccgcgaacaaatatgaggctctccaacccgtctttacatggtaaggaacgtgcggacttggaacagtttagcaaatgggtcttagatatcggcgatggtgctctgccagcgatgacacgaggagacgagtccgaacctacatggattacgattcctgaagatttgttgatacatacggatggtgatgctactgcagcactcgtatccgaggtctacccagaattgttagagaaatatatgaaccctacatacttagctacacgtgccattgtatgtcctaataaccttacaaccgataaaataaacgactacattgtctcaatgctccctggacatggtgtccaatgccttagctgcgacacgatctcaaaggcgtctgaacgcatacctgattttgacatgctatatcctactgaattcctaaactctattaatgcagcaaatttcccttgccacaaactcgtgctaaaaagaggcgtcacagtcatgctgttacgtaacttgaaccagaccgcggggctttgtaatggaacaaggatgcttgtaactgaggtcggacagcgtgttcttaaatgcgtagtactaacgccctccggagtcgacgaagaggttttcataccgaggattgcgcttaacactaccgatgtcaaatgtcccttcacattgcaaagaagacaatttccgatacgaatatgctatgccatgacgattaataagagccagggtcagaccctctcaacggttggactctaccttgacaggcctgtgtttacgcatggtcagctttacgtcgctgtttcaagggttacatctagaagtggtcttagaattttgattgaaaatcctgatggttcctgtggatcacagactcgaaacgttgtttaccgagaaatgggggacatactcattcctagccttatggttggagactgctctcgcaccttgtgtttgcgtgtctctaggctttgggaattccttgatcctcaggatgacagtaggctcttgcatactgatcttgttttgcttgatgaagagggaaacaacatacatgcccagatctatcctcctttgtgccaacagttcagtgcgctgctcgatgagggagggatatacaacttgaatgctaatgtcctcgccatctctatggtagatgtgctcggtgttgtcagcgtgatctcccgtgtttcatcactacgcacaaggggacgacaggctgaggttatgaagagaacaatcactataagcaatgcaagggataccgggccaaccgttgatgttgtgctttggggcgagcgggccacagctttcccagctgaacaggtccacagggacagtgaatcctcaccacagatcataatatttgttggcactctcatgaggagctacgctggatcatcatgcaagtggtacataaatgcaccggtcccggaaggcaaagtagttgctgagagtacagtcattgcagttcctgaacataagaagctcaaggatattaagtacctccatccttttgaaaataagaagaaggaatggcttgtcatcgtaaaggtgctcaagattgatagctcatggtggatcgcctaccccaaggtcagctcttatacgtttctcccgtttttgttagggtcctgctag

SEQ ID NO: 33593 - DNA, 180 bp, Zea mays
  Peptide Sequence Number=SeqID_76968
atggacatgtctcgaatggagacgttgtatcatgctgacaaggagaagaccaaagcacttatcctggagctagctggtcgtgtggcttcatcatctaatcagcaaatcaggaaactccagtggaggcgtaaagagtattttaatgaggcccctgacacccagctaacagctacaatttga

SEQ ID NO: 33594 - DNA, 156 bp, Zea mays
  Peptide Sequence Number=SeqID_76969
atgggcgggggccttctggcagcagcacccgccctgaggtcagtgctgccgctgttcggccccccggagcagaagtcgtcgtcgtcgctgctgctggagcagagccgtgttttttcctcattttcgagcactaagactcgcctgttggttgtctga

SEQ ID NO: 33595 - DNA, 867 bp, Zea mays
  Peptide Sequence Number=SeqID_76970
atgaggtcgttcatcactgtggttcaagaaaactacccgaatcgtcttggggtattgtttgtcatccgtcttcctccagttgtcagagttattgcacagacatttcttcaagtcttgaaaccagctacaaagcagaagttgcgttttgagggagattcgtacaagaaggcattggcggagttcctgcaggctgtgccagcgtttctgggcggtaaatgcagctgcccgcgatgtgagagtcctcgtgatgattcagtgatacaggcaggggaagggagcaagaagcagccccgcttggtcagcgttgatgacgggttacctgtcacagacttggacttcgacttggatgaagagatcccatcaccttatagctgcgagaacgccatcagggctgcgataatcggcctgctgatgggtgctgtatttcttggcaggcttcttgtatgttgtcgtcagaccgccatagagcgctttctcccagtctgctcctggcgctcctcgaataggagctgttcttcagccggcaaggcttcccatgtcggtgtgatgatattgctggtggaaacctcagagctatcttttgaaccagccattgagggccgatttgataggtctatatgtgttctccccagcggagtcgccaaaaagtatgttgacgcctttttggaggcgccaattactcaagagaaccagcggcggtgctctctggtcaggcgcggacggtccgcggccaagggccggacggtccgcgacctggcgcgaggcggcggtgctctctggtcaggcggggacggggcggcggaggatcaccggcggcgcctggatctcgctcccgggagggaccccgtcggggaggagagatcctag

SEQ ID NO: 33596 - DNA, 348 bp, Zea mays
  Peptide Sequence Number=SeqID_76971
atggcggcagcgcaccgtaggaccggtggcaacgtcggttgtcccgtccgtctctgcgatggccaccaccgctccagcgtctgtggcgtcgtcccctgcgcccaaggccaacgacagcaggaaggcggtggtgctcgtggacgcgtcggagctggagaacaggtgctggaggtggacgacaactccgtggaccgcgcagtgatcaccaggatcctgcgcggctctaggatcagggtgaccgccgtggagttggcgacgcgcgcgctggagttgctcgcgctgggcctgctccccgacgtcagcatgatcatcagaagactactagatgcctgggatgactggtcgtaa

SEQ ID NO: 33597 - DNA, 162 bp, Zea mays
  Peptide Sequence Number=SeqID_76972
atgttcggattgcaggtggcaatgagaatgatggttcttggttttgactctggtaatgggcgtgatataggggaactggaggctaggagggccataggtgccgagagagtcctaggacctagttctccaactcggcgggcaacagagattgggaggtcctag

SEQ ID NO: 33598 - DNA, 1310 bp, Zea mays
  Peptide Sequence Number=SeqID_76973
atgcacgattgtccattgtccccgtccgtgtctgccgtccccaaagacaaccctgtctctgtccggctcgaggcacgggatgattgttggggcggcgaggggtggatggatggcatcaaggtgaaaggcgagcaaggtccagagccgaagacggcgccgccatgccagcgcttaaatggctttggaagaaggcacaaagctgttcggttcggccgagcgagtcaacatcggcctaacgtgttcagatttgccactcttggagcttctaggggttgtcgcggtgtctcctcccatgatgagcttgatgttgtctatgttgccgtcaccaacctcttttttgtcagtggtgtctacaaccatgccaacttgtctcagtctgatgtctgcccaacagggaggcatgatgatgaagaagaaaaggctgaagtgggaagagctgccaaagagaatgtattggttggtgttaaacaggttgctgaaatgaacaaaccagttgttggatctgaaacttctgatgcaaaccatgatttgaagagttcaaatggtaaaagtaagcatatgccttctgaagcaacactcttcccatatgaactttttgtgaagctctacagcaaggttgagttgcacccttttggtcttcataaccttggtaacaggcatagcgcaatggtgagagttgtctcactgagccaccaggtcgcggatgacgatgatgcttctgctgcagacgagcctttagttgatgttgctgacctgactacgccaccagagccatatacttctgtccccagcgacgagcccgtcgcttctgggttcctatatgactgggatggagcacgggccgatgtggctgcctgctttaccggatctgctcacctatgtgactatgtgagcatgcaggtgtgggttgagccgtcggcgaccaaggacatgatggacaaggtggagcaggtacgacaacggaggaaggccgagaagtccctgctcaccttgcaacgaaggttggctacgacaagcgcagaagaattggagaatagtggctgtcagaagacatatgcgagccctggaaaaagtggtgaggcatcatttgctaatgcatctatgatggatatgcagcagttaaagttagctgataatcgtgtcctccaggagcagctactacagaaggaagctaaaattgaaaagatgaaatatgaacatcagacgagggaggctgctttgaccgagaatgagcttcttgaagaggagtacaagaaaaagttagacgaggcaaataaggaactatctctggagaatgatctagcaggcat

SEQ ID NO: 33599 - DNA, 2487 bp, Zea mays
  Peptide Sequence Number=SeqID_76974
atggatagagggcagaacgggagggatgacgtcttcggacgcagggatccattttctgggtttggcttcggcccccacaggagcttgttttctggtctccttggggggagggatccatttgacgatccgttctttacccatccgttcgggggtcggatgatgggtgaccatgacatgtttgtacctagtccttttgggccgatgggagggccttttggggacatgaggaacggtgggtttatcgagcaagctcctcctaggggtaacagaagaaggcctgtgatcacagaggtcgaggaggatggtggagagaacgcagagcatggtaaccagcagcctaaccaagatccttatgttcaggagccagacgatgggattgatgagacagaaggtggccaagtcgagctgcacagggatctcagtagggctaatagtggagggcagccgcaggctcgtactttcacatatcagagctcttccgtgacgtttggtggtattaatggagcttactacaccacttcaaagtctcggcggactggtagtgacgggatcactgtggaagaaagcaaggaagctgatacaacaactaaagaggctactcatagaatctcccgtggaatccatgacaagggacattccctgacaaggaaactgaattcggatgggaaggttgacaccacacagacactgcacaacctgaatgaagctggatttgagcaatcatggaaggggaatgctggacattacttgcctgactggaaccacaatgctggtgcacctaatagcgataattctggtgaccgtagctccaatggacgtgaccggcgatcggcctcaggctgggcgcttcctgggaccgagcaaggccgtgatccgaggcgcaacgggaagccaaaatcacggctggtttgtactactatgcaaggtttaggttcaagatcgtttcaaggaaacgacctgaggtccagaccagtgagtgacacacacccatgccgccgccgccgctcgcgcgccgcctactcctccagccgctgccgcgcggcgcgcgcgccctccacacgaccccggccccgcgccgcggcccgggggtgctggcctgccgcctggcgtccccgcgccgtggttcgcttcgcggggcccgaggcggcgcgcttcctccactcgctgctcaccaacgacctcctctccgccttctccgcggccggcgcgtcgtcgccgcagcggtacgcgcccacgccgaacgcgcccgcgcggggccccgcggcgcccgcctacgccgcgctgctcacgccgcagggcaggttcctctacgacctcttcctctaccggcccccgccgcggtcccagatgctcgaccgcacaggatccgcgccggagaccggtgaggcccccgaggggcacccgcacccgcaggaggtactcgcagacgttgacgccgccgaggtggacgacctcgtcgcctgctttaagagatatcgtttgagatccaaggttgaaatagacaatgtaagtgagaattttgcatgttggcaaagatttggacatgatgtagtgcacactgaaccttctactcaagaacctgaggctcaatccattgggtggggacaaggtgttgaccatgctggcgagtcagctgcgcaagggaacggtcatggatggcaatggctcaaagatcctcggttggactaccttggttacagaggaatttttccagctgacacgataccacccctagttgagtctgacaaagaagcagatgaacgccattatcaactttggcggatagaaaatggagtcgcagaaggttcgactgagatcccaaaaggcgaagcaatcccgctggagtacaatcttgctggcttgaacgccatttcgttcgagaagggctgctacatcgggcaggagcttatcgctcggacgcaccatcgcggtgtcatccggaagcgcctaatgccaatgaagttcgtcgacgggaatgggcaagaactcgagcaggccgtcgctccaggctcggaggtcgtggacgaggcttcaggcaagaaggtcggggcagtgagcaccgctctgggctcccgcgggatgggcctgctaagactcgaagaagcactgaaaccgggctcggtcctccgcgccggcggcaacagggacgtgagggtccaggcgatcaagccggactggtggccagccgagtggacacagaagacgaggaaggcaggagggcctgtttctcttcctctctgcctgctgctgtgttcagctgcggcatctcgttcagaacgagatgagcaaactctttggtcctttgtcactgaccatggactggaccacactaggctaggcagtaggcacacagtgttccggaaatccagtgtgcctgcctccagtgcgattagagatggcaatggggacccgatccccgattccccgcggggaattcctctattaggggatggggatgggggagtttcttcccccacggggatgtaa

SEQ ID NO: 33600 - DNA, 315 bp, Zea mays
  Peptide Sequence Number=SeqID_76975
atggggattccgacccacatctgtcgagcctctctctctcagcgatggcaatgtgaacaagttcctctgaagaacacactggcaggggcgctaaccatctcgggtgggagcggcgggcatgggaggacaggggcggcggggaggcacgttgatggcgcggtagcggcgaacgaggcgggggaggggaacacgcgggtgaggggcgaggccggagctagtggattgggatgcggagtgggtgtgcggttgttgcgcggaggcaaggtctgcggatctcccgtccatctcgcggagatcggcgatctacaacagtga

SEQ ID NO: 33601 - DNA, 324 bp, Zea mays
  Peptide Sequence Number=SeqID_76976
atgggtctgggtgtatgggcatcgctggatcaaagtttgtttgccccatgcagaggaatccggcgcactttggaaacttcaatagcgggtacggcctgggggaatcattggaaagcaaaggcagtgatcccgaaacgcatctccttgttcgtgaccaatgcagactcctcatttacaggccgaaagggaattccgactttgggtggcaatgagaatgatggttttggtattgactctggtgatggttgtcagcattgcaacccctgctcaggagaggatgaagccgtgaaaggagacccccaggagttccaagattacgactag

SEQ ID NO: 33602 - DNA, 92 bp, Zea mays
  Peptide Sequence Number=SeqID_76977
ggagggcgcgcgggaaggctgccgggaggggccgcgcgggtgagggctgtcgggagggctcgccggggcaggggaagggcgcgcgcggctga

SEQ ID NO: 33603 - DNA, 957 bp, Zea mays
  Peptide Sequence Number=SeqID_76978
atggctcgtagaagatcccaaaagaacaagaagactcctccaacgaacgcaactcaaaaggaggtaactcttgagatattatttgatgattgttctaattatgattcatggtctactagtgtgataaatgcctttagaaccatacatcctcaattagaacaaattattgacaagagtattttcccctctagttttaatggaaaaattaattccgaggaggatcaaagatgttatcgcttaaactacctagcttttgacatcttaaacaattctcttagcaaagaagattatcgtgccttcatatcaaactatgacgaatccattcccgatgcgcatgatatttggactagaattaaaatcaagtttgatgagtccaaacataatagttcatttaatgcctcaacttcctttagtttttgtgatactaacccttgcaaggaagaaggagaaaatgaacgatggagaccaaacgatgaatccacctctccaaaagctaatgaaaatgatagcggaagcacaaacgaggatgaggaggaagaaagaagctttgtgcatctctacgctcgcctaagccaagaagataaggcggtcatgctcaaacttctagaaagagcgagagaacaaagcgaagctcgtcaaaggctagaagatattctctccataaagatgcaacactttgacgagttgactaaagaacatgaggagctaaagtgctctcatgttgatttggtccaaagcaaatcttcttttgagctagaatctgcaggaacaaatgatgattcatatcaaaagctcaaagaagaaaatgagaggctaaagaagagcttgacacaacttaaagggaaatgcattgcccaaccttctcaagataaccgtgatcacatggtgaagaagcttgagacgggaacaaccgtgggcatgcactacatccctttgaagaaaatgtcaaggatttga

SEQ ID NO: 33604 - DNA, 528 bp, Zea mays
  Peptide Sequence Number=SeqID_76979
atggccccctgtgacgtggtcggtccgagcccgaggtcgggcgaggcggaggctccttcgaggtcgaggtcgagtctgggcctgggggtcgggcgaggcggagaccgccttccggagtcgaggctgagtccgagccctagggtcgggcgaggcggagatcgtcgtccgaggtcgaggctgagtccgagccctgggggtcgggcgaggcggagtccgtcgtccggcgtcgaggttgagtctgagccctggggtcgggcgaggcggagtccgtcttccgaggtcgaggctgagtccgagccctggggtcgggcgagacggagtccgtcgtccggcgtcgaggttgagtctgagccctggggtcgggcgaggcagagcttcctatggcgcctgaggctggacttagctgctgtcagccttactctgtcgagtggcacagcagtcggagcagggcaggcgacgctgttttcctgtcaggtcggtcagtggagcggcgaagtgactgcggtcactttcggccctgtcgactga

SEQ ID NO: 33605 - DNA, 1278 bp, Zea mays
  Peptide Sequence Number=SeqID_76980
atgcaggcggcatgcaaccgcaccaagggggcgcaccatttcgactccaacgcgcccagcatgggggcccaggcccacacgtcatgtaaccggcgcgccggttactacgtgcgagaaactgcaccgccactttcgccagtaccgcgccttctcgactgcggaaccggtgccgtgactcgaggcaaccctgcgcatggcgcaacagtgccaaccgagcacatcggtcacgggccagtcagccgcgggagaatgcgtgacggtcgatacggccagaaatgggccggcagtaatggcggcggcaggcgggcggaagcagcagtcaagtcgtctgcaagctcacgtctcctcctgggacagcgagagaaccctctcccacggcgtgaagacgacgcgcccgtgtcccattcctcgaatggctcgcgcacgcgcaacgactgccccgcgaatcgctcgtcccgtcgcattaactctgcggcaggacaggcggcacctttggcagggaccgggaaaggggatactccaaaagggatccttctccgcgaaggaagcaggccccgagccctcctactgatcagaggttcgaaggctggcccctcggaagggttcaacagccgcctcagagcactcgggctccgcgcccactactggtcagaggttcgaaggctggcccctcgaaagggttcgacagtcgcctcaggccactcgggctccgcgcccactactggtcagagtttcgaaggctggcccctcggaagggttcgacagccgcctcaggccacttgggctccgcgcccactactgatcaggggttcgaaggctggccccccgaagggttcgacagccgcctcagaacacgtagagcgagggatgactctgggtacgtctgatacatggtcgaggctcgggctacgctcccgaggtaccctaggacatttccgagaccagcaggagcgattctgtaatggaatcccatcagagggaggcatcgagccctcgaaccctatcaaacgggaccgggtccggcaaatcacctgcaggaagctccgcctcgcccgaccccagggctcggactcaaccttgacgtcggacgacggactccgcctcgcccgaccccagggctcggactcagcctcgacctcggaagacggactccgcctcgcccgaccccagggctcggactcaacctcgatgccggacgacggactccgcctcgcccgaccccagggctcgaactcagcctcgacctcagacgatggtctccgcctcgcccgaccctag

SEQ ID NO: 33606 - DNA, 300 bp, Zea mays
  Peptide Sequence Number=SeqID_76981
atggccttgtgtagtgccgtgaagctccgcctgttcatgggggtgtgtgctgtggcttcgccgtgcagaaccgacgcccgagaactcgggatttcttcaccggtgagggtcctccgccgcagcaccactgacctccgtggccagggaatcctgctaaccgaatcacgggtctctgtgttctgggtggggaggaactccagcgaactccctgggtggagctcggttttgccaccgccgctgcctggagatgagctggtgagggtgatgtgggtgagggacgctggccgtcggatctcctga

SEQ ID NO: 33607 - DNA, 147 bp, Zea mays
  Peptide Sequence Number=SeqID_76982
atggcgggctttacaaatcctaccccccttaaaaataatctcgtcctcgagattttcttggtctcattgagtcggggtcagggtatatcatcagagttggggcatatggttgaaatagttatgggtgagatggactacatgatgtag

SEQ ID NO: 33608 - DNA, 1431 bp, Zea mays
  Peptide Sequence Number=SeqID_76983
atgcaggcgacatgcaaccgcaccaagggggcgcaccctttcgacttcgacgcgtccagcatggaggcccaggcccacacgtcatgtaaccggcacgccggttactacgtgcgagaaactgcaccgccactcgcgccagtaccgcgccttctcgactgcggaaccggtgccgcgactcgaggtgaccctgcgcatgacccaacagggccaaccgagcacatcggtcacgggccagtcagccgcaggagaaggcacgacggtcgatacggccagaaatgggctggcagtaatggcggcggcaggcgggcgaaagcagcagtcaagtcgtctgcaagctcacgtcccctcctgggacagcgagagaaccctctctcacggcgtgaagacgacgcgcctgacagacgacacctttggcaggcgaagcaggcgacgcttcaccttcgccataatgaccgcgtcaaaaaagggaccaggaaaggggatactccgaaagggatccttctccgcgaaggaagcgggccccgagccctcctactgatcagaggttcgaaggctggtccctcggaagggttcgacagccgcctcagagcactcgggctccgcgcccaccactggtcagaggttcgaaggctggcccctcgggtgggttcgacagccgcctcaggccactcgggctccgcgcccactactgatcagggatccgtaggctggcccccgaagggttcgatagccgcctcagggcacgcagagcgagagatgactctgggtacgtccgatacatggccgaggctcgggctacgctcccgaggctcgggggctgctctcgcaaacccggctccggccaaaccgttgacagcgtcaacataccagcccgagaacttggaacctgactatgcacctgggctatggccagaaaatagcgtcgcctgccccgctccgactgctgtgccactcgacagagtgaggctgacagcagctaataccagcctcgagcaccataggaagctccgcctcgcccgacctcagggctcggactcaacctcgacgccggacgacggactccgcctcgcccgaccccagggctcggacttagcctcgacctcgaaagacgaactccgcctcgcccgacctagggctcggactcagcctcgacctcggaagacggactccgcctcgcccgaccccagggctcggactcagcctcgacctcggaagacgggctctcatacgagaaagttggccgcgcgggaggacgagctggcggacagtctctctctctcactctccctcgcggacgcttgtaaccccctactgcaagcgcacccgacctgggcgcaggacaacacggaggacgcgggtttcccctttgccgttcttccctccttcgtgctccgtctcgcgccgacccatctgggctgggacacgcggtga

SEQ ID NO: 33609 - DNA, 1143 bp, Zea mays
  Peptide Sequence Number=SeqID_76984
atgtcgcgcgcagaggcggagcggacgcgccagctgctcgtggatacataccgcgggctgggcgcggggaccggtgatttcgaggtgccggaccgggagcccggacttcgctgtctggagtgggtgcaggaggagctgcaagcactccccactgtcgtggagggctttatggcgtatgcctccctggtcacctgcgagggggcgatgaacgcgctctcccgcgaagggtgccggcacttcgaggtcttcgaccaggccgatgaagatttcgagcgagatatctttaaggttgaggaccccgtagtgaaggagtccgccggagccctctacgaccggatgtggggtctgcatggtcgcgaggtggtcagggagcgggccgagacggcgagggcgcaggcgttgcgtggcgagagggtggacgacttcggggcgttgaacagcatgctgtctggcccggagccgaccccgaggaccgcggaaaacgcgccgggtgcctccgcatccgccgcgaccggcgaaggcctgcccgcggaggccgccgaaggcgcgcctgatgccctcgcagccgcggcgccgagtgctggagatcccgcagcggtggcggcggaagcagcagcggagacaacggcggagccaacggcggaggctcccgcaacgtcagggccgtcgcaggttcaagattttgggcctgcgcacacaaccgctgctactaaatttttggcggcttcgaccgcggaagatggcaatgaatgtggtggatctgcgtctgagtgttttgattgtgctgactctgggagctcggttgagtggactgaggagtcgtcggaggaggacttggattattttgcggccttggatgtggctgcggcggaggcttcgccgcgcgtcgcggacgcaggggatgcaccagggcctagtaccgggcgacgacgacgaagggcgattgcgaaacgtagggttagcggggcggagggggctcggcttcgtgtgagtggggctggccggcaggaactgttgtctttgccggccgccgtgaatacaggtgaaggggagctgcgaagtctttttgcgggtgaggagcttaggataatgttatttaattatagggagatgggaattattcctaaggttgagccgatgtag

SEQ ID NO: 33610 - DNA, 915 bp, Zea mays
  Peptide Sequence Number=SeqID_76985
atgcaggggcactccgtccccacacacatcaaccgtccccatcgattccccgtcagcagatcagggctcaccgccttggcgtacaatgcctcactgaccccgactggccgtcgtgcagtgaccgcacttgtacccaccataaccggaatgggagacctcgtctcaggtcgcgtgaggggatatgtccactgccaggtcctctggtgcaggctcgggtgctggatccggggctacctcttgagcagctccttgctccggcacgaggatgtactctccgtcagcaaggttacagtctatcgagatgcaatgaacattccttccccctatgcaaacagtaaccgcgggaaagaaaagggtggcgcggcttaccggcggcgagggaggttcggcgaagggtggggttggctcggggaggctctggcggtcacgtcgaggtacggcttgacgtcggggatggccggaatcgcccggtccacgcgcgcaggcgggtgttctcgtcggcggcgagtgtaccggccaaaccacggcgaactggttcaatccaagggcacggtgagcttcacggggagccgccgacgacctccgccgcctgtgctcgtggccagggtagctccgaccacctccgacgccgacccgcacaccgacgtgacggtcgtgacctcccggacgtcaccgacccccccgccggagctctactgccgccgtggacatatcccctcatgcgacctgagacgaggtctcccattccggttatggtgggtacaagtgcggtcactgcacgacggccagtcggggtcagtgaggcattgttctctggaggacatggttgctggagtgacttggccgtccatcttgccaccgggttggaccgtcgagtgggaccccgcctcggctgaggaggagcatgaggagtga

SEQ ID NO: 33611 - DNA, 144 bp, Zea mays
  Peptide Sequence Number=SeqID_76986
atgagcatgatttttttaaataagtatgatgagcaattgctttcaggagggaactacatcaggcatgatcagtcaaaggtttttgagatcttggacaaggaccttaagtggcttttagttgtttccagattgttcaatgagtga

SEQ ID NO: 33612 - DNA, 288 bp, Zea mays
  Peptide Sequence Number=SeqID_76987
atggacgagtctggtgtgaaaaaggagatcggcctcctgggactagtaattgtatcacatttgagtcccagaggattggggacgcttcagtccctgagttctaacaaaatcaacccgccgtctagagagtactattcactgtgtctcggggatcttgcgccaaggcccctgaactttctagaattcgaggcccagtccagagaagacgagcaagctattgtggatcctgaggttcagcagatagaagtagctgagcaggagctcattgaaggcaagttgtgcccttga

SEQ ID NO: 33613 - DNA, 777 bp, Zea mays
  Peptide Sequence Number=SeqID_76988
atggcgaggcactccgtccccacacacatcaaccgtccccatcgattccccgtcagtagatcagggctcaccgccttggcatacaatgcctcactgaccccgactggccgtcgtgcagtgaccgcacttgtacccaccataaccggaatgggagacctcatctcaggtcacatgaggggatatgtccactgccaggcggcggaggtcgtcggcggctcctgttccggccaaatcacgacgaggcttacccggtccacgtgcgccggtgggtctttgaactccggcgagcacgattgcgctgttccggtgacgcgggtcctcggttcaagcttcacggcctcaccaggaagctatctgaaggcttggatcgaacggaggaggacgggaaaggggctggccacggtggttgctctcgggtggcactggcgggtcgcggggaggtcaccggagctaagggctggcttgggcaagtcaggcgaggtacgggggaggcaacggggaaggcagccgagcactggggcgggccttatagccgtggcgtgggcgtggtcacgggcggccgtgggcgcgcgggggtttgcgcacgggcgtgctctgagcgcgcccccggatgtcagcccgcgtcgaacacgtggaagcttgcttctgccatggttcaacagcggatttgagcaccaaagcgtgcgtatcttggcaaagtcactgtgtacggtcgcttccctgctccatatcctacctttttgctgtgagttccaagtcgagatacggtcggggtag

SEQ ID NO: 33614 - DNA, 1374 bp, Zea mays
  Peptide Sequence Number=SeqID_76989
atggccgcgccagcccgccgccttctcctgctagtcgtcaccgtagctggagccctggcgctccccgtggcggcccagatcaaggaggagtccttcaaggaggacccgcgctcgtccatcatgttcgaaaaattcggcttctccgagtccggcgcggtgcggatcatcgtctcgggcgcctccgtctcctcccccgtcgcgcgggcggaccccaggcagctcgggttcttcctcctctccgacgagtccctcctccacgccatcgacgaggcgcaggaggggcccacgcgggagaagcgcgccgcggcgaccaatggcggcggggaggaccccgacggcggctccaccgggtgcgtgctcaacagcccctacgtcaagaagctcttcaccttcaagaacatgaagggcggccactacaacatgtccttcccggtcacccgccccgacgagtacaccctcttcttcgccaactgcgccccggaggcgctcgtctccatggccgtccgcaccgagatgtacaacgtcaacgccgacggctccaaggactacctccccgtcggccaggcgcccctgcccgccatctacggtttcttcgccttctgctacgccgcgttcctggccgcctgggggtacctcaccctctcccgcgcccgcgtctccgcgcaccagatccaccacctcatgtccggcctcctcgtcgcgcgcctgctctactgcctctccgcggccgaggaccagcactacatccgcgtcacggggacgccgcacggctgggatgtggccttctacctcttccagctcgtgaaaggtgtcatcctcttcgcggtgatcgcgctggtcggcacggggtggtcattcttgaagccggtgctgcaggaccgggagaagaaggtgctcatggccgtgatcccgctccaggtcaccgcgaacatcgccgccgcggtcattggggagaccgggcccttcatgcaggggtgggtgacatggaaccagatcttgctcttcgtggatgtcgtgtgctgctgcgcggtgctcttcccggtcgtgtggtctatccggtcgctcagggagacgtccaagaccgacggcaaggcggcacggaacctctccaagctcaccctgttcaggcagttctacgtcgtggtgatcgggtacctgtacttcactaggatcgtcgtgtatgcgctcaaggcagttgccagctacaagtaccggtgggtgagcatcttggcagaagagatggccaccctggcgttctatctgttcatgttctacacgttcaggccggccgagaagagccactacttttctctcgatgacgatgaagaagaggccgcagagatggtgctccgagaagaggaattcgagctatga

SEQ ID NO: 33615 - DNA, 846 bp, Zea mays
  Peptide Sequence Number=SeqID_76990
atggtgggcctcacactcatttgtcgctgccctcaacgccacatcgccctcttcatcgagccattctttagctggtggtgcaccgagctggctcctgatagggttcggccagcactccagaaaacactcaaggacttgcagctggattacctggatctctaccttgctgaaagacggggcgcacatgcccccggaagccggggaggtgctggagttcgacatggaaggggtgtggagggagatggaaggccttgtgaaagacgggctcgtcaaggatataggtgtctgcaattacatggtcaccaagctcaaccgcctgtgcggtcagcgaatgttccaccggaagtgtgccagatggaaatgcaccctgggtggaagaacgacaggatctttgaggcctgcaaaaagcatgggatccatgttactgcttactctctgctgggttcgtcagagaagaacctagcacatgacccgctcatcgaaaaggtagccaacaaactggacaagaccccggggcaggtgatcgtcaggtgggcgctccagagggggacaagcgtcatccctaaatcgaccagggacaaaaggatcaaagagagcatccaggtgttcgggtgggagatcatgcagactcccaagcaacctctaaccgtcaaggaactcgaggttccaagagtaacaaatccgcacacggttaagtttgcaacgagcccaagaacaagagaatgggagaatcgagatgaaattgacagcgagttcgatcgagttcacctcacaccaagggtccttcaaatgattgaaggaaatgcgattgcgggtgtgaaaggtgaaatgaatgcgcttgtttga

SEQ ID NO: 33616 - DNA, 3282 bp, Zea mays
  Peptide Sequence Number=SeqID_76991
atggcgagccacggcgccggggtggctgctggatctgacgccccgcacgctgaggttgtcagtatgggtcaaacaaatctatctccatatcctctttcttccagtcatcattcatggtcctctgcaactgggtcagcaacggtttcatggaacaatacagtggacaaacttagccaagatacagtttactatgatccacaaagggatgtatcagattcaggagggaatcaaaatgtagaaagtagcgtgcctcatgttgcccagtcgagtagggggatggcagatgtagcccattctcacatgtcttactctagttcagatcaacatgtctataaccctgtagaatatgccaactattattatagctacccacaagcaacaaatgattcttctgtccagcaaggagcaaaccaacatccaggtgcagcttatcagcctcttacttcatttcaaaattcagggtcttacattgatcctacaagtaacacatattacaatgctgggggtcatcagaccgtgccaggatatggaagcagcagctactattatcagaacaacacatggaatggtggaagcacagggaatacttttgctcaatcataccagaactactcatcatctgatacaaatgcacaacaaagttctacttcagtgcctgccaattctttaccatatcagcagcagtataaccagtggccatactattacaatcaatctgtgccaagtgcttctagcaatccagttgctgggaacagtactacagataacttaactggtaacatgccttctggctattcatatcctagtagccagccacctccaccaggaacaacatcatggaaaagtaattcagttgcttctgttgcacctcctatgcagaagaacaatcatctaaatttcactactctccaggttccaggtgttccaggacagcaaagtcaatatggcaaccaggcagaaggccattataaccagggacctggtgtgcaatggtctcaaaatcattatgcctaccagacacagccataccctcagaagactaattccaatcatccacaactaagcaaccatgaagatcaacaggagactgtatattctaacagtccaagcacaaatctttcgtcgaaccatgtttctgaaaattttaaaccaaacttgcaggattctgtgacaatggacacttccagcgaaggcaaaatacaggttcctataaatcctcaaattgccccaggtttctctatggtgataccaaagaatgagaagaaacattctggacttgatttatcaaagaaacctgcctatgttagtgtctccatgcctacgaatgatgctaaagcaactcaagttggtcttgatgctagattacccttttcactccgtaactatgctacgaggaacctcaatcgttgcaagaatgatgcccagagggaggcctgccgaagcataatgaatgagatcacaaaaaaagcttttgctgagggaacccttcttactaagaactgggacactgaaccactatttcctttgcctgaaagtactgtgggcatgactggaacaagtgtatcccgtagctccaagtattcagcaattatgacaacagataagcttgattgggaagagagcccaagcagtgtaaacaatttaagtcccttctcatcagtttccaccccaaggaaacgtgtgaaaagtagatgggagcctgttgtggatgaaaatgttaccaataaggtggaacaaatagcaaaaggattgatcggcagtaatgtccacagtacttcggaccctaaaaatagaatgggtagcagttgggatcataggaagtttctccagtcttctcaagcaccttcaaataaagtcaatcagaggtctgccaagaagcaaaaaatgggtagtaatttgagtcaaatacagaatggaaatgcttcaagtgacagtgagaaggaacatgatctaaccaaatattatgccagtgcaactgcactagcaaattcgcctgaggaaaagaaacgtagggagcatagatccaagcgttttgaaaagagtaaagattcatcatttaaatcaagaaatgtttctgcaaataaagatgctatgactaatttgcgtgcaagaagggcaattttgtcttttcgtactagaacctatgaaggcggcactttggctgttgaggatatggattgggatgcactgacagtcaaaggaacatgtcaggaaattgagaaaagatatctacgacttacagaagcacctgatcctgccaaaataaggccagaagatgtcctggagaaggcccttgcaatggttgaaacatcacaaaagaattatctttacaagtgtgatcaactaaaatctatccgccaagatcttacagttcagagaatccagaatgaactgactataaagatagcttattttcaggtttatgaaacacatgcccgattagctatgcaagctggtgatttacatgaatttaaccagtgccagtcacaactgaagaggctatatgcacaaggaatcaagggttgctattttgaattttctgcttacaatttgctgtgtgtcatgctacactctaataataaacgagacttgctgtcatcaatggcaagcttatcaaaagaagccaaacaagatgcagctgttaagcatgcccttgcagttcatgcttctgttttatctggcaattatgttctatttttcaaactgtacaagaaggcgcccaatttgaactcatgcctcatggatctatatgtggagcggatgcgcttcgaagctatgaaatgcatgtctaggtcatatcgcccaactgtacctgtgggatatgttgcacagattttggggttcatgagaactgatacaggctgtgcaaccaatggggatgatggattagaagaatgcgaaaaatggttgaaagcgcatgggatagttctttcagaaggtaacagtggggaattacaaatagacatgaaggcttcgtcttctacactttacatgccagagccagagaatgcggttgcacatggtgatgcatcacttgctgttgatgactttttggcacggactgacgggcatcttaaaaggtgcagcagcgatgagccaacgtcgtgccgagatgtggacgcactgcacttctcccgtagaaactgcaaagggggcatgaaatggagctgcccaacgaagctcgcggagctaagagagtcggaacaactgaacaaggatgtggtcatcgggttttgccacttgcgcaaattgatccagtcatccagagttgcaccgcgatga

SEQ ID NO: 33617 - DNA, 483 bp, Zea mays
  Peptide Sequence Number=SeqID_76992
atgaaatttggcgttgtccctggggatgggcacgccggcgtccaggatgtggtgacaaaattggcaggcgatgctgcccatggagatagggacgccggttgccaggacggcgtgacgaaggtggcatgcggcgcagcccatggagatggggacgtcggttgccaggacggcgtgacgaaggtgacatgcggcgttgtccatggagatggggacgccgattgccaggatgacgccgcgaaattggcagcagaagccatgggatcagatcgaaacccaagctctctgataccagatgttatggtcgctagatcgggtgatagcaagttaactgcaaaatctagcgatggctcaattaaaaaggatgcccttggtcatgtgggagcaagtagctcagctgcacaagggatgggccaacagggagcatacaaccaaggaatgggttatatgcaaccccagtaccataacggggatatctcaaactaa

SEQ ID NO: 33618 - DNA, 4038 bp, Zea mays
  Peptide Sequence Number=SeqID_76993
atgagctcggggaccgtcgcggcctcggaccctgggggtggcgagacgaagctggtggcgggagatgacgtcacaatatcggaagctgcgggcgatatgcctgcgttcgccgccgatttgaaagtggaggagaaggctacgttgacgatggatgtggctcatgaaaggggagatatggcggtgagcgacccactctacgcgactgagtcggctgggatggttggtaccgaagggcacggagatgagcccgtggaggacgtggatgcggtgaacggagaggacggtggcgaggaggggacgcaagaagcaggagctggtggtctgctgactgagacggagaggaagccggttctagtggtagatgtgcctgctgctgctggttctgccgctcctgaacatgctgaagccgaatccaacaaagtcgaagaaaatcatgtaaatgcggagcctgggagaaagaataatgaaagtgatcatggtgtagtgccttctgataaggaaatacagaacaatgtgcctggtgacatggaggaaagctccgaggaacatgaaggtgatggagcacctgtagttgaccagcccaataacacatctgaaatgctcccacaaacaggagagcagtttcctgacagtggaaatagcccagacagcaacttagaggctgctagtctggggaatgttgatcagggtgctagataccgcctcccacctcttgataaaggcaggtttcaagttgctgatcttgtctggggtaaagtgaaaagtcatccttggtggcctggtgaaatttttgatccaacagatgcatctgaattggcgctgaagcatcggaaaaagggcagccacttggtagcttattttggtgacagtacttttgcatggtgcgatgaatcccagttgaagccttttgtaacaaattattcacaaatggagaagcagagcagttcagatggctttgttgggtcagttaataatgcacttgaagaactgtcaaggcgggtactgtcaggtttgagctgctcttgtttggcagaagagcttgctgataatggtatgtcatatacggttgataatgctgggctcaaggatggagttacttgttctgcagttaatcggcctgagatcttgaactgtttcagtccagaaaaccttcttaattatattaaggagttagctctatttcctggccagggaggtgatctattggagttagtgatagcgtgttctcaacttacatctttctatcgatctaagggatgtcctgaacttgcatcatttcaaactagtgatgcgtgggttgaggatgatctggatggtatagacactttgtccacccagaatgtaatggtggaggaacctgtgattaacgaagtgcagcctactcaagataagcccaaaaggggcagggggagacctcggaaacaaaaggctggtcatgaccaggtggtgatggagaaaaggagcacatctaatcaggtcaatgatactagctacaatgagaagaaaagaaacctcaaatcatttgaagattcagagaagtcatcagctccaactggtggtggttctttcaagattggtgagtgtattcggcgagctgcaagccagctgacaggatcttcatctattatgaaggctcagaatgaaccaacagtctataataacgctgctgaaggagagaatggggaatttgatgtctctagtgatgatgctggtgatgaacttactgtggagaaacgagcaaaaaggaggcgtctgcacataaatcacgctgcagatcccagggaattactgtcacaactatgcttggttgcaacagagccaatgaatggatatagtttctcagcaatgataatcggttacttcaacgattacagaaactatattgtttctactactactgaagcaaacattgttgataaaggtacatctagaagagggaggaagagaaaagaagttataccttctcctgaggtagagacaacggatcatatgcaggactcgtattggtccggattgagcttgtataatcacccagttcatgacctaaaaagagagagtccgactacaaggccaagacggaaacggagatcctcaagacatgcatatatacctttgtcggaacttggggagccggttcctaaaaaacagatacaagtgatggaaagatctatcatccatgtcgatgagaagatggttgatgagttgaagcccactgcacttgttttgacctttggcaggtcagcgtctattccttcagaactggatcttgttaagatgttcagtctctatggtccactgaaagaaagggggacaaaagtacatagggaaacaaatactgttaaggttgtcttcaagaaacgtgtcgatgctgaaagggcttttagtgctgcaggcaagtatagcacttttggaccttcgcttcgaagttaccgtcttgtcagtatgccactttctccagagacacaatcagcaaataatcctgaaaatcatggcttggagattccaggtttgaatatgtccgaagctcctaaggattccatggaagttgacctggtgcagaaaacagataaagtaaaagttacaggagaactgtcatctgaagaagttgagactgtaaggcaaacatgtctagtggaagctgcagacagtacatttgtcagtgaagttgacaggcttgagaaagcaggaaatattgatgctgagctaattgtccatgtgaatcagattggggaaggtgcagaagctgcatctgtatctgaagagtcatctcagcaagtgggtgacattgagcaagcttacactcaaaaggcagcgtcagtcagtgatctacccacagagatagaaaccttacattctgatgctataataaaagagttgcctcagaaggctccagataatatgcaaactgatatagccacggccccaaaacagagtcacaatccaggagataatgctgtatttgaagctgtcactgaagtgccaagtactgcacaagatcatagtgaggatgatgttggggatgaagttccagaagagcacactgtatttcctgtgttacaaagtcaaacccctggtgagaagctagtggggcaatctgaaactgaacaaaaagtgggacctgaagatccaaagtcacaagctgaaaatttgactgttgaacctgtcgtacaaggtgcagtcgagcaagtagaaattgaactggaatccaaaactactgttgaagtgtcatgcgaacaaggctatagtattgagcagactgttaacatggaagctgtaattgaagcatcaggtggacaacttgaggtgggaagacgaatttcagaagatgaatctatggctgatgcaaatattgagcactctatggtcatggttgatgaaactgtggaggcaaaagtagtaccactcgaggagagtacagagaataatgctgctaccataggagtagttgaggagacagctgaaggtgaaactaaggaggaagcaccagacgagaaggggaaaatagaaaataatgaagatgctgacaaattagctggagagaccagggcaggtgaaattacagttgaggcaccagatgagaaaacagaaattaaagcagatgctgacacaccagctggtgagaccaaagaatgtgaaattacagtagaggcaccagatgagaaaatagcaaacaaaggtattgttgaaccaataatcagggagataactgaagatcaaactgcagctggagaaccagatgaagaagctacaacaactgaggaaacggtagaggatgttaaggtgctagatgataagtctacagcagatgggaaacctgtagagaatgccacagtcgcgacaaatgaggattcaacaacagttgagaatactctgaaggatgcaatggttgcgccaccaggtacaaataccaccaacgccgaagaaactgctctgggtgccacagttaaagcactagatgaggatgctctagcagtggagaagactatagaggatacctcggttgaggcatcagatgtacaagcaggcaggtgcaagtga

SEQ ID NO: 33619 - DNA, 2940 bp, Zea mays
  Peptide Sequence Number=SeqID_76994
atgaacgtggtgggaagggttgggtcggtgatctcgcagggggtgtactccgttgcaacacccttccacccatttggcggtgcggttgacattatcgcggttgagcagcctgatggttcgtaccgcaccacaccatggtacgtccgttttgggaagttccagggcgtgctcaagggtgctgagaaggtcgtcaccatcagagtcaatggcgtcgaagccaacttccacatgcagcttgacaattccggccaagcctatttcatgcgtgagcttgtgcccggcggtgaagattctggaacaggttcagacgacgaaactgtcaatgagcctgaacctccagcgcgtagtaagagtgatggggaactttacattggtcctagcgacagactgggtagccaagagctcaatgtggagcatcaagagaagcaaactagggatgagtttgagtcatatgatggttatggtaggttagaggaatcagaagatttgtcaacccaagcggatgggggaaattcggaggtggttctagttagtgtggacggacatgtgctcactgcacctatttcttcaacagaggagggtatggaggatgtgcagttatgcgaccctcagtttcatttgggacctgggcagagctctagtggggagttcacccgaagtggcgaggtctgggatgctgacattttagatggtttatacatatcacaggaaaaggtaaagattaattctggacatcagtcagaggttttaacagagaatggagaggtaccggttgaaaaggatgggtcacatcacatctcagtggacaaagatgaagtacatgtgtcaatcaatgatgatgaagctcatgctgtttctacaaatgaagttgaggttcaggatgtgtcaaggtcagggaatggtgatgtggtttatcaaaccatgaccagtgaaggtgagtcccatagtattttaggggacatagatgttggccatcaaacattgaccagggaggatgactctcctggtgtttcaggggagaatgttgtgggttatcaacccttgaccaatgaacataaagctcatgatatattagagaacaatgatgaggatcaaccacccctgaacaatgaagatgaatcttgtgatgtgccagtgcttgaaaaagacaaggattgcaactccccagctaataaggatgaggtttgtgatctcaacaatgaggatactgaggataccagtgctagttttggtaaaaacgacgctttccagagctgtttggatctgacgtcacaaatagatgacggggattcaggaaacgaactattttcacctggatctgattctcagagggatgctgagcataatttgggtaactgttctgttgctgaaacagatttggaggaaggtgaaagtaaaactgcttactgtggtcagtatggtcctttacaggagggagtgaatgtttcattatttaccttagaagttgataagactcaaaacaaagagagttctcctgctggaggttctcatgatagggacaaggaaattgcctctgaaattgaggctgccgcatctgatggtttacagtcatccatggcgaccagtggtaaagacaaactggggagcattccagagcactcagaagttgaagatgaacagaataaagaagaacattctcagtcacagaatggcttgggtgttgagatttctctttgtgggaacatgttacgaccaggaatgggccgagaatctgctgaggaagtgtttcaacagaatcttgtccatgaggaggatttcaaatcatctggatcaacaatgataaaaaatgcaaaccttattgtcaaagttgacaataattatttcccctggaataaagtttctcatgttattcttgggaaggctgtatatggctcaaagtttcccttagaacccactgatgctgttccggttgaacaacaggaaacacccaaatcaagagaggactctcttagaatgtctccctcaagccggagatggaggctttggctcaatccctttcggataacaagatcccttcaacgtagtaacagtgattcttccgaagacattttccttgactcagagtctgttttgagtccaatggatgatcaaactctggagaacaacaaaaaccagtcacctagaaagcaattcgtacggactttgattcccacaagtgaacaggtagcatctttaaatctgaaggagggccaaaacttggtgacctttagcttctccaccagagttcttgggaagcaacaggttgatgcacatatttacttgtggaaatggaatgctaaaattgtgatatctgatgtggatggcaccataacaaggtctgacgtgctgggtcaggtcatgcctttggttggacgtgattggagtcactcaggtgttgctcgccttttttctgcaattaaggaaaacggttatcaactactattccttagtgctagagcaattgtccaggcatatctcacgaagaacttcctctttaatctcaaacaggatgggaaagcactacccaatgggcctgttgtaatttcacctgatggcttgtttccttcactctaccgagaagttatacggagagccccacatgaattcaagattgcttgcctggaggacattaaggcgctctttccttctgattacaatccattttatgctgggtttggtaacagagatactgatgagctcagttacaagaagatgggaatacctaaaggcaagatttttatcatcaacccaaagcctcttaaatcacgtcccatggggtcgcagggtgaagtggctgtcaacagttctgttgatgtgaagtcttatacgtccctacatacccttgtcaatgacatgtttccaccaacaactctggttgagcaggaagactacaacaactggaattactggaaggtgccattaccagatgttgatttgtag

SEQ ID NO: 33620 - DNA, 1086 bp, Zea mays
  Peptide Sequence Number=SeqID_76995
atggcgggaaggcgagaggacgtcgacggagaggtgcagcggcgggacgaagaggaagaggaggagtacatcgacatggacctgagctcggcagcgcccggggcgcgggagttcgagttcatgtcggcgccgctggacaggtggggggagcccctggcgtcgccggcggacgagctcttctacaagggcaagctgctgccgctgcacctgccgccgcgcatccagatggtggaggagctcctggtggacggccgcggccgcggggacctcctcttccccctccaccacggcaccaccaccagcagcagcagcaccgccccggcgacgccgtacgagtcgtgcgccgcgtcgccggccgactcgcgctacgtcagcggggagctcagcgtcgaggcgtacttccaggagtacgcggccgcccgcctggcgctggcggacgccgcggagcccggggagaggaggccgacgacgacgtggtccaggaagctcaggttcgtgcggcagctcaacctgggcctccgcctcaaggcgtccaaggcgtacctcaagaccatattcgcggcggccaagccggggcagcagcacacggacgcccgcatggacgatgttggcgcgccgacgggagcgcaggaggagctggcccgtggtcacctcagggcgtggaggaagaacccgttcgcccagatcagaagcaacaggtgcgtcgcctcccagtcccatgccgcgcccgccgcaggaggagggcggtgcaaggaacgcgagcacggccacaggcggtccttctccagcgtcatcgtccggtactcctcgtcgaacaagacgtccccagtccctgcgctgccgccgccgccgtcctcgagcgagtccgactgcgcggggccggcgctcaggaggagcagcagcgccagctccgaggtggagaaccccatccaggggttcatcgcctactgcaagaagtcccagcagcttgcctccgtcaggaagagcgccagcgacgccggcttccgcttcctgtcggccgcggcgtccaagatcgccgccgagtccgacggccttgatgacctcaccgagatttgcagaggatga

SEQ ID NO: 33621 - DNA, 543 bp, Zea mays
  Peptide Sequence Number=SeqID_76996
atgtccatatatgagcaccaattcggattcggaattcaaaatcagaaagtgggcagagattggcaaaatgagtatcaggccgcggaccgtccgcccatggaccgcggaccgtccgcagcatcaggtcgctttaaatccaagcgccctcgtggcaatgatgatgactatacacctaccactgattcagaggcccaatcctcagctgggggcactgaatccatggatgctgaagattttcttcatgttcaccctgattatcccattgatatccaaggatggacttaccccaagcggcgattttctatggctgagtactgctctagacggactgtgaaccagtatgctctgccatcagatacaaatattcagtttttccacactcagctgcagtttgatgtcttttggggcaccctggtggataccaactttcataagcatcaggtgattgattggtcctttgtcacacccggttttagaaggcaaaccgaatgcgaaccatgtacgtgccaggatcagttattcacgtacacagcagttacataa

SEQ ID NO: 33622 - DNA, 504 bp, Zea mays
  Peptide Sequence Number=SeqID_76997
atgaaggctcaatccaggggtagccctgttacaaggaaaaggcgttgtgccaagtccctggttggcgcagtaaacgccccaccgtcgcgcaacatcaaccgccttgggggtcaaggtgctctggatgtacgcagcaggcttggacctgctgcatggaaggcactggaccctgtgcctagtgagcggacctccgggacagatcccggatccttccaaatgtggttcgggcggttcaccaccgggtcccaggtcctaggggtaggaaatacccggaccctgccctggaaggggtccggggcagacacgtgtccggggcttgcatcacgccccccccctccgccaaggcggaaacccgctgttaccacatggctagtggcccatgacatgagccaacggaaggagtctgacgtcgggtcactggagtcgcgcagccactgcatttattgcagtagggacgcgacgcctacgccaagccaacgaaagatgtgccccctcggcatttaa

SEQ ID NO: 33623 - DNA, 867 bp, Zea mays
  Peptide Sequence Number=SeqID_76998
atggcgctccggccgcagctgcttcgcctcctcctcccatcgcctccccaccggaaccctccgcctccgccctcctccccgtccgtcgcacccattggccgccgcaccgccgcagcagccgtcctcctgctcgccgcgggcgtctccgccccgcccccgcgcgccgcccgcgccgagcccgacggcgaggacgtcgacgaggcccgcatcgtccgcctattccaggaggcgtcgccgtcggtcgtgttcatcaaggacctcgtcgtcgcggggccgcaggggcggagagttggtgaggatgaggacggggacgaggagggcggcggtgctaaggtggagggcacaggctcgggattcgtgtgggactccacgggccacattgtgtttttggagggttctggtggcaaaagttactcaaaggaagcgaggctaatagggtgtgatccagcatatgatcttgcggttctgaagatagatgctgacagggaccagctgaggcctgctctgattggcacatcacggagtttgcgagttgggcaaagctgctttgccattgggaacccttatggatatgaacacactctaactactggggttattagtggattggggagggaaataccatctcccaatgggagagcgatccgtggggctatacagacagatactgctataaatgctggtaactcaggaggcccacttattgactcttatggccatgtaattggtgtcaatactgctacattcacacgtaaaggatctgggatctcgtccggggtgaacttcgccatccccatcgacacggtggtgcagtcggtccccaacctgatagtgtacgggacctccgtgagcaacaggttttattaa

SEQ ID NO: 33624 - DNA, 1704 bp, Zea mays
  Peptide Sequence Number=SeqID_76999
atggatgatccccataactactacccacctgagttcctaaacacgctgacacctaatgggctgcccccgcatgttttgaagctcaagattgggtgccctgttatattgcttcggaatatagaccctgcgaatggactttgcaatggcaccaggctggtggttcgtggtttccaaagaaatagcattgacacagaaattgtactgggtcagtacgctggaaaacggattttcctgccccgtatacctctgtgtccctccgatgacgagatattccctttccagttcaaaagaaagcagtttcctatacggcttagtttcgcaatgacagttaacaaagcacagggtcagactattcccaatgttggcgtgtacttgcccgaaccagtgttctctcatggccaactatatgttgctctatctagagcgacagcccgattgaacataaagatccttgccatcccagccgttgatgggaagaagaggtcgaggaagggtgtaagaaagaatcccacagtagattgtgggacatataccaagaacatcgtctacaaggaggggggtaaaaatataattaaatttgagggcgatcataattctccaagacctcaatcatattatgattcagtttttatattcttctacaaatctttgcatcctcctctactgtctgcagcacgatcaaagcttcatatgggagcatttaaaattggtaacataaccaatgagactgtttttggcatgacagcactatctgcagtgggcctcgtaacaggagttgtggtttattatattaatgtaccagggttacattgtctactggttgatgtgtccaaaacctatgttacctatgctatcaaatttgtgaaactgcatgatgttggttacctttctgattggaagacaaagaaggcttgcaactattttttctttgttcccatttgtgaagctgtcgctggaggcgagatgaactcatgttactggtattttaactgctccagaacagttccaacctgtgatctacttaacctgcatgccttgaagagatttggagaccaagcaaacaagcacagatccaagatattcaacaacagtttgccctgcatgagtgatcatgatgtacaacatcacaatgatgagcctgactacatggatcgaccgaagttggttgggtatccagttctgaatgcaatcccgtactatgcattgacagtaaagccagttggtgaggcaatccattcaaatctgaagcaactgattatgtctggagagtgcaaattggtgcgctcagcaagttgctgcgactgtagggaaatcatgtggaagataatggagcaagtaaaggcagaatctgatcaatggactgagatgcaagatatgttggagcaggcagcagctataataacactgttgtttattattgcactcaatttggctattgggatactacctcacgttgacaactttgctcacattggtggattcgcgacgggtttcctcttgggttttgttctgttggcaaggcctcaatttagctggatggaaagtcatgagttgccacacactaaccaacctcccaagtacaaagcatacaagtatattttgtgggttgtggcactcgtcttgctgttagttgggtttgtgatttcactggtgatgcttttcaaagggaagaacgggatggctgccattggtgccactacttga

SEQ ID NO: 33625 - DNA, 1725 bp, Zea mays
  Peptide Sequence Number=SeqID_77000
atggcgcccagcagccgaccccactcacagcttgcagccgcgcccacgaccagcacgccaagcgcgaatctcgcccaacttcgagcaaccacattcccagcaggctcgctaacgtgcagttgttgtggcttgcaggggaagggtacgggcagcttcagcaagcgccggaacaagacgcacacgttgtgcatcctctgcgaccgccacagtttccacctccagaagagcacctgctcctcctgcggttaccctgccgcccgcatccgcaactcaagttttggaaagagaaaacacgggtttagccagttccgggcgtttttttacggagtaaccggcattcttcttattatggatcagataggatacaatgctggtcgcacaccattcacagacatctcaaacaccatcattacaggtaatcaaaatgaatcgaactcgcttggaccaattgtcgatgctaaggaatgtaagaggcaaagggatagggaaagatatgttgcgatgactgttgaagaaaagaatgagaaaaataggaagcgtcgtgaagcacgtcaacgaaataaaggactatcgatagagccactctcatccagagaagacgctaatacagaccaggcatgtgaggtggttagctttccagatgactgtagcaccattgatttcacaaatttgtcaacacaagacattgcagacgaacaagtaaatctggatccagatgatgacagcgattggttgcataggaatgagacatttcaggcaaacaacattgtcacaagtaaagaccttctaacaccaggttatgtgcatgaaactgttgataacatacctaagcatactatgaaaagggccgcctactttagcgagcggtacaaaaacatgacttccgtcgagagggagtctagacgtgtacgccttaggttgtataataagacaccaagacggaaagatgctaacaaagagtgcaacagaaaacgtagagcactgcgggctaacactttgaatcaggagtccatcgccatggaggacccagtatatacccctgaggttgtacgtcctacaacatatggaattgaaccatatagatcctcagttaccacttgcgactgggttatccctgaattcgtcatgacacctttcctaccaacttcaacatgtactaagaacatccttagtccgactaaacgtgtgagtgcaggcatggttaaacaaggagtagaccatacacatacgaagccaaagttcatttccaatggtgatgatgatgagggtgtcatattcgaagaggatgaggatgatgatgagaacgatggatacctattcgttgggcaatgcgcgtacctcaatttgtattatgataccacgacttatataactacacatgatgagaccgacgaggacatcgagatcgatggtactcaagatgaatctactgccactgatttgcctggcctgtacgacaaagtgtatagtaacgtgcctgaagaaacacatatgttgaagtctgtccgcaaatgcggttattgcactgcgaagaagtttgagtatgagccacctgggttttgttgtcgtggtgggaaggttgagctagccccactggagacccctccccagctccggaagttgtgggatagtacagactctgatgctagacactttcgtgatagcattaggtttttaatggccatttctctttcacttcactgtattgttgcctcgatagtatga

SEQ ID NO: 33626 - DNA, 2403 bp, Zea mays
  Peptide Sequence Number=SeqID_77001
atggcggcggccgccatgtgcccggggccgatgaaggcgacgtcgcagggggcgttccagggcgagaacccgctggactacgcgctgccgctggccatcctgcagatctgcctggtcgtcgtcgtcacccgcggcctcgcctacctgctccgcccgctgcgccagccccgcgtcatcgccgagatcatcggaggaatcctgctaggcccgtcggcgctggggcggagccacaggttcctgcacgccgtgttcccggcccagagcatgacggtgctggacacgctggccaacatcggcctgctcttcttcctcttcctcgtgggcctcgagctggacatctccgccatccgccgcaccggcaagaaggccctggccatcgcgctggccggcatcagcgcgccgttcgcgctcggcatcggcacgtcgttcgcgttccgcgccaccatcgtcaagggcacgccgcaggggcccttcctcgtcttcatgggcgtggcgctctccatcaccgcgttcccggtgctggcccgcatcctcgccgagctcaagctgctgaccacggacctcggccgcatggccatgtccgccgcagcggtcaacgacgtcgccgcctggatcctcctggcgctcgccatcgccctctcgggctccggctcgcccatcgtctcgctgtgggtgctgctcaccgccgctggatttgtcgttgctgtctcgctcttccttcgcccggtgctggcctggatggcgcgccgctcccccgagggcgagccggtcaaggaggtctacatctgcgccaccctcgccatcgtgctcgccgccggcttcgtcaccgacaccatcggcatccatgccctgttcggcgccttcatggtggggatcgtggtccccaaggacgggcctttcgccggcgtcctcatcgagaaggtggaggacctcatctcggggctcctcctcccgctctacttcgtctccagcgggctcaagaccgacgtggccaccatcaagggcgccaagtcctggggcctgctcgtgctcgtcatcgctaacgcgtgcctcggcaagatcggcggcacggtgatcacgtccctgctcgtcaagatccccgtccgcgaggccgtcacgctcggcttcctcatgaacaccaaggggctcgtggagctcatcgtcctcaacatcggccgcgaccgcaaggtgctgaacgacgaggcgttcgccatcctggtgctcatggcgctcttcaccaccttcatcacgacgcccatcgtgatggccatctacaagccggcgcggcgggcggtgccctacaagcgccgcacggtggagtgcgcggcgggcgacgcggacggcgagctgcgcgtgttggcctgcttccacaccaaccgccacatccccacgctgctgaacctggtggaggcgtccaggggcaccgcgcgccgccgcctcaccatgtacgcaatgcacctggtggagctctcggagcggtcgtcggccatcagcctggtacagcgcgcgcgccgcgacggcatgccctttttcagcggcggcaaggagcagcgggcggagcaggtggtggtggcgttcgaggcgttccagcagctgagctccgtgcgggtgcgcgccatgacggccatctcggacctggacaccatccaccgcgacgtcatcgacagcgccgccgacaagcgcgccgccatcgtggtgatgccgtaccaccgggcgctcggccacgacggctccttcgcgtcgctggggtcggcgtaccacgccgtcaacaagcgcgtgctccgcgaggcgccctgctcggtcgccatcctcgtggaccgcggcctcggcgggcacgcccaggtgtcggccaagaacgtgtccttctccgtcgccgtgctcttcttcggcgggccggacgaccgcgaggcgctggcctacgcgacgcgcatggccgagcacccgggcgtcgccgtgacgctggccaggttgcagccgagccgaccgccgctgctggacgaggccgagagcgcggccgacgaggccgcggtggaggcgttcaaggccagggtcggggccgtgaaggacgggtcggtgcggttcgaggagccggaggcgtgcaccagggagcaggtgctggagaccatcgagtcgctgtccgggttcaacgtgttcgtggtggggcggatgccgccggtggcgccgctggtggagaggcccgacgagctgggccccgtcgggagctacctggtgtcgcccgagttcaggacgtcggcgtccgtgctggtgatcaagaggtacgacccggccacgaaccccaagagcaagaggttcgaccccaaggcggggccgccggtggcgacggaggaggacgtgctggacgaggagatggggatggggcgcgccaccgtggtgcccgtgtga

SEQ ID NO: 33627 - DNA, 264 bp, Zea mays
  Peptide Sequence Number=SeqID_77002
atgtgtgtcctaagaaatccgaagagcctccacaagcacaagatcaaccatcatcttccatgcaagcatcccctacaactcaagatgaggatcaagctcaagacaatgaagaagaagatcaagacaatgagccacctcaagaggagaacaatgatcaaaggggagatgacaatgatcaagacaaagaagatgatcaagaagtacagggtccaagaccgcctcacccaagagtccaccaagcaattcaaagagatcaccccatga

SEQ ID NO: 33628 - DNA, 267 bp, Zea mays
  Peptide Sequence Number=SeqID_77003
atgcccggctgccgcgcccgcgccgtcgcccgccgtcaacgcgccgccgccaccccgcccgcggcctccgccgcgccctcgccttcgcccgcccattgcgcagcccaccgcgccctccacgccctcgcccgccgccgtgccctcatgctagcccgcccgccgccaaagtgcacgtcgggaaagtgcacgtggccgacctccaacccccgcgccccatcgtctcgcccacgacccgccgtcacgcccgcaaccaaacctccaaggtga

SEQ ID NO: 33629 - DNA, 255 bp, Zea mays
  Peptide Sequence Number=SeqID_77004
atggctgccgagctcttatccatggcgcggctcccctttttcccctgctctctgttcagcgcaggaagccgagctcctcttctcatggcgcttggctggccagggcgccaaccctcccctgccattttttccatggccgagcagcagccctacgcagcgccctctctcccatggacgcccagagttttcccagtgccctgttcatcttcctcccagcagcagtccctgcgcagctccatttccccatggccgtga

SEQ ID NO: 33630 - DNA, 348 bp, Zea mays
  Peptide Sequence Number=SeqID_77005
atggtgaagagggggaggaggggatgtcgacccccatggctggtggcgagaggaatggaagctagggtggtcggcttgaggaaaggggaggagagatggacgccatggctgctggcttgctccctgcggctgctgtataggaggaatggtgccatggatatgagctggagacgcctgctccaaggggctcggccagcgcccaagcagagaggtgaaggcgccatgtacagggaacgtcggcagaggaaggaagaagacagcgtgggggagaaggaggctgttggtggcggctggaaaaatgataggggtgggagtggaaaatgtccaagtgagcacccctatttatag

SEQ ID NO: 33631 - DNA, 975 bp, Zea mays
  Peptide Sequence Number=SeqID_77006
atggccgccatcagccctagctgcgcttgccctagttccagcagctttgacgccgccccatcttctctgctcctctccatctctgcagcttgtcagcccgccactcccagcctctcctccctgtcgctcacccctgccctagccatgaatgccgtcaggccgcccggtctccagcccgtcctcgccaccaaccacgctcgctcggatccgcgactctctggatgggagatgctcaccaagtggtcgtcatctaaccacactaacgtagatgtcaagcaggttgtccttgtcggagatcattgccaattgggtcctgtcatcatgtgcaaaaaagcagcccatgcagaattagcacaatctctctttgaacgccttgttatccttggagtgaagccattcaggctacaggtccagtatagaatgcatccatgcctctcagagtttccatccaactgcttttatgaaggcacactgcaaaatggagtgactgttaatgagaggcaatcgtctggaattgattttccttggcttgttccaaatcgcccaatgttcttctatgtgcagatgggacaagaagaaatcagtgctagtgggacatcgtatctcaatagaactgaagctgcaaatgttgaaaaaattgtaacaacttttttaagaagtggtgttgtaccaagccagatcggagttatcacaccttatgaagggcaaagggcatacattgtaaattacatgtcaaggaatggctctcttcgccaacaactttacaaggaaatcaaggtcgctagtgtagactcatttcagggtagagagaaagactacattattctatcttgtgttagaagcaatgagcaccagtgtaagcagttgatacatgaaaccatcaaggctctattgatgtggaatattcctggatgggatctattgttcatttatttgtatctctggagggaggccctagaggtatataacttgtga

SEQ ID NO: 33632 - DNA, 330 bp, Zea mays
  Peptide Sequence Number=SeqID_77007
atgctgctcgaccactaccaagacgttgccgctggcgtcaagtgcggagagggcgtcgagcctgtccacggcgagcagcaaaagggcagggctgcgtccatggcaccatgggggggtgagcgacagggaggagaggctgggagtggcgggctgacaagctgcagagatggagaggagcagagaagatggggcggcgtcaaagctgctggaactagggcaagcgcagctagggctgatggcggccatgggagagacgccgagagagggctagagaggatgaggctggggcgtgcacaggagatagaagacaggataagggagattggataa

SEQ ID NO: 33633 - DNA, 204 bp, Zea mays
  Peptide Sequence Number=SeqID_77008
atggctgtgctgaatttgctacggaaagttccagttgaatatgctcattgctactatgaaaccgttttgttgtttgctgtccgccaccgtattcagggtcttcgcctgcctctatgggctcaaggcggacaggggcctacaagattggttcacatcctgcgggaaaggaattgcgagccttgtgttggaaaagtcgaagactga

SEQ ID NO: 33634 - DNA, 528 bp, Zea mays
  Peptide Sequence Number=SeqID_77009
atgggtcaagaggagaagaaagacacaaagaaaactccgagctcaagttcctcaagtgaagaagaggaatatggagaaggagatgatgaagatgatcaagcctccacatcatcctccaaggacgaagaaacagtccaatgcatcagaaaggtcgaggatcttttctttaacattgataggaaaagacatggtgattcatccttcgattgggtcgccgatggaagggagcgggtcgccgtcagagagcatgtcaccgaaggggcccttccagtcgtggtcatcgctggtggggctgccgatgtcgcgggggggggccttccagccgcggtcgtcgccggtgagatcgccgattggtgggagcgggtcgccgatgcggccgtcgccgggggagcccttcctgccgcggtcgtcaccggtgtgggagaggagttggcagatggggccggcttcggcggaggcgggcagttcgtcggcgcccttccagccgttgccgtcgcggagcagttcgcagacgacctaccaacatag

SEQ ID NO: 33635 - DNA, 420 bp, Zea mays
  Peptide Sequence Number=SeqID_77010
atggctaaaagtaagaagggtagcggttcttctcctcgctctggcgacaaacgcaaacgtgagccgactcctccttcggaggacttcggcgactcggagtactcggaggaggagttctcctccgagtccgagggatccccggctcccgtctctcccccggcgtcgtctcatgattcagacgactcccaggggattgccgcggaggtctggacctacatccgggccatcgagcgctctgggctcgaaggctcggatgagtcggattactcctcggatgaggaggactcctcggactcgtacgaggaggacagcggcggcgacggtggtgatggcggcgacgacagcggcaagggcagcgacggcggcagcaagggcgaccatggcggcggcagcaagggcagcaacaagaccagtggctag

SEQ ID NO: 33636 - DNA, 1788 bp, Zea mays
  Peptide Sequence Number=SeqID_77011
atgtccacacggagtttgcttgggaggtgtggggtgcttctgtgtgggctctttgccttgctgatctggcacctgggagtgggaagttgttggaccataaaattgaagggtggtaaggaggtcctagaagcattagatggagttcgcacaaggcctggtatgtacattgggagcacaggaccacgcggcttgcatcatctggtttatgaaatcttggataatgctgtggatgaagctcaagcgggccatgcttcgaagattgatgtagttcttcatgatgacaattctgtcagtgtaacagacaacggccgtggggtagagattcctactgatatgcacccccagacgaagaaatcttgtgtggagactgtcttaacattaatgcacgctggtggcaaatttggaggttcaaaaagtggttacagtgtctctggagggcttcatggtgttggcttatcagttgttaatgctttatcagagacacttgaagttactgtttggcgtgatgggaaggaacacagacaaagctattcgcgggggaaaccaaccactaggctaactagtagcacactgactggtgaaacaagctctcgtcaagggacgcgcatcagattttggcctgataaagatatatttaccaccacgatcgattttgacttcaatacaatctccagtcgcatacgggagcttgcctttctaaatcctgagctaacaataatcttgacaaaggaagaagggcacacagttcaacgcaacgaatattgttatgctggtggccttgttgaatatgttaaatggttgaatactgacaagaaacccctgcatgacccgattgcgttcagaaaggagttggatggtataacagtggatgtctcccttcaatggtcctctgattcctactctgatacagtgctaggatacgcaaacagtatccgcactattgatggtggtactcatattgatggtctaaaggcttcattgacgagaaccattaataaccttgcaaagaagtcgaagactattaaggataaggatattaccttgagtggggagcatgtaagagaaggaatgacatgcatcatttcagtgaaggtccctagtccagagtttgagggtcaaacaaagacaaggttgggaaatccagaagtacggagaatagttgagcagtctgttcaagaaaacttaacagagtacttagagcttcatccagatgttctggattcaatcctatcaaagtcccttaatgctctcaaggctgcgttggcagccaagcgtgctagggaactagtcaggacaaagagtgtgttgaaatcttcatcactccctgggaaacttgctgattgtgcatcagctaatcctgaagaatctgaaatctttattgtcgaaggtgattctgcgggcggtagtgcaaagcaaggacgggatagaagattccaggctattttgcctctaagaggtaaaattctcaacattgaaagaagggatgaagcagccatgtacaaaaatgaagagatccaaaaccttattcttgcacttggattaggagtgaagggtgaggattttaagaaggaggctctccggtatcataagatagttatacttactgacgctgatgttgatggagcacatatccggactctcctccttactttcttcttcagatatcaacttagaataggtgctgagaacaggtcaaacatgaaggaaagtctatggcggtttttcatgggaaagtccttccagtactctattggcaatgtagaaaaatccacaaataaaacagggtga

SEQ ID NO: 33637 - DNA, 345 bp, Zea mays
  Peptide Sequence Number=SeqID_77012
atggcgctactcctccggccgattcctccccctccccgcctccgcgcgctcctcggccgcctcctctccactggcgccagtctatttccctcccgcatgctccccgcgccccgctccaccgccgccgtccctcggctcctgtttgggcccagtgctgtggccgcggcagccacgcggcgcaatggggtccgggtgcgtgcgttcatggcgtcaacgacggcgtctgaggcgatgcacgagaagcaggtgtccgcggagtacactgctgccaatgtccaggaatggggaatctacctcctgttgctgcctactgccgagtgctgcttgcagcgtgcctacctctag

SEQ ID NO: 33638 - DNA, 822 bp, Zea mays
  Peptide Sequence Number=SeqID_77013
atgaaggccgcgcgggggagacgctgggaaagccgcacctccacgcccccatcaatcccgcccaccaccaagctcgccgcctaccaaacccgccagctccgcgcgagatccgccacagttatgccgcgcgagggagacggcgggatagccgccggccagatccgcttgctcgcgagggagaggaaggaaggccgctcggggggaaacgccgggagagccgctacctccgcgcccccgccaatcccgccgcccaccaaccccgtcctcgagcccgcccccctccaagctcgccccattccatactcggcgacaggattcaccgcgctcccttccgcgcctgctattaaaaggatggacacaggtgatccctccaacccatccccactctcctcagatccaccgattcacagccgttcttgcatttctcagagagaattccgcatattcgcgctcagattctcgccctctgctgatgcttctgaattgtgttatgagcagctggagctggagggcatccagagaatctcggcaagaaggaaggaacaggagcaggtgcgtcgtgaggcgacggaggacctggccgaggatctgtcagaaggcgagaagggagacaccatcggcgagcttgcgccggttgagacgaccaagaagaagttccagaggaacttctctgaccttaccgtctggtctgacgacaataaggagaagaagctttacattgtgctcatcagctggtatatgcccgaggagattccgaaggtcttggaaatcagcggcgagcgcagcctcatctacaacttcttctcctaccccgtgtattaa

SEQ ID NO: 33639 - DNA, 138 bp, Zea mays
  Peptide Sequence Number=SeqID_77014
atggttgcactatctaattatctcggggtgttacctgattgtctctctgttgcatcacagaatctccactccaacgaaggtgatgttcacatttattttccccttcgtatcattaccattgtgtatgttaagcagtaa

SEQ ID NO: 33640 - DNA, 105 bp, Zea mays
  Peptide Sequence Number=SeqID_77015
atggaggtggtggagcaggagatgggtctacgatacaagacgtcggcaccatcgttggttctacttatcatcgaggttggcgagtgccggctagctgactattga

SEQ ID NO: 33641 - DNA, 351 bp, Zea mays
  Peptide Sequence Number=SeqID_77016
atggaggaggccaggaggggcagggggcatggtgaacggaacagcgaccagaagggaaggggcggcatcttgtacaggcaagcagaaccagctcaaaagcgtgagcagcaggcggggtgtggatccttctcggcagaaaccccggcgaaggctcaggccgaccacgcttccgctgcccaggttgcgccgcttctcatctgcgacggagacaaggggggatacatcaggatccgctcgcttatcatgcagctcattaaagcaaacaaacaagaagccgcagcaagccgcagcgaacaagctaatagcaaagttatgttctccgccgcaaaagcgaaggtcgagctggtttaa

SEQ ID NO: 33642 - DNA, 777 bp, Zea mays
  Peptide Sequence Number=SeqID_77017
atgagccgcgcgctcctctcccacgtcctccaccgtccgccgcacttcgcgtacacctgcgcggttgaagccgttcccggccccaccgaggaggtgcctgctcctcatgcaaggaaatcgaggatgagacggctccaccagatccagaagacggaagtaaagaagagaagcgaaccaaagcaagcaagcttcaagaacaaggtattggatcaacaactcctagctgattcgattcttgagtttgttctgatccgatcttcccttcctattcagcgctgccctattcgattccatttcgtgttcctctgtgctgctgcaggggagggggaggaggaggaggccacggggctgccgtccgacgtgccgcgcggccacttcgcggtgtacgtgggcgagcggcggcgccggttcgtggtgcccatcgcgctgctggaccgccccgagttccggtccctgctgcggcgtgccgaggaggagttcgggttcgcgggcgccggcggcggcggcggcctcgtcctcccctgcgaggaggggagggggaggaggaggaggccacggggctgccgtccgacgtgccgcgcggccgcggtgtacgtgggcgagcggcggcgccggttcgtggtgcccatcgcgctgctggaccgccccgagttccagtccctattgcggcgcgccgaggaggagttcgggttcgcgggcggcggcggcgccctcgtcctcccctgcgaggaggtcgccttccgctccctcacctccgtgctcgcctgcacccggtga

SEQ ID NO: 33643 - DNA, 795 bp, Zea mays
  Peptide Sequence Number=SeqID_77018
atgaaggggcctcgatctccaagtgcatcagtgttggggggtacaggtttgaatgtgggtctgaacgctactgaagaaaatgcagtgacaacggttcaggagactgagttcagttcagccgctagcgttgatgctattcagttagctccacaggcggctgaaacgaacattctttcatatgtgcataaacaattctttgacaaacttgccaaagaggtctccagccttcttgcaacacctgatgatccttctttgacgttgaagagtgcccaatcttctgctgttatcccacagcgcagttgtcgacttgcgggggtgggggttcaatatgacaagcaggatttatgctcaaggttcactaaaagagtcatgaaggccctgaaagtgattggggactcggagggaatcagccaacaagccatagaagactatctgaaagttttctctaaagaattgcctctttctcatgttgaagcattggcagcattctttggttgggcgagtgctgtgtatgaggactcagatcattgcccactgattcttgggcttaacagtaagtgttctggcaagcgtagattcatgtggcttaatagtaagtttatcaaggttggagtgataaaaagggtggacaaatccatgactgttgacctggacttcttgggtttaccctctcatgacttgactgatttggatgcatcgatctatgaaaaggaggttcttgaatctataaagaagcaaccatcatacaaggcgccaggtccagatgggttcatacttcataggaaggttttataa

SEQ ID NO: 33644 - DNA, 969 bp, Zea mays
  Peptide Sequence Number=SeqID_77019
atgagcaggcttgcgtcggggctccagcgcttgcggaggtcgtcgtcgcagtgggaggtgctgtggtcggcgctcgcgtcatgcggcctagtgcttttctcgcagctcgccgtggcgatggttccccgtctcttccctttcctctccctcctcgcgatgctccccatcgcggggttggtgttcatcgcggctatcgtgctcggccgcctgtggaggaggttcatcggggtggcggcgtcggccccgctcttcgtgctcttcaacatcctcctattgtggggcgtttacgtattcgtaatccggagagaaacttcttctctgctggacatgctaataaatgcagagtgtgcacttcttctgtggggattctacaggattttatctggtgatcctggtattgttgcttgtgattcttcatatttggaagaagctggctgcaaggattttgtggaagctatatactcgagtgagaaactcccaatgctctcaagggtcaggcagtgtacctggtgcaaagcaaacattaggggctatgaccatcattgtcctgcatttggtacttgcataggacagaaaaatcatcgtctatttatggcccttttgacaggatttgttgttgctgaatcaacatatacgatgtgctcaacaaaatatattaccagatgcatcagttcagggactataagatcggagaatcctgtatctttaaacatagtaatcagtacaacgctcttctctatcctccaggtcctctggcagattgtattcttgatgtggcacatatattgcatctgcttcaacatcaagacagatgagtggctaaaaggtgagattttccagattaactggaagaaatatcctgaattccagatgaaggaacaacctcgatcagattctgaagtcaaatttgtgaacccatatgacaagggcatgctgtgtaacataagagaatttctaaagccggaatga

SEQ ID NO: 33645 - DNA, 189 bp, Zea mays
  Peptide Sequence Number=SeqID_77020
atgtccgaggcggtgaactggcgcctggacattctgcggccaccgattgggaactacagcgggagcgtggatgcgttggccgtcgatggcgaggactgcctggcgaggtatgacatactggaatccattggcagcgatatcaaggcgtccatcatggagaaattccctactatattcagtaaacagtag

SEQ ID NO: 33646 - DNA, 726 bp, Zea mays
  Peptide Sequence Number=SeqID_77021
atggaggggctcggctcgatggcaggctatgggtccgcaaagacccgctgctgggaggagcggagacgaagggcggcgggtcctcgtcgcggcaggctagcgcctcggtacccaaccccgtggtccacgctgggaggtgctgcgggggctgctgacgctatgggagcggaacaggatgaattctctatgcctacttctagagtgatgttcaaagaggttgacgctccttcaccatccccagctttgtggaatggaccacaggaggctgggaagaaagtggaagaggaatttagcacttaccctctgtcagtcctaatgatgagcgttaaaaacaacaccaagtattattatgacacagatactgaaagcaaagatggcttgttcagtcgggcagcggcagcagagggggtggggccattgacggaggcggagaggagaacccatcgatttggtggcgctcatattaaagagcccgaagaagtgaagctgctcaagaacctgtctcaccccaacattgttagatatcttgtgactgttcgtgaggaagacacactaaacattttgctagaatttgttcctggagggcctattaattcagtcgcttttggggaagctcggttcattcccagagcattttacttcttcaaagcaaccttggatgaaaattccagtttagctgatattgaggtagctctgatcccaatcttggcaaggtcatgtgaatag

SEQ ID NO: 33647 - DNA, 501 bp, Zea mays
  Peptide Sequence Number=SeqID_77022
atggaacatacggacctctctgttctctgtcggcaaagaacagaggacttctctatcggtgaagaaacaggggagagaagcaagcagcagggagtgtctccggtgtccgcgcagggagggggtctccggcgtccgtgcagggagggggtctccagcatccgcgcaggaggcgtccgcgcagggagctccggcgtccgcgcagggagggggtctccggcgtccgcgcagggagaggggtctccggcgtccggcggagaagcaagcagggggtatcccgtcctccggcgtccgcaagcagggggtaaacctatcgcgtcttccctttgccttatgcgccgctcccttatcccctcccacacgcgcgctcttcccctatcgcgcactttcccgcgcgcttttccagctcgcacgcgcgccgcacgcctaggggcccgcctctacgaccgcctggcctctgggcgacgtggaatccgcgtggaatcgacgccaagcgccgcctag

SEQ ID NO: 33648 - DNA, 324 bp, Zea mays
  Peptide Sequence Number=SeqID_77023
atggaggagtcactcaagctgttggggaccttcggcatccgaaggtcctcaaaaacaggatttaacagtatctctggagtacaatgtgtgaacaggtatcttcggactaaagtcggcattgctgtagaccggaataatacgaaggttgataccgagccgaaggtgaacagtatccccgtactgttcacgctgactgggcattcactttttgcgtcacgcttgtattgtcatcctctctcgattgaaggtacgtccttcataaccttcgtccgtaaatcattatatcctaagggaaataatgcttcggaggacgaaggactataa

SEQ ID NO: 33649 - DNA, 303 bp, Zea mays
  Peptide Sequence Number=SeqID_77024
atgcagccaaagctcagctcagtctggcacaccggactgtccagtggtgcaccggacaatgtccggtgcgccaagctggtctccggtgaaaaggccgctcttgggaaaagtttagcggcgtacggctataattcaccggactgtctgagatttgagctctattcgagtcaaggactccctgagttgtcatttgagctcaagtcttctcttgtgtgcgtggccttactccgtgctttcattgtgatctttgttgtaagggcgagagactccaaccttgtgcagattcctcgcaaacgggaataa

SEQ ID NO: 33650 - DNA, 1805 bp, Zea mays
  Peptide Sequence Number=SeqID_77025
atgtcgtcgagcacgatccgcaaggccctgggcgcggtgaaggaccagaccagcatcggcctcgccaaggtcaccagcaacatcgcgcccgagctggacgtgctcatcgtcaaggccacgagccacgacgacgagccggccgaggagcgccacatccgcgagatcctccacctcacatccggatcccgcgcccacgtcgctgctgccgtggcaggctgctcccgcaggctctcccgcacccgcgactacgtggtcgcgctcaagtcgctcatgctcgtgcaccgcctcctggccgatggcgacccgtccttccaccgcgagctcctccacgccacacgccggggcacccgcctgctcaacctctccgattttcgggacgaggcgcactctggatcctgggatcactctgcctttgtgcgcacctacgcgctctaccttgaccagcgcctcgagttcttcctccatgagcgcaagcaggggtcaaatgctggcagcagcagcagcaccaatggtccatcaccgcgggaccgtgaccgctggggttcacctgatccctatggccgccgctctccctcctactcgtcaccccctggggtccttgctcgtatgcaccacctacagcagctgcttgacaggttccttgcttgccgtcccaccggtggggcgaagcacagcaggatggtgctggttgcgctgtatcagattgtgagggagagcttccagctctacgccgatatctgcgaggtgctggcggtgctgctggacaggttctttgacatggagtatgctgaatgcgtgaaggcttttgaggcttatgctagtgctgcaaagcagatcgatgagctctgtgcattctatgcatggtgtaaagataccggagttgcaaggtcatctgagtacccagaggtgcagcgggtcaccgataagttgctggagacgctggaagaatttatgagggaccgggcaaagaggcccaagagcccatcaccggagcctgaacctgagcctgtcaaggaagaacctgagccagatatgaacagcatcaaggcgcttccagcaccagaagattataaggagcctgaacctgagaaggtggaggaagaggtgaagccagagccacccctgcagccacagggtgacttggtggatctcagagaagatactgttagtgcagatgagcaaggtaacaggcttgctctagctctcttccaggggccaccagctgctggtggaagcaacggttcatgggaggctttcccttcaaatggtggcaacgaggtgacttcggcctggcagaaccctgcagctgaacctgggaaggctgattgggagcttgcccttgtagagacagcaagcaacttgtccaatcagaagccagcaatgtcaggtggcatggacccgctgctgctgaatggtatgtatgaccagggtgttgtgcgccagcatgtcggtgcacaggtgaccaccgggagtgccagcagtgtcgcgctgcctgctcctggacagaagactcagatgcttgctctgcccgcaccggatggttcgatgcagactgttggtggtgatcccttcgcggcgtcccttgccgtgccaccgccgtcctatgtgcagatggcagatttggagaagaagcaacagctcttgacgcaggagcaaattatgtggcagcagtaccagagagacggcatgcaagggcaatcgagcctgaacaggctcgaccgcgcccccaacccggccatgccctacgggatgcccatggcatacaacacgaaccccatgccaatggcttacaccgggaacactgg

SEQ ID NO: 33651 - DNA, 1617 bp, Zea mays
  Peptide Sequence Number=SeqID_77026
cccaccggcgatctgctctccggccgtgctccggcgacctctggtgcccctgctcaggcctcctcttccctcttcctcaagaaggccgcaagaagcggcgtttggatggagcagcccgagcagctctatcagcagcagcagctaagtaggctgagagaggagcgagatgagaccgaggtgcgaccactagctgtcgatccccggttatttgatcttcagtgtgctacagcggccaggttgtcagctcagattgctctgcaagcgcaccggctattgggtctccctgccttcctgctagcagccagtgcagactctgaggttcacctctcatatttgcctagacttctgactcttctgacttccagcggcagatatgttgaggaatgggttcgagttttctatgcttctgtatgcatcgaccctgatcaccagtggatgaggttctgctttgagcgagaggatgttatacttcatgccaaccagattcaccagctgtttggattcaacgagtcatcgactcgtcttcacagcttgtgctacggtacctctgatcctcctcgtcgccctcacggcggagttcctccagctacatctcacgtcgcggccttgttccgaccgcccttctcagatgggttgcgacattctccggccgatttcactacagcggccaagtacctatatcagctcatgagacggacgcttttgccatggatgggttacagggaggctgctacacatatccagctctggctcctcggtgccctgatctctcactcagagtttgatgttgttgatttccttatctgtgagatagaggacatggtattggatggacttcgtgcccggcgacagctgccatatgctcactatctctgccacatcttcgcacagctgatctggccaccgcagttccagggcacccttgaggcctcacgcctcttctttggctcctaccgtccagcccctgaggacccattgccggcacctgatccaatgacagatactcagggcgcaacagttcccgatgatgatgatgatgatgattttgggattccgccttcgcctccccgctcccatgatcatgaggctgggagttccagtgttgttcctgctgcccctcctgcggttgaccctgctctgtctgtgatccttcaggcccttacacagcagcagactcttatggcctccgagcaagctcgactggcatccgagcaagctcgccaggcagctgagcaggctcatagggctgagcaccgagctttcatgactcacattcttcagcataccggtgttcagatccctctggttcagtctacaccccctccagctcttcaggcggctgttgtgccagccattcaggcaggaccccctcttccttcagttggtccttcttcctctccgctctggccggtcaccctggttttctcgtcgccggtcatcagctccatcagcgctcagccgctagtgccactagctcctgctattaccactgctgttgtggcggtgtctgtgacctcttcagctccggtagcttttgcaacgcagcctccgtccgagtcagtaccagctccaggttctacggcagatcctgaatccgagactgactctgacccttag

SEQ ID NO: 33652 - DNA, 504 bp, Zea mays
  Peptide Sequence Number=SeqID_77027
atggaaacgagccgcacgaggcctaaagccgcacagggggcgcagtcgggcaagcgcgcgtcagtatggtccaggggtacttccgaggcaaacaaagaacaggccatgttgcctccaagagggtggaactcgtatgattctttttcatggattgtagacgaaaatgcatacctgcaaaatgcacagatcatgacagagaagttactcccacatggatatcagtatgcagttattgatttcctctggtaccggaaatatgttgacggtgcatacacagattcctatggatttgacaacattgatgaatggggtcgaccttttccggaccttcaaagatttccatcgtctagagttgatagagggttcagtcaaattgccagtaaggttcatggaatgggcttgaaatttggcatccatttgatgaaagggataagtgtgcaggctgttaatgctgacacgcctatcttggacataaagacggaggactgcacgtcattatattaa

SEQ ID NO: 33653 - DNA, 273 bp, Zea mays
  Peptide Sequence Number=SeqID_77028
atgacctcatcgggagtcgacacgcagccggaagcacagcaggcgcactacctagagtcacactccccaacaacacagtgccactccactccaaggaagtgcttgcctcccgctctctgcctctcctaccaatttcagctcagctcagctctgttctgctcccgcagcaccagtacagaacaccccagaggcagcgagtcctgttcggtgtccggctggaaggccatgggggctccaacgtcttctggaagtggtgaagcagcgcgcgtctga

SEQ ID NO: 33654 - DNA, 441 bp, Zea mays
  Peptide Sequence Number=SeqID_77029
atgggcaagaacaacaagcgcaagcgtgaaccgactcctccatcggaggagtttggtgactcggaatactcggaggaggagttctcctccgagcccgaggggtctccggctcccgtctctcccccggcgtcgtctgatgactcggacgactcccaggggatagccgcggaggtctggacgtacatccgagctgtcgagcgcgccgggctcgaaggctcggatgagtcggagtactcctcggatgaggaggactcggacggcggcgacgagggtgaagacgacgacgacgacgacgacgacgacgacggcgacgacagtggcaggggcggcggcgacggcggcagggacagcaccaagggcgacagcaggggcagcaccaagggcagcagcaggggcagcaccaagggcggcggcggcggcaggggcagggccagtggctag

SEQ ID NO: 33655 - DNA, 426 bp, Zea mays
  Peptide Sequence Number=SeqID_77030
atgagcgaaaggaattgggcggagactcactggatagctcggtccacgcgcggcggcggaagaccaaagtccggtgaggtcgatctcgggcctccggtgaagtccggtcgggtccgagggcttggcaagcttcacgggctactggcggagctagccgaagcactggcttgcccggaagatggctggggtgggctggccacggtggccaaagctctggcggcaatggcgggcggaattaagctcgccggagctaaggggaagtggctggccggtgaggccgcggtcgaacacgtgttcccgttgcctctgcccctgttcaagcgccgattgggagcaaatcttcgcaaatttgggcaagatcactgcaagggatttgttcaccagaccaagctttgtcttttgtgtatggacgacgtgcggttttag

SEQ ID NO: 33656 - DNA, 771 bp, Zea mays
  Peptide Sequence Number=SeqID_77031
atggcctcacgttcccaccacgccgtgcaggcaaacatggcgcggatcctggaggacgcgatcgcctacgtgggggtgctgcgggccacggtcgcggggctcgaggcgcgcgccgcgttcgcgaggtcagcgcggacggccgcgcccgccgacgtgctcgtggctaggaaggcgtcgtgcttcgtcgtccgcctggcggaagcgccgcggcgcgctgacgcgcgtgctggaggtgttccaacggcacggtctgcccgtcctcacggccgcggtgaccagcggtggcggggaggccgtggtcacgatcaccaccgcgccagtgctgccgagattccggggcttagcccgagtccgagccctgggtcgggcggagcggagttcgtcgtcttccgtggcttagcccgagtccgagccctgggtcgggcggagcggagttcgccgtcttccggggccttgcccgagtccgagccctgggtcggacggagcggagttcgccgtcttccggggcctaacccgagtccgagccctaggtcgggcggagcgaagttcgtcgtcttccggggcttagcccgagtccgagccctgggtcgggcggagcggagtttcctatggcgcctttggcaaggcctgacgtcctgtcagtctcactctgtcaagtggcactgcagtcggagtggcgcaggcggcgctgtccttctatcagaccggtcagtggagcggcgaagtgacggcggtcacttcggctctgccggggggcgcacgtcaggataa

SEQ ID NO: 33657 - DNA, 204 bp, Zea mays
  Peptide Sequence Number=SeqID_77032
atgaaggaaaaagaaagggtcatcgtgccttcaggaaatgcgcgggagcaacaacaacttggaagaggagacttaaatcgcaacgctggagagaatggtggctcaggcagcagggaagggaaggatggagccaacaatgccagaggggtagaggagaggatggagaacatatctgtgattaagcacgacccttgtgccaattga

SEQ ID NO: 33658 - DNA, 1236 bp, Zea mays
  Peptide Sequence Number=SeqID_77033
atgttcgtggtcgaggacaagggcggcgccatcgcgctgatgctggcgtcgctgctgttcctgggcacgtggccggccgtgctgacgctgctggagcgccgaggccggctgccgcagcacacgtacctggactactccgtcacgaacctcctcgcggccgtgctcatcgcgctcaccttcggccagctcgggggcgccaggcgcggcatgcccaacttcctcacgcagctcggccagcccaactggccttccgtgctgttcgccatggccggaggcgtcgtgctcagcgtcgggaacctctccacccagtacgcttgggcctacgtcggtctctccgtcaccgaggtcgtcagctccagcatggtggtcgtcattggcacgacgctgaactacttcctggacaaccgcatcaacagggcagagattctgtttcccggcgtggcatgcttccttgttgctgtcatccttggctctgctgtccacgcctccaacgcagctgacaacgaggagaagctcagtgcctccacaaatgcctaccagcttggatgctcattatctgaaggagaagacaaaaaaaaatctctgatttcagatgttgccaaggacttggagaatggagtctctggaacaaagcaagctgacaaagcggaggcaggcaccgcagaatacctcattcaactcgaagagcggcggtcaatcaaggtattcggttcaaacacgttcatcggtctggggatcgtgttcttcgcgggggcgtgcttctcgctcttctccccggcgttcaacctggcaaccaacgaccagtggcgcacgctcaggggcggcgtgccgcacctggtggtctacaccgccttcttctacttctccgtcgcgtgcttcgccgtcggcgtcggcctcaacgtgctgttcctctaccgccccatggccggggtgcccaggtcctccctcggggcctacctcggggactgggacggccggcactgggcgctcctcgccggcctgctctgcggcttcggcaacggcctccagttcacgggcgggcaggccgcgggctacgccgccgccgacgcggtccaggcgctgccgctcgtcagcaccttctggggcgtactgctctttggggagtaccgcaagtcgtcgcggaagacgtacctcctgctcggcttcatgctcttcatgttcgtcgccgccgtcgccgtgctcatggcttcgtcaggtcacaggaccacagagtga

SEQ ID NO: 33659 - DNA, 1272 bp, Zea mays
  Peptide Sequence Number=SeqID_77034
atgtcactcgagttcaggtccgagtgcgatgacatcgaggaggccaagtcccccagcaacaccagcgtcgccgccgtcgccgtcaagaacggcgacgcctcggtctacaagatcatccacggctacctcaagcagaagaacaactccatcatcaaagtcgccgccaatgtcgcccggaaagcggcctccaacaaattatcgaggaagacctcggatgtcttcgacaccttgcttcagaagcagcaaagcaagtggggaaacaaggccgggccgctgctttcagggatctgttactgcatcgcctcctgcagcatgatattgctcaacaaggtggttctctccagctacaacttcgatgctggaatatcgttgatgctataccagaaccttataagtgtgctcattcttcttatacttgagctcttccgtgtcatttcaacggaggaactcacatggaagctgataaaagtctggattccggtgaatcttgttttcatcggtatgctactaactggaatgtacagtttgaagtacataaacgtcgcaatggtgacaatactaaagaacatgacaaatattataacggctataggagagatatatatattcaggaagggtcagaataagaaggtttgggctgcactgtttctgatgattgtatcagctgtatgtggggggattacagatctctctttccatctagttggctacacgtggcaaattctgaattgctttctaacagcaggctactcgcttacactaaggcgcttgatggatacagctaagcaatcaacaaaatctggctccctcaatgaagtttctatggtgttactcaacaatgcactctcaattccattcgcactcattttggttatagccttcaatgagtgggaatatgtttatcaagctgaggttatcagagagcctatgttctgggttgttgcaacagctagtggtttgctagggctagccatcagcttctcatcagtgtggtttttgcatcagactggtccaacaacgtatagtctcgttggttctctgaacaaggtacccatttcggttgctggtattttgctgttcaatgtccctttttgtaacatgacaatgccaaggcaggaggaactctgcaaggccaatcagcaactggaactccagtactccactactctgatcaagaaattgagcagaacgattattatactacacaataaaggaaggatttgtgtttccgacatggttgccaaccgggccctcttcaggaattcatggtaa

SEQ ID NO: 33660 - DNA, 504 bp, Zea mays
  Peptide Sequence Number=SeqID_77035
atggctgcccctgatgacgggggcggtgtcggcgatgagggcacgacaaacgtggcagcaaaagtcgccactgctgcaagggaaccaaagcgctgttggcgcatgatcttgaattgtggccacgtgacctcacgctcgtcgtgttccagccgccagaaccaaatggggaaggaggggggtgctgcagtcgtcgacatggtagggtcgacgccaggggctggtacaccggtgctggtatatatggttgcccctagcgtcgtaagccatgcagctggtgatgaagacagccctgagggcgcaacgcaactgcctcgcaaacagatcgtcgaagtacgcttggtcgggaacccaaggacccacgagaggcagaggcgcagccgtgggccgctcatactacgtgacgttggtgtaggggttccggtagtagaggtagccggcgcgtacaacggggctgcacgcccggacgagccactaccgctcgacatcgggtccggttgggtctag

SEQ ID NO: 33661 - DNA, 279 bp, Zea mays
  Peptide Sequence Number=SeqID_77036
atgactctgctgcgagccaacgcaggtcttggcctcgcctttgtgagccccctggtgagtgggagtgctcaccacagttggtggaccaccttcgccatgatgaggttgatgaagtggctgaccggtggggtcaacctcacatgtgtttggctgttggaagacaacagcaacctcgaaagccactatgtgcggctggaggtagatggtggtgacctcaagcacattggaacttgtagggtgctgatggaggcaacctcaaacgccatgggtgagacctag

SEQ ID NO: 33662 - DNA, 1125 bp, Zea mays
  Peptide Sequence Number=SeqID_77037
atgcagagcgggagtgcgggacaccaacccaggcgcctaaagctaaaggccctctccaaaaccacgccgcgccgccgcattcccgcaagcatctcgccggcggaggcggcgctcccgatgctcgagtctgacgtccaactcggtagctcccgtgcgtacccgggggtccgggcccccggagcgtccaaggaagcgcaagaggggcaccgaggccccgtcgcccaggcgcgcgacgcggagctcggcggcggcgcaagtggacgtggaaggcgcggtggcgtgggcacggcgcgcggccgcgggggagcggtcggtggtgtgcgggcgcaaccgtcgcctcgacgtcgacttggagtcgctggggacggtgatcctgttgttgtgattctgtatccgaataacatgccatttttagttggaagggccaagattgtctgtatcttccatttctcgtgcgttattaattctgaaacaaaaaagaaaccacaaataagcacaaagaaacatattggaatagaccctgtcagatgtcaagctgctgtccctgagtggattaatgacccatctgaggaatgtaaggctaactacagaaatgataatgataccttgcaaaggatgggcacagtggtcaggctgccacccactttggagccaccgaaggcaaggaaagcagtgaatgacatgtgtaaatgctatcatcctggatctgaggcctacgtagaagttaatgtaaaagaggcctggaagagggtcaagtatcaattgggtgagcaggctttcaaaaactgtgggtttggtgcgatgggtgagcgagttctgaagttatggactgcagaagacaagaaaaaacttgctgattttgagaagttgattcctcagagtaagagtactattgaagacttcatggaggttgccttgaagcagtttagctcagagagaacaacagacttggctaagtattgctacaacgtttttcttcctagaagatttgccagcctgaatagagcagggtctacaaactccatagatgcgatttcagatgatgaaggcaatagccaagatgataacaaagtgcatctttctgaagagaatggtaaaagctctggatcgtctttgaagaggtag

SEQ ID NO: 33663 - DNA, 1386 bp, Zea mays
  Peptide Sequence Number=SeqID_77038
atggatttccactccctctcccggcgagaacttcaggcgctctgcaagagcaacggcatccgtgccaacatgtccaacgcggccatggcggaagcgcttaggtgcctccccgcggtggacaggatcgacgagatcgggagcacggcgccaccgccggtatcggcgatgaaggaacagacgccggatgcggaagaggcggtcggaggggagcaggagcacgggtgcccgctccctcgcggcggccgtgcacgggggaagagaaggaaggccggggcacggaagagtaagacggagggggatgaggaggaggtgatggtgccgggcccacagaccttgccgggacccaagatgacggtggcacgggaggctgctgcggcacctgtggatgatgcggaagaggcggccgtaggaattaggacgagaaggtcagcgagatccaaggtgaaggtcgcgctggatcagaaagaggaggacgtacaagcggcggcagcccggaaggagcagaaagtttcagataagagctgcgaggattcagaagagcatgcaatagtagtaggtgtggtggaggaagaagaggtcagaaagccacaggaaggtcaaaacgtgacgaggagagccgcgccatataagacacatgaggatttgcagccggatcagaggacggcggaagagttgtccatggcaaagaaaaggacgagaaggtccacaagatccaaggtagcagcggcagcacagaaggggcagaaagctgattcttctgacacaaccgttggacctgaaattgatcctaaatatgatgaagttgttcccaaggtggaggaggccacaaaaccacaggaaggcaagaatgtcactaagagggctacagcttatatttacaaggcacacgaggaggtgcagacaggccaggtgacagcggcacccgaagctacggcagaagaagtggccacgacaaagagaaggaggaggaggtcaacaagatccaaggtgggggcggcagcacggaaggctcagaaagtcaacgggtctacagtaagtgatgatcctaaggaagagcaagtggttgaggtgatagaggaagggacaacaaagcacaatgaagaagaacgagagcaaattaacaacgttcggcagtttgcttccttgccaaaactggaggactcaccaatccttggcatcgtgtccaagcccaatacagcagatgcttcagacaaggcaccggttgcacatcaggaggctagcaaggaagatcgtttcactttcactggtgaggctgatgtgtccaatcttcttgtcaacacacttgacagatttgcaaagcctgtgtatgagtccagagtcaaagaggagaagaaatgcagtgagtgttggtggatgcttctataa

SEQ ID NO: 33664 - DNA, 507 bp, Zea mays
  Peptide Sequence Number=SeqID_77039
atggcggaaaaaagaaccgacttaaaggggaaaagactatctggtcctcgttgggttgtccataagtcaatagtaaatatgaaaggcatgaatcatttgagaaacaagtccccaacattggcgcccacctccggtgtactcacttccacaaccttcggcaaagcactgatcttcgtcatgccgccgaagaagataacagcgccaggggctgccgcactgcagccactcgacacaaaccaggagactctctctctctccgagaggctcgaagccagaagagaaaggccaccagtccaacgttccaggaggaggagttggaccaagaaatcaggaacatggaaatcatccatcaataagtgcaaaggaagaaggagaagatggcttggctggccgatcttcaaaggaagatcgacaaagctactgaagaagtgcgccatcttgctcaagatgaccaagaccgaagaccccaaaatagggagcttcatcaagagggcttattcaacgtag

SEQ ID NO: 33665 - DNA, 753 bp, Zea mays
  Peptide Sequence Number=SeqID_77040
atgaacaaaaacactggcactcaaagtgccattacaaacggaaccccggttccccctccgcaggtacgaacaaccccattccatgggggaaggcctgcggagcaacagaagactgacgagcagctcgggacaggcggcgcctctggcaggagaagcgggcgacgcttcgccttcgccgtgataaccgcgccaaaaaagggaccgggaaagggggataccccgaaaaggatccttccctgtgaaggaaccgggctccgagcccccctactgatcagaggttcgaaggctggccctccgaggggttcaacagtcgcctcagatcgcgtgggccctacacccactactggtcagaggggttcgaaggctggcccccgaagggttcacagtcgcctcagacgccgagcgagggatgaccaggggtacgttcgatacataaccaaggctcgggctgcgctcccgagctcaccggagacaccatgttcggtgcccatcgagggtaacatggcgctctcccccctcctccttgcggaaaggcgacgtaggggcgtatgtaaaaaagccgagtctgtccctgatcgccctctcaccctgtgcggaggctcgagggctgctctcgcgaacccggctccggccgaatcgttgacagcgtcaacataccagcccgagagcttgggccccgaccgtgcacccgggctacggccagttcgcatgagggaacaaccagaccagccgaagcattacgcaaggcattaa

SEQ ID NO: 33666 - DNA, 279 bp, Zea mays
  Peptide Sequence Number=SeqID_77041
atggcgggtccgcgcccgaggccaggcgacgtgggggctcctccgaagctggggtcgagtatgtcttccgttgccgaggccgagcccgagcccctaggtcgggcgaggcggaggtcgttcggcagaggccagggcggagtccgagccctggggtcgggcgaagcggacccgagtccgagccctgggtcgggcggagcggagttcgccgtcttccgggccttagcccgagtccgagccctgggtcggacggagcggagttcgccgtcttccgggtcttag

SEQ ID NO: 33667 - DNA, 303 bp, Zea mays
  Peptide Sequence Number=SeqID_77042
atgccccgacttaaagatgaaaagaccgattggcccatgataatttgtgtcatgattgtaactagttgtaaaggacatgaatattatcatatgttgggggccttcttctccgctgaaggtcctctaagcaaaaacaccttcggcaaggccatatgcaagcaagcacaaaacgaagtgtcggcgtttcgagaccgtggggtccctgagccgatgagtgagtgtgccgcgtgccccagcccagatgggtcgagcgcgtgggcgagcgcgaaggggggagagcgaggtggccggagacgggcgtga

SEQ ID NO: 33668 - DNA, 129 bp, Zea mays
  Peptide Sequence Number=SeqID_77043
atgccactatgtcgaagctttatggatgatagcttcggcactgcttttgagaggatctgccgaaggatggtggtgacgaagattgataatccaaagcacattccgaaggctgctgaagctactctttaa
